(19) United States
(12) Patent Application Publication
(10) Pub. No.: US 2024/0009291 A1
(43) Pub. Date: Jan. 11, 2024

(54) COMPOSITIONS AND METHODS FOR REDUCING METHANE EMISSIONS IN RUMINANT POPULATIONS

(71) Applicant: Arkea Bio Corp., Charlestown, MA (US)

(72) Inventors: Colin South, Reno, NV (US); Matthew Dunn, Louisville, CO (US); Lauren Fitch, Malden, MA (US); Joseph Koos, Somerville, MA (US); Laura Holland, Exeter, RI (US); Brigid Arciero, Boulder, CO (US); James Spoonamore, Somerville, MA (US); Caitlin Allen, Somerville, MA (US); Alexander Hsu, Belmont, MA (US); Sara Tabandeh, Cambridge, MA (US); Frederick Richard Kearney, Walpole, MA (US)

(21) Appl. No.: 18/350,526

(22) Filed: Jul. 11, 2023

Related U.S. Application Data
(60) Provisional application No. 63/524,513, filed on Jun. 30, 2023.
(60) Provisional application No. 63/359,978, filed on Jul. 11, 2022.

(51) Int. Cl. A61K 39/02; A61K 9/50; A61K 9/24; A61K 9/28; A61K 9/20; A61P 31/04

(52) U.S. Cl. CPC A61K 39/0208; A61K 9/5052; A61K 9/209; A61K 9/2866; A61K 9/205; A61K 9/2054; A61K 9/2063; A61K 9/2009; A61P 31/04; A61K 2039/552

(57) ABSTRACT

The present invention is related to compositions and methods that reduce methane production in ruminant populations.

### CROSS-REFERENCE TO RELATED APPLICATIONS

[0001] This application claims the benefit of U.S. Provisional Application No. 63/359,978, filed Jul. 11, 2022; and U.S. Provisional Application No. 63/524,513, filed Jun. 30, 2023. The entire contents of each of said applications are incorporated herein in their entirety by this reference.

### INCORPORATION BY REFERENCE OF SEQUENCE LISTING

[0002] The application contains a Sequence Listing which has been submitted electronically in the form of an XML file, created Jul. 11, 2023, and named ARD-00201_SL.xml (23953 KB), the contents of which are incorporated herein by reference in their entirety.

### BACKGROUND OF THE INVENTION

[0003] Methane (CH₄) is the world's second most abundant greenhouse gas after carbon dioxide (CO₂), accounting for 16% of total greenhouse gas emissions. The potential global warming effect of CH₄ is 28-fold higher than that of CO₂. In addition, rumen CH₄ emissions from ruminants account for 13% to 19% of the global CH₄ emissions; therefore, ruminant feeding is a major factor in exacerbating global warming. Therefore, reducing rumen CH₄ emissions could decrease the rate of global warming, which would be of great significance to efforts to reduce global greenhouse gas emissions. CH₄ emissions also represent energy losses during ruminant farming. On average, approximately 8-12% of the energy consumed in feed is wasted in the form of CH₄ emissions.

[0004] Methane is formed in the ruminant fore-stomach (rumen) by methanogens, a subgroup of the Archaea. During normal rumen function, plant material is broken down by fiber-degrading microorganisms and fermented mainly to volatile fatty acids, ammonia, hydrogen (H₂) and CO₂. Rumen methanogens principally use H₂ to reduce CO₂ to CH₄ in a series of reactions that are coupled to ATP synthesis.

[0005] Attempts have been made to inhibit the action of methanogens in the rumen using a variety of interventions but most have failed, or met with only limited success, due to low efficacy, poor selectivity, toxicity of compounds against the host, or build-up of resistance to anti-methanogen compounds. Accordingly, there is a great need in the art for effective, selective, and safe compositions and methods for inhibiting methanogens in ruminant populations.

### SUMMARY OF THE INVENTION

[0006] The present invention is based, at least in part, on the discovery that vaccines (e.g., nucleic acid vaccines) of the present disclosure against a methanogen cell surface antigen or a fragment thereof (e.g., antigenic fragment, epitope), when administered to ruminants, are surprisingly effective in inducing immune response and antibody production against the methanogen, and reducing the methane production in ruminants.

[0007] Previous attempts to vaccinate ruminants have been made using freeze-dried or formaldehyde-killed methanogens or cell wall fractions. While such vaccination induced strong antibody responses, the vaccination demonstrated only up to 8% methane reduction in vivo, largely because immunodomiant antigens present on methanogens did not represent antigens that are targets for antibody-mediated neutralization of the growth of methanogens and/or production of methane.

[0008] The vaccines of the present disclosure take a targeted approach, aiming at least one cell surface protein or a fragment thereof (e.g., antigenic fragment, epitope) of at least one methanogen that is effective in neutralizing the methanogen, thereby increasing the specificity and effectiveness of the vaccine.

### BRIEF DESCRIPTION OF FIGURES

[0009] FIG. 1A shows a schematic diagram showing an exemplary design of the nucleoside-modified mRNA-LNP vaccines. A) Design of the nucleoside-modified mRNA-LNP vaccines. The important structures of mRNA are the 5′ cap (e.g., the 7-methylguanosine cap), the 5′ and 3′ untranslated regions (UTRs), sequence encoding at least one cell surface protein or a fragment thereof of at least one methanogen, and the polyA tail. mRNA cap is incorporated either in one step during transcription in the presence of CAP analogs (e.g., Clean-Cap) or in two steps, after IVT mRNA production, by enzymatic capping reaction. Replacement of native nucleosides in in-vitro-transcribed mRNA with chemically modified versions reduces immunogenicity and increases translation efficiency. A vaccine may comprise nucleoside-modified transcripts with substitution of uridines for N1-methyl pseudouridine is (1mψ). Each of these structural elements of mRNA can be optimized and modified to modulate the stability, translation capacity, and immunestimulatory profile of mRNA. B) Schematic depiction of mRNA vaccine encapsulated into LNP formulations for improved in vivo mRNA delivery, which are typically composed of (1) an ionizable or cationic lipid (e.g., SM-102 or ALC-0315), bearing tertiary or quaternary amines to encapsulate the polyanionic mRNA; (2) a helper lipid (e.g., helper lipid 1,2-distearoyl-snglycero-3-phosphocholine (DSPC)) that resembles the lipids in the cell membrane; (3) cholesterol to stabilize the lipid bilayer of the LNP; and (4) a polyethylene glycol (PEG)-lipid [e.g., (2-[(polyethylene glycol)-2000]-N,N-ditetradecylacetamide (PEG2000-DMA), or 1,2-dimyristoyl-rac-glycero3-methoxypolyethylene glycol-2000 (PEG2000-DMG)] to lend the nanoparticle a hydrating layer, improve colloidal stability, and reduce protein absorption. Adapted from Granados-Riveron and Aquino-Jarquin (2021) Biomedicine & Pharmacotherapy 142:111953.

[0010] FIG. 1B shows a schematic diagram of an exemplary RNA vaccine.

[0011] FIG. 2A-FIG. 2B show an exemplary IVT mRNA formulated in lipid nanoparticle vaccines using a cell-free production. FIG. 2A shows in vitro transcribed (IVT) mRNA contains five structural elements: a 5′ cap containing 7-methylguanosine linked through a triphosphate bridge to a 2′-O-methylated nucleoside, flanking 5′ and 3′ untranslated regions (UTRs), an open reading frame (ORF) and a polyA tail. FIG. 2A shows mRNA that is synthetically produced and formulated into vaccines. (1) Once the sequence of at least one cell surface protein of at least one methanogen is identified, said sequence is designed and inserted into a plasmid DNA construct. (2) Plasmid DNA is transcribed into mRNA by bacteriophage polymerases in vitro and (3) mRNA transcripts are purified by high performance liquid chromatography (HPLC) to remove contaminants and reactants. (4) Purified mRNA is mixed with lipids in a microfluidic mixer to form lipid nanoparticles. Rapid mixing causes the lipids to encapsulate mRNA instantaneously and precipitate as self-assembled nanoparticles. (5) The nanoparticle solution is dialysed or filtered to remove non-aqueous solvents and any unencapsulated mRNA and (6) the filtered mRNA vaccine solution is stored in sterilized vials. Adapted from Chaudhary et al. (2021) Nature Reviews, 20:817-838.

[0012] FIG. 3A-FIG. 3B show representative mRNA delivery vehicles contain cationic or ionizable molecules. FIG. 3A shows lipid nanoparticles encapsulate mRNA in their core. They consist of four components: ionizable lipids, e.g., DLin-MC3-DMA, SM-102, ALC-0315, A18-Iso5-2DC18, A6, or 3060i10; cholesterol or its variants, e.g., β-sitosterol or 20α-hydroxycholesterol; helper lipids, e.g., DSPC and DOPE; and PEGylated lipids, e.g., ALC-0159, PEG-DMG. FIG. 3B (upper panel) shows polymers, e.g., PEI, PBAE, PEG-PAsp(DET), or CART form polymer-mRNA complexes. FIG. 3B (bottom panel) shows cationic nanoemulsions containing a squalene core surrounded by an outer shell made of cationic lipid (for example, DOTAP) and surfactants, such as Tween 80 and Span 85. The mRNA adsorbs to the surface via electrostatic binding. Adapted from Chaudhary et al. (2021) Nature Reviews, 20:817-838.

[0013] FIG. 4 shows an exemplary mechanism by which immune response is elicited by an mRNA vaccine. For example, messenger RNA vaccines elicit immunity through transfection of antigen-presenting cells. (1) Injected mRNA vaccines are endocytosed by antigen-presenting cells. (2) After escaping the endosome and entering the cytosol, mRNA is translated into protein by the ribosome. The translated antigenic protein can stimulate the immune system in several ways. (3) Intracellular antigen is broken down into smaller fragments by the proteasome complex, and the fragments are displayed on the cell surface to cytotoxic T cells by major histocompatibility complex (MHC) class I proteins. (4) Activated cytotoxic T cells kill infected cells by secreting cytolytic molecules, such as perforin and granzyme. (5) Additionally, secreted antigens can be taken up by cells, degraded inside endosomes and presented on the cell surface to helper T cells by MHC class II proteins. (6) Helper T cells facilitate the clearance of circulating pathogens by stimulating B cells to produce neutralizing antibodies, and by activating phagocytes, such as macrophages, through inflammatory cytokines. BCR, B cell receptor; ER, endoplasmic reticulum; TCR, T cell receptor. Adapted from Chaudhary et al. (2021) Nature Reviews, 20:817-838.

[0014] FIG. 5 illustrates administration of a nucleic acid vaccine (501) encoding a methanogen cell surface protein to a ruminant (502), such as a cow. Once administered, expression of the methanogen cell surface protein elicits an immune response generating salivary antibodies (503) generated in the saliva (504) that are delivered to the rumen (505). In the rumen, salivary antibodies (503) bind to an reduce the fitness of ruminal methanogens (506) thereby decreasing eructated methane (507).

[0015] FIG. 6 illustrates an exemplary testing methodology. Nucleic acids, e.g., mRNA, (601) are mixed with lipids (602) to form lipid nanoparticles (603). The lipid nanoparticles (603) are formulated into a vaccine (604) and used to vaccinate a ruminant (605), such as a cow. Blood (606) is collected and clarified into serum (607). Sera antibodies (608) are combined with methanogens (609) and the result change in fitness is measured.

[0016] FIG. 7A shows an illustrative schematic of various nucleic acid vaccine constructs: (top) comprising a 5′UTR, a sequence encoding an antigen, a 3′ UTR, and a poly A tail; (middle) a 5′UTR, a signal peptide (SP) a sequence encoding an antigen, a 3′ UTR, and a poly A tail; (bottom) a 5′UTR, a signal peptide (SP) a sequence encoding an antigen, a transmembrane domain, a 3′ UTR, and a poly A tail.

[0017] FIG. 7B shows an illustrative schematic of various protein expression and antigen presentation modalities: (701) cytosolic protein expression and antigen presentation to the immune system through major histocompatibility complex; (702) protein expression and secretion for antigen presentation to the immune system; (703) protein expression and anchoring on the extracellular surface of the cell membrane for presentation to the immune system.

[0018] FIG. 8A shows encapsulation of mRNA (801) followed by particle size and dispersity analysis (802).

[0019] FIG. 8B shows particle dispersity (y-axis) and size (x-axis) for exemplary LNP preparations.

[0020] FIG. 9 shows relative IgG (y-axis; antigen treated/empty treated) for 9 animals vaccinated with three exemplary mRNA constructs.

[0021] FIG. 10 shows average OVA-specific IgG (y-axis) as measured by ELISA for animals treated with ARK015 LNPs following intramuscular or subcutaneous vaccination.

[0022] FIG. 11 shows Methanogen abundance in ruminant microbiome samples. Methanbrevibacter ruminantium and Methanobrevibacter gottschalkii comprise ˜65% of methanogens in the ruminal microbiome.

[0023] FIG. 12 shows particle size and polydispersity of various nucleic acid LNP vaccines.

[0024] FIG. 13 shows particle size and polydispersity of various nucleic acid LNP vaccines.

[0025] FIG. 14 shows denaturing agarose gel electrophoresis analysis of various nucleic acid LNP vaccines.

[0026] FIG. 15 shows an exemplary methodology for measuring methane production from methanogen monocultures treated with sera collected from vaccinated animals. Briefly, BY medium is inoculated with a methanogen-of-interest and combined with serum. The culture tube is crimped closed and pressurized with 80% hydrogen, 20% carbon dioxide. The cultures are incubated and methane in measured intermittently using a GazoMat handheld methane monitoring device. Methane is plotted as a function of time for the various treatment groups and the control group.

[0027] FIG. 16A shows species selective reduction in methane production when treated with vaccinated sera. Briefly, animals were vaccinated with ARK007, a nucleic acid vaccine encoding a protein present in M. ruminantium but not M. gottschalkii. Methane production (y-axis) over time (x-axis) is plotted for a culture of Methanobrevibacter ruminantium combined with a serum sample collected at day 14 after vaccination with ARK007 (light gray, triangles) compared to the same animal pre-vaccination (dark gray, circles). Methane production rate is reduced by 3× in the sample treated with the day 14 serum. Methane reaches maximal production at ˜300 hrs in the sample treated with the day 14 serum as compared to ˜100 hrs when treated with pre-vaccination serum.

[0028] FIG. 16B shows methane production over time for a culture of Methanobrevibacter gottschalkii treated with the same sera samples. There is no notable reduction in methane production for M. gottschalkii when treated with either the day 14 or pre-vaccination sera. This demonstrates the ability to generate highly specific and selective antibodies by vaccination with nucleic acids encoding methanogen cell surface proteins.

[0029] FIG. 17A shows increased reduction in methane production by monocultures of Methanobrevibacter ruminantium when treated with sera collected pre-vaccination, after a first injection on day 0, and after a boost injection on day 21. Methane production rate is reduced ˜2× when treated with serum collected after a single vaccination (day 21) and ˜20× when treated with serum collected after a boost vaccination (day 35).

[0030] FIG. 17B shows reduction is methane production rate when treated with a small molecule inhibitor of methanogenesis (lauric acid) at 3 different concentrations. This demonstrates that the vaccinated sera samples are preforming with similar efficacy to known small molecule inhibitors of methanogenesis.

[0031] FIG. 18 shows a computational pipeline for selection of Methanobrevibacter ruminantium and Methanobrevibacter gottschalkii cell surface proteins for vaccine production. The pipeline includes collation of all ORFs, filtering based on cell localization, filtering based on transcriptomic analysis of genes expressed during small molecule challenge, and then filtered for function.

[0032] FIG. 19 shows a biochemical map of methanogenesis-related proteins. Several proteins identified are involved in metal uptake, specifically molybdate, cobalt, nickel, and iron, which are critical for methanogenesis.

[0033] FIG. 20 shows an exemplary methodology for characterizing nucleic acid vaccines encoding methanogen cell surface proteins.

[0034] FIG. 21A shows a computational pipeline (left) for selection of Methanogen cell surface proteins for vaccine production. The pipeline includes collation of all ORFs, filtering based on uniqueness to methanogens, cell localization, and function. A network map of key methanogen cell surface protein functions is shown to the right.

[0035] FIG. 21B shows a schematic representation of the protein fragments described in Table 21. The amino acid sequence of each folded domain is designated as a “protein fragment” in Table 21, each of which is useful as an antigen for the vaccines of the present disclosure.

[0036] FIG. 22 An exemplary vaccination protocol. In some embodiments, at least one vaccine (e.g., a nucleic acid vaccine comprising a nucleic acid sequence encoding at least one methanogen surface antigen) is prepared. The at least one vaccine is used to vaccinate a pregnant animal (e.g., ruminant). The unborn fetus is exposed to the antibodies against methanogen generated by the mother. After birth, the child ruminant receives milk laden with the antibodies against the at least one methanogen surface antigen. The child ruminant is vaccinated with at least one vaccine of the present disclosure prior to weaning. The child ruminant may be vaccinated with a vaccine encoding the same or different methanogen surface antigen.

[0037] FIG. 23 An exemplary vaccination protocol. In some embodiments, at least one vaccine (e.g., a nucleic acid vaccine comprising a nucleic acid sequence encoding at least one methanogen surface antigen) is prepared. A ruminant is treated with a combinatory therapy, which comprises any two or more selected from a vaccine, antibodies, milk, animal feed, an agent (e.g., an agent that reduces methane production in a ruminant, a probiotic bacterial strain, a small molecule inhibitor, etc.), and other composition of the present disclosure (e.g., those reducing methane production in a ruminant). Here, a reduction in methane production that is greater than the use of a single therapy alone is achieved.

[0038] FIG. 24 is a schematic of a biochemical pathway and enzymes for the production of methane from acetate (i.e., the acetoclastic pathway), hydrogen and carbon dioxide (i.e., the hydrogenotrophic pathway), and methanol and derivatives thereof (i.e., the methylotrophic pathway).

[0039] FIG. 25 is a schematic describing the reduction of methyl-CoM and coenzyme B into methane by methyl-coenzyme M reductase (MCR), a key enzyme present in methane production via the acetoclastic, hydrogenotrophic, and methylotrophic pathways.

[0040] FIG. 26 is a schematic describing the application of small molecules that affect MCR activity to modulate methane production.

[0041] FIG. 27 is a cross-sectional diagram of the application of a composition for reduction of deleterious atmospheric gases and/or precursors thereof to a flooded ecosystem.

[0042] FIG. 28 shows aerial delivery of a composition for reduction of deleterious atmospheric gases and/or precursors thereof to a flooded ecosystem.

[0043] FIG. 29 shows an illustrative example of the application of a composition for reduction of deleterious atmospheric gases and/or precursors thereof throughout the rice lifecycle.

[0044] FIG. 30 shows 3-NOP concentration (mM) v. adsorbent (˜20 mM stock solution).

[0045] FIG. 31 shows 3-NOP concentration (mM) v. adsorbent (˜8 mM stock solution).

[0046] FIG. 32 shows exemplary multilayer polyelectrolyte coatings of 15% activated carbon tablets.

[0047] FIG. 33 shows exemplary multilayer polyelectrolyte coatings of 25% activated carbon tablets.

[0048] FIG. 34 shows exemplary multilayer polyelectrolyte coatings of 15% activated carbon tablets with 5% sodium lignosulfonate.

[0049] FIG. 35 shows exemplary multilayer polyelectrolyte coatings of 15% activated carbon with 5% hydroxypropyl cellulose.

[0050] FIG. 36 is a graph showing the release profiled of a silica v. activated carbon adsorbent.

[0051] FIG. 37 is a table showing the composition of various polycaprolactone-based formulations according to some embodiments of the invention.

[0052] FIG. 38 is a bar graph showing 3-NOP release in mM for exemplary polycaprolactone-based formulations.

[0053] FIG. 39 is a graph showing normalized 3-NOP concentration v. release time in days of exemplary polybutylene succinate-based formulations.

[0054] FIG. 40 is a bar graph showing 3-NOP release (%) from exemplary PEC microcapsules. Samples are prepared with a 3-NOP concentration of 100 μM. Final pH solution ˜7. K, L, F, and E refer to lysine, leucine, phenylalanine, and glutamic acid, respectively. PSS refers to polystyrene sulfonate.

[0055] FIG. 41 is bar graph showing 3-NOP release (%) from exemplary PEC microcapsules. Samples are prepared with a 3-NOP concentration of 100 μM. Final pH solution ˜7. PLR refers to poly (L-arginine), and PLK refers to poly (L-lysine). SLS and PSS refer to sodium lignosulfonate and polystyrene sulfonate.

[0056] FIG. 42A-FIG. 42B are bar graphs showing representative ELISA data of the total IgG level (FIG. 42A) and total IgGA level (FIG. 42B) in the serum of the cows that have been vaccinated with lipid nanoparticles (LNPs) comprising one of ARK001-ARK010, ARK012, ARK013, and ARK015. Also shown are the ELISA data for cows vaccinated with empty LNPs. Three cows were vaccinated with each sample. The numbers 1-5 on the X axis correspond to Day 0, Day 14, Day 21, Day 28, and Day 35, respectively, since the time of vaccination. Each “TAMU” number refers to an individual cow.

### DETAILED DESCRIPTION OF THE INVENTION

[0057] Provided herein are vaccines (e.g., nucleic acid vaccines) against at least one cell surface antigen or a fragment thereof (e.g., antigenic fragment, epitope) of at least one methanogen, which are effective in inducing immune response and antibody production against the methanogen antigen, and reducing the methane production in ruminants.

### Definitions

[0058] The articles “a” and “an” are used herein to refer to one or to more than one (i.e. to at least one) of the grammatical object of the article. By way of example, “an element” means one element or more than one element.

[0059] As used herein, the term “about” when used before a numerical designation, e.g., temperature, time, amount, concentration, and such other, including a range, indicates approximations which may vary by (+) or (−) 10%, 9%, 8%, 7%, 6%, 5%, 4%, 3%, 2%, or 1%. The term “administering” is intended to include routes of administration which allow an agent (e.g., a vaccine composition, an agent that reduces methane production in a ruminant) to perform its intended function. Examples of routes of administration which can be used include injection (subcutaneous, intravenous, parenteral, intraperitoneal, intrathecal, intradermal, intramuscular, etc.), oral, inhalation, and transdermal routes. The injections can be bolus injections or can be continuous infusion. Depending on the route of administration, the agent (e.g., a vaccine composition, an agent that reduces methane production in a ruminant) can be coated with or disposed in a selected material to protect it from natural conditions which may detrimentally affect its ability to perform its intended function. The agent may be administered alone, or in conjunction with a pharmaceutically acceptable carrier or adjuvant. The agent (e.g., a vaccine composition, an agent that reduces methane production in a ruminant) also may be administered as a prodrug, which is converted to its active form in vivo.

[0060] The term “conjoint” or “combination” administration, as used herein, refers to the administration of two or more agents that aid in reducing methane production in a ruminant. The different agents comprising the combination may be administered concomitant with, prior to, or following the administration of one or more agents.

[0061] The term “fragment,” as used herein encompasses any and all that is less than the full length. In some embodiments, a fragment of a polypeptide of the present disclosure is an antigenic fragment of the polypeptide. Such antigenic fragment may comprise at least one epitope that binds to the antibody. In preferred embodiments, a fragment of a polypeptide of the present disclosure is a fragment of the polypeptides that is effective in eliciting immune response and/or inducing antibody production when administered to a ruminant.

[0062] The term “feed additive” refers to any agent or composition that reduces the methane production in a ruminant, which can be added to an animal feed.

[0063] The term “methanogen,” as used herein, refers to a microorganism that produces methane as a metabolic byproduct. Methanogens belong to the domain Archaea, and include, but are not limited to those of a family Methanobacteriaceae, e.g., those of genera Methanobrevibacter, Methanosphaera, Methanomicrobium, Methanobacterium, Methanocorpusulum, Methanosaeta, Methanoculleus, Methanosarcina, and Thermoplasmatales. Specific methanogens include, but are not limited to, Methanobrevibacter ruminantium (i.e., the M1 strain or strain DSM 1093 (see e.g., World Wide Web at dsmz.de/microorganisms/html/strains/strain.dsm001093. htm). Additional relevant species are further described below.

[0064] The term “nucleic acid” (also called “polynucleotide”) in its broadest sense, includes any compound and or substance that comprise a polymer of nucleotides linked via a phospohdiester bond. The nucleotides or a portion thereof may be natural or synthetic; or may be structurally or chemically modified.

[0065] The term “polydispersity index” is a ratio that describes the homogeneity of the particle size distribution of a system. A small value, e.g., less than 0.3, indicates a narrow particle size distribution.

[0066] The term “ruminant” refers to a hoofed herbivorous grazing or browsing mammal that is able to acquire nutrients from plant-based food by fermenting it in a specialized stomach prior to digestion, principally through microbial actions. The process, which takes place in the front part of the digestive system and therefore is called foregut fermentation, typically requires the fermented ingesta (known as cud) to be regurgitated and chewed again. The roughly 200 species of ruminants include both domestic and wild species. Ruminants include, but are not limited to, cattle (e.g., large domesticated ruminant animals, e.g., cows (including dairy cattle), bulls), all domesticated and wild bovines (i.e., those belonged to the family Bovidae; e.g., cows, bulls, bisons, yaks, African buffalos, water buffalos, antelopes), goats, sheep, giraffes, deer, caribou, and gazelles. In preferred embodiments, ruminants are domesticated. As used herein, the term “ruminant” includes ruminant-like animals or pseudo-ruminant animals such as macropods, llamas, camels, and alpacas. In some embodiments, a ruminant has not been administered with an agent that reduces methane. In other embodiments, a ruminant has been administered or is being administered with an agent that reduces methane.

[0067] As used herein, the term “valency” refers to the number of antigenic components in the nucleic acid vaccine or nucleic acid polynucleotide (e.g., DNA or RNA polynucleotide) or polypeptide. In some embodiments, the nucleic acid vaccines are monovalent. In some embodiments, the nucleic acid vaccines are divalent. In some embodiments the nucleic acid vaccines are trivalent. In some embodiments the nucleic acid vaccines are multi-valent. Multivalent vaccines may comprise 2, 3, 4, 5, 6, 7, 8, 9, 10, 11, 12, 13, 14, 15, 16, 17, 18, 19, 20, or more antigens or antigenic moieties (e.g., antigenic peptides, etc.). The antigenic components of the nucleic acid vaccines may be in a single nucleic acid molecule or in separate nucleic acid molecules.

### Methanogens

[0068] The diversity of the rumen methanogens is much smaller, and their diversity is much lower than that of rumen bacteria, with archaeal SSU rRNA only accounting for 6.8% of rumen total SSU rRNA. Archaea in the rumen is represented by <3.3% of the total rRNA (both 16S and 18S) therein. Representative family of methanogens includes Methanobacteriaceae.

[0069] Representative genera of methanogens include Methanobrevibacter, Methanosphaera, Methanomicrobium, Methanobacterium, Methanocorpusulum, Methanosaeta, Methanoculleus, Methanosarcina, and Thermoplasmatales.

[0070] Certain species of ruminal methanogens have been isolated into pure cultures: Methanobacterium formicicum, Methanobacterium bryantii, Methanobrevibacter ruminantium, Methanobrevibacter millerae, Methanobrevibacter olleyae, Methanomicrobium mobile, Methanoculleus olentangyi, and Methanosarcina barkeri. Additional species have been recently isolated, including Methanobrevibacter boviskoreani (isolated from the rumen of Korean native cattle), Methanobacterium beijingense (isolated from the rumen of goat), Methanoculleus marisnigri (isolated from the rumen of Indian crossbred cattle), Methanoculleus bourgensis (isolated from the rumen of Holstein cattle), and Methanosarcina mazei (isolated from the rumen of Korean Hanwoo cattle) (based on the RDP database). A Thermoplasmatales-like pyrrolysine-dependent archaeon BRNA1 was also isolated from bovine (GenBank access number: CP002916).

[0071] Collectively, 16S rRNA gene sequences from cultured methanogens only accounted for approximately 0.7% of the total archaeal sequences of rumen origin, and several taxa do not have a single cultured representative. Most of the isolates are members of the family Methanobacteriaceae. Compared to other anaerobic habitats where >100 species of methanogens of 28 genera have been isolated, the diversity and species richness of ruminal methanogens are quite low, reflecting the highly selective ruminal environment for methanogens. In addition, sequenced ruminal 16S rRNA gene clones shared >95% sequence similarity with that of Methanobrevibacter gottschalkii, Methanobrevibacter thaueri, Methanobrevibacter smithii and Methanosphaera stadtmanae, indicating that these species may be common ruminal methanogens.

[0072] Much of the ruminal methanogen diversity was characterized by 16S rRNA gene sequences. The RDP Release 11 (Update 3) contains 8623 archaeal 16S rRNA gene sequences of rumen origin. These sequences were generated using the Sanger sequencing technology, which produces higher sequence accuracy than NGS technologies, in 96 separate studies including 48 unpublished studies. About 90% of these sequences were assigned to methanogens. These sequences were classified to 10 known genera, with Methanobrevibacter being represented by 63.2% of all the sequences followed by Methanosphaera (9.8%), Methanomicrobium (7.7%), and Methanobacterium (1.2%). The order Thermoplasmatales, which was previously referred to as the rumen cluster C (RCC) group, is represented by 7.4% of the total archaeal sequences.

### Cell Surface Proteins of Methanogens

[0073] Provided herein is at least one cell surface protein or a fragment thereof (e.g., an antigenic fragment, e.g., a fragment comprising an epitope, e.g., a fragment comprising an extracellular domain or a portion thereof) of at least one methanogen and nucleic acid(s) encoding same that can be used in a vaccine composition (e.g., nucleic acid vaccine), which can elicit immune response, antibody production, and antibody-mediated neutralization of the growth of methanogens and/or production of methane.

[0074] In certain aspects, the at least one cell surface protein or a fragment thereof (e.g., an antigenic fragment, e.g., a fragment comprising an epitope, e.g., a fragment comprising an extracellular domain or a portion thereof) of at least one methanogen is of a family Methanobacteriaceae.

[0075] In some embodiments, the at least one methanogen is of a genus selected from: Methanobrevibacter, Methanosphaera, Methanomicrobium, Methanobacterium, Methanocorpusulum, Methanosaeta, Methanoculleus, Methanosarcina, and Thermoplasmatales.

[0076] In some embodiments, the at least one methanogen comprises Methanobacterium formicicum, Methanobacterium bryantii, Methanobrevibacter ruminantium, Methanobrevibacter millerae, Methanobrevibacter olleyae, Methanomicrobium mobile, Methanoculleus olentangyi, Methanosarcina barkeri, Methanobrevibacter boviskoreani, Methanobacterium beijingense, Methanoculleus marisnigri, Methanoculleus bourgensis, Methanosarcina mazei, Thermoplasmatales archaeon BRNA1, Methanobrevibacter gottschalkii, Methanobrevibacter thaueri, Methanobrevibacter smithii, Methanosphaera stadtmanae, Methanococcoides burtonii, Methanolobus psychrophilus R15, Methanobacterium paludism, Methanohalobium evestigatum, Methanomethylovorans hollandica, Methanothrix soehngenii, Methanocaldococcus vulcanius, Methanosalsum zhilinae, Methanocorpusculum labreanum, Methanoregula formicica, Methanoculleus marisnigri, Methanocella arvoryzae, Methanoculleus bourgensis, Methanolacinia petrolearia, Methanospirillum hungatei, Methanoplanus limicola, Methanohalophilus mahii, Methanococcus aeolicus, Methanosphaerula palustris, Methanocaldococcus fervens, Methanocaldococcus jannaschii, Methanocaldococcus sp. FS406-22, Methanoregula boonei, Methanobrevibacter sp. AbM4, Methanobrevibacter ruminantium, Methanosphaera, Methanobacterium formicicum, Methanocaldococcus villosus, Methanosarcina barkeri, Methanobacterium lacus, Methanotorris igneus, Methanotorris formicicus, Methanocaldococcus infernus, Methanofollis liminatans, Methanothermococcus okinawensis, Methanobrevibacter smithii, Methanobrevibacter, Methanocella conradii, Methanothermococcus thermolithotrophicus, Methanococcus maripaludis, Methanococcus maripaludis, Methanococcus vannielii, Methanothermus fervidus, Methanosarcina acetivorans, Methanosarcina mazei, Methanosaeta harundinacea 6Ac, Methanococcus maripaludis, Methanococcus voltae, Methanolinea tarda, Methanolobus psychrophilus, Methanosaeta harundinacea, or any combination thereof.

[0077] In some embodiments, the at least one methanogen comprises Methanobrevibacter ruminantium. In some embodiments, the at least one methanogen comprises Methanobrevibacter ruminantium (M1 (DSM 1093)).

[0078] In certain embodiments, a vaccine composition comprises a nucleic acid (e.g., mRNA, DNA, or a modified variant thereof) encoding at least one of cell surface protein. In some embodiments, the nucleic acid encodes at least one fragment (e.g., an antigenic fragment, an epitope) of at least one cell surface protein. In some embodiments, the nucleic acid encodes the extracellular domain, or a fragment thereof, of at least one cell surface protein. In some embodiments, the nucleic acid does not encode the transmembrane and/or intracellular domains or a fragment thereof of the at least one cell surface protein.

[0079] In some embodiments, the nucleic acid (e.g., mRNA, DNA, or a modified variant thereof) for a vaccine composition comprises at least one of the nucleic acid sequence, or a fragment thereof (e.g., those encoding at least a portion of the extracellular domain), encoding the adhesion-like proteins, adhesin-like proteins with cysteine protease domain, adhesin-like proteins with transglutaminase domain presented in Table 1. Such nucleic acids, proteins, and sequences are also provided in Leahy et al. (2010) PLoS One, 5(1):e8926 and U.S. Pat. No. 10,314,895, each of which is incorporated herein by reference. The representative nucleic acid sequences encoding the cell surface antigens of a methanogen and the representative amino acid sequences of the cell surface antigens of a methanogen are provided in Table 2A, Table 2B, Table 3, Table 19, Table 20, and Table 21.

[0080] In some embodiments, a vaccine composition comprises a polypeptide or a fragment thereof (e.g., an antigenic fragment, an epitope) of at least one cell surface protein. In some embodiments, the polypeptide comprises the extracellular domain or a fragment thereof of at least one cell surface protein. In some embodiments, the polypeptide or a fragment thereof does not comprise the transmembrane and/or intracellular domains or a fragment thereof of the at least one cell surface protein.

[0081] A person of ordinary skill in the art can determine the polypeptide sequences from the nucleic acid sequences, or determine the nucleic acid sequences from the polypeptide sequences presented herein or those known in the art.

TABLE 1
Representative cell surface antigens of a methanogen,
Methanobrevibacter ruminantium (M1 (DSM 1093))

| | | | | No. of |
|---|---|---|---|---|
| | | Nucleic Acid | Signal peptide | transmembrane |
| Locus tag | Annotation | Size (bp) | (SP) | domains |
| mru0019 | adhesin-like protein | 1220 | SP | 2 |
| mru0327 | adhesin-like protein | 2090 | SP | 2 |
| mru0687 | adhesin-like protein | 2963 | SP | 2 |
| mru1210 | adhesin-like protein | 7250 | SP | 2 |
| mru1222 | adhesin-like protein | 4055 | SP | 2 |
| mru1506 | adhesin-like protein | 857 | SP | 2 |
| mru2053 | adhesin-like protein | 3494 | SP | 2 |
| mru2134 | adhesin-like protein | 17957 | SP | 2 |
| mru2147 | adhesin-like protein | 16955 | SP | 4 |
| mru2178 | adhesin-like protein | 9239 | SP | 2 |
| mru0031 | adhesin-like protein | 4415 | Expressed | 1 |
| | | | on cell wall | |
| mru0704 | adhesin-like protein | 2858 | SP | 1 |
| mru0963 | adhesin-like protein | 8159 | Expressed | 0 |
| | | | on cell wall | |
| mru0976/0977 | adhesin-like protein | 4775 | SP | 2 |
| mru0020 | adhesin-like protein with | 6014 | SP | 1 |
| | cysteine protease domain | | | |
| mru0064 | adhesin-like protein | 3536 | SP | 1 |
| mru0072 | adhesin-like protein | 2918 | SP | 1 |
| mru0076 | adhesin-like protein | 6605 | SP | 1 |
| mru0077 | adhesin-like protein | 9161 | SP | 1 |
| mru0079 | adhesin-like protein | 3560 | SP | 1 |
| mru0083 | adhesin-like protein | 839 | SP | 1 |
| mru0084 | adhesin-like protein | 14477 | SP | 1 |
| mru0085 | adhesin-like protein | 8030 | SP | 1 |
| mru0086 | adhesin-like protein | 10175 | SP | 1 |
| mru0143 | adhesin-like protein with | 3284 | SP | 0 |
| | cysteine protease domain | | | |
| mru0160 | adhesin-like protein | 3176 | SP | 1 |
| mru0222 | adhesin-like protein with | 3302 | SP | 1 |
| | cysteine protease domain | | | |
| mru0327 | adhesin-like protein | 2060 | SP | 1 |
| mru0338 | adhesin-like protein | 6929 | SP | 1 |
| mru0417/0418 | adhesin-like protein | 1391 | SP | 1 |
| mru0419 | adhesin-like protein | 4175 | SP | 1 |
| mru0727 | adhesin-like protein with | 3788 | SP | 0 |
| | cysteine protease domain | | | |
| mru0772 | adhesin-like protein with | 3281 | SP | 1 |
| | cysteine protease domain | | | |
| mru0839 | adhesin-like protein with | 8639 | SP | 1 |
| | cysteine protease domain | | | |
| mru0842 | adhesin-like protein with | 3977 | SP | 1 |
| | cysteine protease domain | | | |
| mru0978 | adhesin-like protein | 6606 | SP | 0 |
| mru0979 | adhesin-like protein | 8753 | SP | 1 |
| mru1076 | adhesin-like protein | 2681 | SP | 1 |
| mru1077 | adhesin-like protein | 2273 | SP | 1 |
| mru1246 | adhesin-like protein | 4619 | SP | 1 |
| mru1247 | adhesin-like protein | 5060 | SP | 1 |
| mru1465 | adhesin-like protein | 2882 | SP | 1 |
| mru1513 | adhesin-like protein | 1853 | SP | 1 |
| mru1650 | adhesin-like protein | 9161 | SP | 1 |
| mru1726 | adhesin-like protein | 6767 | SP | 1 |
| mru1971 | adhesin-like protein | 1937 | SP | 1 |
| mru1996 | adhesin-like protein | 4496 | SP | 1 |
| mru2043 | adhesin-like protein | 9530 | SP | 1 |
| mru2048 | adhesin-like protein | 5417 | SP | 1 |
| mru2049 | adhesin-like protein | 10355 | SP | 1 |
| mru2052 | adhesin-like protein | 4112 | SP | 1 |
| mru2054 | adhesin-like protein | 5054 | SP | 1 |
| mru2055 | adhesin-like protein | 8906 | SP | 1 |
| mru2059 | adhesin-like protein | 4415 | SP | 0 |
| mru2090 | adhesin-like protein | 15200 | SP | 1 |
| mru0004 | adhesin-like protein | 2237 | SP | 1 |
| mru0331 | adhesin-like protein | 1622 | SP | 1 |
| mru0843 | adhesin-like protein with | 6197 | SP | 1 |
| | cysteine protease domain | | | |
| mru0015 | adhesin-like protein with | 3845 | SP | 1 |
| | cysteine protease domain | | | |
| mru0090 | adhesin-like protein | 2063 | SP | 1 |
| mru0255 | adhesin-like protein | 4187 | SP | 1 |
| mru0450 | adhesin-like protein | 803 | SP | 1 |
| mru0723 | adhesin-like protein | 7727 | SP | 1 |
| mru0962 | adhesin-like protein | 14789 | SP | 1 |
| mru0970 | adhesin-like protein | 2483 | SP | 1 |
| mru1263 | adhesin-like protein | 2585 | SP | 1 |
| mru1358 | adhesin-like protein | 2243 | SP | 1 |
| mru1386 | adhesin-like protein | 1841 | SP | 1 |
| mru1387 | adhesin-like protein with | 2957 | SP | 1 |
| | cysteine protease domain | | | |
| mru1424 | adhesin-like protein | 1445 | SP | 1 |
| mru1500 | adhesin-like protein | 3896 | SP | 1 |
| mru0493 | adhesin-like protein | 2447 | SP | 1 |
| mru0824 | adhesin-like protein with | 2027 | SP | 1 |
| | transglutaminase domain | | | |
| mru1499 | adhesin-like protein with | 3032 | SP | 0 |
| | transglutaminase domain | | | |
| mru1604 | adhesin-like protein with | 2996 | SP | 0 |
| | transglutaminase domain | | | |

| | |
|---|---|
| mru1919 | tetrahydromethanopterin S-methyltransferase subunit A MtrA1 |
| mru0441 | tetrahydromethanopterin S-methyltransferase subunit A MtrA2 |
| mru1920 | tetrahydromethanopterin S-methyltransferase subunit B MtrB |
| mru1921 | tetrahydromethanopterin S-methyltransferase subunit C MtrC |
| mru1922 | tetrahydromethanopterin S-methyltransferase subunit D MtrD |
| mru1923 | tetrahydromethanopterin S-methyltransferase subunit E MtrE |
| mru1918 | tetrahydromethanopterin S-methyltransferase subunit F MtrF |
| mru1917 | tetrahydromethanopterin S-methyltransferase subunit G MtrG |
| mru1916 | tetrahydromethanopterin S-methyltransferase subunit H MtrH |

[0082] The nucleic acid and amino acid sequence information for nucleic acid and polypeptide molecules useful in the present invention are well-known in the art and readily available on publicly available databases, such as the National Center for Biotechnology Information (NCBI).

### SEQUENCES

[0083] As used herein, coding region refers to regions of a nucleotide sequence comprising codons which are translated into amino acid residues, whereas noncoding region refers to regions of a nucleotide sequence that are not translated into amino acids (e.g., 5′ and 3′ untranslated regions).

[0084] Complement [to] or complementary refers to the broad concept of sequence complementarity between regions of two nucleic acid strands or between two regions of the same nucleic acid strand. It is known that an adenine residue of a first nucleic acid region is capable of forming specific hydrogen bonds (base pairing) with a residue of a second nucleic acid region which is antiparallel to the first region if the residue is thymine or uracil. Similarly, it is known that a cytosine residue of a first nucleic acid strand is capable of base pairing with a residue of a second nucleic acid strand which is antiparallel to the first strand if the residue is guanine. A first region of a nucleic acid is complementary to a second region of the same or a different nucleic acid if, when the two regions are arranged in an antiparallel fashion, at least one nucleotide residue of the first region is capable of base pairing with a residue of the second region. In some embodiments, the first region comprises a first portion and the second region comprises a second portion, whereby, when the first and second portions are arranged in an antiparallel fashion, at least about 50%, and preferably at least about 75%, at least about 90%, or at least about 95% of the nucleotide residues of the first portion are capable of base pairing with nucleotide residues in the second portion. In other embodiments, all nucleotide residues of the first portion are capable of base pairing with nucleotide residues in the second portion.

[0085] A nucleic acid is operably linked when it is placed into a functional relationship with another nucleic acid sequence. For instance, a promoter or enhancer is operably linked to a coding sequence if it affects the transcription of the sequence. With respect to transcription regulatory sequences, operably linked means that the DNA sequences being linked are contiguous and, where necessary to join two protein coding regions, contiguous and in reading frame. For switch sequences, operably linked indicates that the sequences are capable of effecting switch recombination.

[0086] There is a known and definite correspondence between the amino acid sequence of a particular protein and the nucleotide sequences that can code for the protein, as defined by the genetic code (shown below). Likewise, there is a known and definite correspondence between the nucleotide sequence of a particular nucleic acid and the amino acid sequence encoded by that nucleic acid, as defined by the genetic code.

GENETIC CODE

| | |
|---|---|
| Alanine (Ala, A) | GCA, GCC, GCG, GCT |
| Arginine (Arg, R) | AGA, ACG, CGA, CGC, CGG, CGT |
| Asparagine (Asn, N) | AAC, AAT |
| Aspartic acid (Asp, D) | GAC, GAT |
| Cysteine (Cys, C) | TGC, TGT |
| Glutamic acid (Glu, E) | GAA, GAG |
| Glutamine (Gln, Q) | CAA, CAG |
| Glycine (Gly, G) | GGA, GGC, GGG, GGT |
| Histidine (His, H) | CAC, CAT |
| Isoleucine (Ile, I) | ATA, ATC, ATT |
| Leucine (Leu, L) | CTA, CTC, CTG, CTT, TTA, TTG |
| Lysine (Lys, K) | AAA, AAG |
| Methionine (Met, M) | ATG |
| Phenylalanine (Phe, F) | TTC, TTT |
| Proline (Pro, P) | CCA, CCC, CCG, CCT |
| Serine (Ser, S) | AGC, AGT, TCA, TCC, TCG, TCT |
| Threonine (Thr, T) | ACA, ACC, ACG, ACT |
| Tryptophan (Trp, W) | TGG |
| Tyrosine (Tyr, Y) | TAC, TAT |
| Valine (Val, V) | GTA, GTC, GTG, GTT |
| Termination signal (end) | TAA, TAG, TGA |

[0087] An important and well-known feature of the genetic code is its redundancy, whereby, for most of the amino acids used to make proteins, more than one coding nucleotide triplet may be employed (illustrated above). Therefore, a number of different nucleotide sequences may code for a given amino acid sequence. Such nucleotide sequences are considered functionally equivalent since they result in the production of the same amino acid sequence in all organisms (although certain organisms may translate some sequences more efficiently than they do others). Moreover, occasionally, a methylated variant of a purine or pyrimidine may be found in a given nucleotide sequence. Such methylations do not affect the coding relationship between the trinucleotide codon and the corresponding amino acid.

[0088] In making the changes in the amino sequences of polypeptide, the hydropathic index of amino acids may be considered. The importance of the hydropathic amino acid index in conferring interactive biologic function on a protein is generally understood in the art. It is accepted that the relative hydropathic character of the amino acid contributes to the secondary structure of the resultant protein, which in turn defines the interaction of the protein with other molecules, for example, enzymes, substrates, receptors, DNA, antibodies, antigens, and the like. Each amino acid has been assigned a hydropathic index on the basis of their hydrophobicity and charge characteristics these are: isoleucine (+4.5); valine (+4.2); leucine (+3.8); phenylalanine (+2.8); cysteine/cystine (+2.5); methionine (+1.9); alanine (+1.8); glycine (−0.4); threonine (−0.7); serine (−0.8); tryptophane (−0.9); tyrosine (−1.3); proline (−1.6); histidine (−3.2); glutamate (−3.5); glutamine (−3.5); aspartate (<RTI 3.5); asparagine (−3.5); lysine (−3.9); and arginine (−4.5).

[0089] It is known in the art that certain amino acids may be substituted by other amino acids having a similar hydropathic index or score and still result in a protein with similar biological activity, i.e. still obtain a biological functionally equivalent protein.

[0090] As outlined above, amino acid substitutions are generally therefore based on the relative similarity of the amino acid side-chain substituents, for example, their hydrophobicity, hydrophilicity, charge, size, and the like. Exemplary substitutions which take various of the foregoing characteristics into consideration are well-known to those of skill in the art and include: arginine and lysine; glutamate and aspartate; serine and threonine; glutamine and asparagine; and valine, leucine and isoleucine.

[0091] In view of the foregoing, the nucleotide sequence of a DNA or RNA encoding a cell surface antigen nucleic acid (or any portion thereof) can be used to derive the polypeptide amino acid sequence, using the genetic code to translate the DNA or RNA into an amino acid sequence. Likewise, for polypeptide amino acid sequences, corresponding nucleotide sequences that can encode the polypeptide can be deduced from the genetic code (which, because of its redundancy, will produce multiple nucleic acid sequences for any given amino acid sequence). Thus, description and/or disclosure herein of a nucleotide sequence which encodes a polypeptide should be considered to also include description and/or disclosure of the amino acid sequence encoded by the nucleotide sequence. Similarly, description and/or disclosure of a polypeptide amino acid sequence herein should be considered to also include description and/or disclosure of all possible nucleotide sequences that can encode the amino acid sequence.

TABLE 2A
Representative sequences of the cell surface proteins of
Methanobrevibacter ruminantium M1 (GenBank: CP001719.1)

See SEQ ID NO. 1 to SEQ ID NO. 2217 for the native nucleic acid sequences. See SEQ
ID NO. 2218 to SEQ ID NO. 4434 for the bovine codon-optimized nucleic acid sequences. See
SEQ ID NO. 4435 to SEQ ID NO. 6651 for the aminio acid sequences.

TABLE 2B
Representative sequences of the cell surface proteins
of Methanobrevibacter gottschalkii

See SEQ ID NO. 6652 to SEQ ID NO. 8451 for the native nucleic acid sequences. See
SEQ ID NO. 8452 to SEQ ID NO. 10251 for the bovine codon-optimized nucleic acid
sequences. See SEQ ID NO. 10252 to SEQ ID NO. 12051 for the aminio acid sequences.

TABLE 3
Representative mtrE sequences of methanogens

See SEQ ID NO. 12100 to SEQ ID NO. 12147 for the nucleic acid sequences. See SEQ
ID NO. 12052 to SEQ ID NO. 12099 for the aminio acid sequences.

[0092] Included in all nucleic acid sequences disclosed herein are DNA nucleic acid molecules, RNA nucleic acid molecules (e.g., thymidine replaced with uridine), nucleic acid molecules encoding orthologs of the encoded proteins, as well as DNA or RNA nucleic acid sequences or any variant thereof (a structural variant or a chemical variant (e.g., chemically modified nucleotide)) comprising a nucleic acid sequence having at least 80%, 81%, 82%, 83%, 84%, 85%, 86%, 87%, 88%, 89%, 90%, 91%, 92%, 93%, 94%, 95%, 96%, 97%, 98%, 99%, 99.5%, or more identity across their full length with the nucleic acid sequence of any SEQ ID NO presented herein, or a portion thereof. Such nucleic acid molecules can have a function of the full-length nucleic acid (e.g., for the intended function of inducing an immune response) as described further herein.

[0093] Included in all amino acid sequences disclosed herein are amino acid sequences or any variant thereof (a structural variant or a chemical variant) comprising an amino acid sequence having at least 80%, 81%, 82%, 83%, 84%, 85%, 86%, 87%, 88%, 89%, 90%, 91%, 92%, 93%, 94%, 95%, 96%, 97%, 98%, 99%, 99.5%, or more identity across their full length with the amino acid sequence of any SEQ ID NO listed in presented herein, or a portion thereof. Such polypeptides can have a function of the full-length polypeptide (e.g., for the intended function of inducing an immune response) as described further herein.

### Homology

[0094] Function-conservative variants are those in which a given amino acid residue in a protein or enzyme has been changed without altering the overall conformation and function of the polypeptide, including, but not limited to, replacement of an amino acid with one having similar properties (such as, for example, polarity, hydrogen bonding potential, acidic, basic, hydrophobic, aromatic, and the like). Amino acids other than those indicated as conserved may differ in a protein so that the percent protein or amino acid sequence similarity between any two proteins of similar function may vary and may be, for example, from 70% to 99% as determined according to an alignment scheme such as by the Cluster Method, wherein similarity is based on the MEGALIGN algorithm. A function-conservative variant also includes a polypeptide which has at least 60% amino acid identity as determined by BLAST or FASTA algorithms, preferably at least 75%, more preferably at least 85%, still preferably at least 90%, and even more preferably at least 95%, and which has the same or substantially similar properties or functions as the native or parent protein to which it is compared.

[0095] Homology, as used herein, refers to nucleotide sequence similarity between two regions of the same nucleic acid strand or between regions of two different nucleic acid strands. When a nucleotide residue position in both regions is occupied by the same nucleotide residue, then the regions are homologous at that position. A first region is homologous to a second region if at least one nucleotide residue position of each region is occupied by the same residue. Homology between two regions is expressed in terms of the proportion of nucleotide residue positions of the two regions that are occupied by the same nucleotide residue. By way of example, a region having the nucleotide sequence 5′-ATTGCC-3′ and a region having the nucleotide sequence 5′-TATGGC-3′ share 50% homology. Preferably, the first region comprises a first portion and the second region comprises a second portion, whereby, at least about 50%, and preferably at least about 75%, at least about 90%, or at least about 95% of the nucleotide residue positions of each of the portions are occupied by the same nucleotide residue. More preferably, all nucleotide residue positions of each of the portions are occupied by the same nucleotide residue.

[0096] For nucleic acids, the term “substantial homology” indicates that two nucleic acids, or designated sequences thereof, when optimally aligned and compared, are identical, with appropriate nucleotide insertions or deletions, in at least about 80% of the nucleotides, usually at least about 81%, 82%, 83%, 84%, 85%, 86%, 87%, 88%, 89%, 90%, 91%, 92%, 93%, 94%, 95%, 96%, or more of the nucleotides, and more preferably at least about 97%, 98%, 99% or more of the nucleotides. Alternatively, substantial homology exists when the segments will hybridize under selective hybridization conditions, to the complement of the strand.

[0097] The percent identity between two sequences is a function of the number of identical positions shared by the sequences (i.e., % identity=# of identical positions/total # of positions×100), taking into account the number of gaps, and the length of each gap, which need to be introduced for optimal alignment of the two sequences. The comparison of sequences and determination of percent identity between two sequences can be accomplished using a mathematical algorithm, as described in the non-limiting examples below.

[0098] The percent identity between two nucleotide sequences can be determined using the GAP program in the GCG software package (available on the world wide web at the GCG company website), using a NWSgapdna. CMP matrix and a gap weight of 40, 50, 60, 70, or 80 and a length weight of 1, 2, 3, 4, 5, or 6. The percent identity between two nucleotide or amino acid sequences can also be determined using the algorithm of E. Meyers and W. Miller (CABIOS, 4:11 17 (1989)) which has been incorporated into the ALIGN program (version 2.0), using a PAM120 weight residue table, a gap length penalty of 12 and a gap penalty of 4. In addition, the percent identity between two amino acid sequences can be determined using the Needleman and Wunsch (J. Mol. Biol. (48):444 453 (1970)) algorithm which has been incorporated into the GAP program in the GCG software package (available on the world wide web at the GCG company website), using either a Blosum 62 matrix or a PAM250 matrix, and a gap weight of 16, 14, 12, 10, 8, 6, or 4 and a length weight of 1, 2, 3, 4, 5, or 6.

[0099] The nucleic acid and protein sequences of the present invention can further be used as a “query sequence” to perform a search against public databases to, for example, identify related sequences. Such searches can be performed using the NBLAST and XBLAST programs (version 2.0) of Altschul, et al. (1990) J. Mol. Biol. 215:403 10. BLAST nucleotide searches can be performed with the NBLAST program, score=100, wordlength=12 to obtain nucleotide sequences homologous to the nucleic acid molecules of the present invention. BLAST protein searches can be performed with the XBLAST program, score=50, wordlength=3 to obtain amino acid sequences homologous to the protein molecules of the present invention. To obtain gapped alignments for comparison purposes, Gapped BLAST can be utilized as described in Altschul et al., (1997) Nucleic Acids Res. 25(17):3389 3402. When utilizing BLAST and Gapped BLAST programs, the default parameters of the respective programs (e.g., XBLAST and NBLAST) can be used (available on the world wide web at the NCBI website).

### Codon Optimization

[0100] In preferred embodiments, the nucleic acid (e.g., DNA or RNA) vaccines of the present disclosure comprise those that are codon-optimized for expression in a ruminant.

[0101] Many organisms display a bias for use of particular codons to code for insertion of a particular amino acid in a growing peptide chain. Codon preference or codon bias, differences in codon usage between organisms, is afforded by degeneracy of the genetic code, and is well documented among many organisms. Codon bias often correlates with the efficiency of translation of messenger RNA (mRNA), which is in turn believed to be dependent on, inter alia, the properties of the codons being translated and the availability of particular transfer RNA (tRNA) molecules. The predominance of selected tRNAs in a cell is generally a reflection of the codons used most frequently in peptide synthesis. Accordingly, genes can be tailored for optimal gene expression in a given organism based on codon optimization.

[0102] Given the large number of gene sequences available for a wide variety of animal, plant and microbial species, it is possible to calculate the relative frequencies of codon usage. Codon usage tables are readily available, for example, at the “Codon Usage Database,” available World Wide Web at kazusa.or.jp/codon/, and these tables can be adapted in a number of ways. See Nakamura, Y., et al. “Codon usage tabulated from the international DNA sequence databases: status for the year 2000” Nucl. Acids Res. 28:292 (2000). As examples, a codon usage table for cow, calculated from GenBank Release 128.0, is reproduced below as Table A. Table A uses mRNA nomenclature, and so instead of thymine (T) which is found in DNA, the tables use uracil (U) which is found in RNA. The table has been adapted so that frequencies are calculated for each amino acid, rather than for all 64 codons.

TABLE A
Codon Usage Table for Cow Genes (Bos taurus)

| Amino Acid | Codon | Number | Frequency of usage |
|---|---|---|---|
| Phe | UUU | 13002 | 0.4112 |
| Phe | UUC | 18614 | 0.5888 |
| Total | | 31616 | |
| Leu | UUA | 4467 | 0.059 |
| Leu | UUG | 9024 | 0.1192 |
| Leu | CUU | 9069 | 0.1198 |
| Leu | CUC | 16003 | 0.2114 |
| Leu | CUA | 4608 | 0.0609 |
| Leu | CUG | 32536 | 0.4298 |
| Total | | 75707 | |
| Ile | AUU | 12474 | 0.3313 |
| Ile | AUC | 19800 | 0.5258 |
| Ile | AUA | 5381 | 0.1429 |
| Total | | 37655 | |
| Met | AUG | 17770 | 1 |
| Total | | 17770 | |
| Val | GUU | 8212 | 0.1635 |
| Val | GUC | 12846 | 0.2558 |
| Val | GUA | 4932 | 0.0982 |
| Val | GUG | 24222 | 0.4824 |
| Total | | 50212 | |
| Ser | UCU | 10287 | 0.1804 |
| Ser | UCC | 13258 | 0.2325 |
| Ser | UCA | 7678 | 0.1347 |
| Ser | UCG | 3470 | 0.0609 |
| Ser | AGU | 8040 | 0.141 |
| Ser | AGC | 14279 | 0.2505 |
| Total | | 57012 | |
| Pro | CCU | 11695 | 0.2684 |
| Pro | CCC | 15221 | 0.3493 |
| Pro | CCA | 11039 | 0.2533 |
| Pro | CCG | 5621 | 0.129 |
| Total | | 43576 | |
| Thr | ACU | 9372 | 0.2203 |
| Thr | ACC | 16574 | 0.3895 |
| Thr | ACA | 10892 | 0.256 |
| Thr | ACG | 5712 | 0.1342 |
| Total | | 42550 | |
| Ala | GCU | 13923 | 0.2592 |
| Ala | GCC | 23073 | 0.4295 |
| Ala | GCA | 10704 | 0.1992 |
| Ala | GCG | 6025 | 0.1121 |
| Total | | 53725 | |
| Tyr | UAU | 9441 | 0.3882 |
| Tyr | UAC | 14882 | 0.6118 |
| Total | | 24323 | |
| His | CAU | 6528 | 0.3649 |
| His | CAC | 11363 | 0.6351 |
| Total | | 17891 | |
| Gln | CAA | 8060 | 0.243 |
| Gln | CAG | 25108 | 0.757 |
| Total | | 33168 | |
| Asn | AAU | 12491 | 0.4088 |
| Asn | AAC | 18063 | 0.5912 |
| Total | | 30554 | |
| Lys | AAA | 17244 | 0.3897 |
| Lys | AAG | 27000 | 0.6103 |
| Total | | 44244 | |
| Asp | GAU | 16615 | 0.4239 |
| Asp | GAC | 22580 | 0.5761 |
| Total | | 39195 | |
| Glu | GAA | 21102 | 0.4007 |
| Glu | GAG | 31555 | 0.5993 |
| Total | | 52657 | |
| Cys | UGU | 7556 | 0.42 |
| Cys | UGC | 10436 | 0.58 |
| Total | | 17992 | |
| Trp | UGG | 10706 | 1 |
| Total | | 10706 | |
| Arg | CGU | 3391 | 0.0824 |
| Arg | CGC | 7998 | 0.1943 |
| Arg | CGA | 4558 | 0.1108 |
| Arg | CGG | 8300 | 0.2017 |
| Arg | AGA | 8237 | 0.2001 |
| Arg | AGG | 8671 | 0.2107 |
| Total | | 41155 | |
| Gly | GGU | 8508 | 0.1616 |
| Gly | GGC | 18517 | 0.3518 |
| Gly | GGA | 12838 | 0.2439 |
| Gly | GGG | 12772 | 0.2427 |
| Total | | 52635 | |
| Stop | UAA | 555 | |
| Stop | UAG | 394 | |
| Stop | UGA | 392 | |

[0103] By utilizing Table A or the like available at e.g., the website provided above, one of ordinary skill in the art can apply the frequencies to any given polypeptide sequence, and produce a nucleic acid fragment of a codon-optimized coding region which encodes the polypeptide, but which uses codons more optimal for a given species.

[0104] Accordingly, the term “codon-optimized” encompasses any modification of the nucleic acid sequence to comprise at least one codon that is more frequently used in a given ruminant. The term “codon-optimized” is not intended to mean that all codons in the nucleic acid are optimized for expression in a given ruminant.

### Protein Vaccines

[0105] In certain aspects, provided herein are vaccines that utilize peptides and/or polypeptides that comprise the sequence of at least one cell surface protein of at least one methanogen. Such peptides and/or polypeptides can be chemically synthesized, or produced using an expression vector (e.g., bacteria, yeast, insect cells, mammalian cells) or in vitro translated, e.g., via methods described herein and/or those known in the art.

[0106] The protein vaccines of the present disclosure may comprise a single peptide or a single polypeptide. Alternatively, the protein vaccines of the present disclosure may comprise a mixture of various peptides and/or polypeptides that target at least 1, 2, 3, 4, 5, 6, 7, 8, 9, 10, 11, 12, 13, 14, 15, 16, 17, 18, 19, or 20 cell surface protein of at least 1, 2, 3, 4, 5, 6, 7, 8, 9, 10, 11, 12, 13, 14, 15, 16, 17, 18, 19, or 20 methanogens. The protein vaccines of the present disclosure may be administered in a pharmaceutical composition described herein. The protein vaccines of the present disclosure may be administered with an adjuvant and/or other agents that enhance immune response. Multiple dosings of the protein vaccine is contemplated herein as described.

### Nucleic Acid Vaccines

[0107] Provided herein are nucleic acid vaccines that induce an immune response against at least one cell surface protein or a fragment thereof of at least one methanogen. The nucleic acid may be DNA or RNA; in both cases it provides the instructions for making a specific protein (e.g., an antigenic fragment of at least one cell surface protein of at least one methanogen), which the immune system will recognize as foreign. Once inserted into host cells, this nucleic acid is read by the cell's own protein-making machinery and used to manufacture the protein, which then trigger an immune response.

[0108] As used herein, the term “nucleic acid” (also called “polynucleotide”) in its broadest sense, includes any compound and or substance that comprise a polymer of nucleotides linked via a phospohdiester bond. The nucleotide or a portion thereof may be natural or synthetic. In some embodiments, the nucleotide or a portion thereof may be structurally or chemically modified.

[0109] Exemplary nucleic acids include ribonucleic acids (RNAs), deoxyribonucleic acids (DNAs), threose nucleic acids (TNAs), glycol nucleic acids (GNAs), peptide nucleic acids (PNAs), locked nucleic acids (LNAs, including LNA having a β-D-ribo configuration, α-LNA having an α-L-ribo configuration (a diastereomer of LNA), 2′-amino-LNA having a 2′-amino functionalization, and 2′-amino-α-LNA having a 2′-amino functionalization), ethylene nucleic acids (ENA), cyclohexenyl nucleic acids (CeNA), or hybrids or combinations thereof. They may comprise RNAi-inducing agents, RNAi agents, siRNAs, shRNAs, miRNAs, antisense RNAs, ribozymes, catalytic DNA, tRNA, RNAs that induce triple helix formation, aptamers, vectors, etc.

[0110] In some embodiments, the nucleic acid comprises coding sequences and non-coding sequences.

[0111] In some embodiments, the shortest length of a nucleic acid of the present disclosure can be the length of the nucleic acid sequence that may be sufficient to encode for a dipeptide. In some embodiments, the length of the nucleic acid sequence may be sufficient to encode for a tripeptide. In some embodiments, the length of the nucleic acid sequence may be sufficient to encode for a tetrapeptide. In some embodiments, the length of the nucleic acid sequence may be sufficient to encode for a pentapeptide. In some embodiments, the length of the nucleic acid sequence may be sufficient to encode for a hexapeptide. In some embodiments, the length of the nucleic acid sequence may be sufficient to encode for a heptapeptide. In some embodiments, the length of the nucleic acid sequence may be sufficient to encode for an octapeptide. In some embodiments, the length of the nucleic acid sequence may be sufficient to encode for a nonapeptide. In some embodiments, the length of the nucleic acid sequence may be sufficient to encode for a decapeptide. In some embodiments, the length of the nucleic acid (e.g., mRNA) sequence may be sufficient to encode an antigen that triggers the immune response in a ruminant.

[0112] Generally, the length of a nucleic acid of the present disclosure may be greater than about 30 nucleotides in length (e.g., at least or greater than about 35, 40, 45, 50, 55, 60, 70, 80, 90, 100, 120, 140, 160, 180, 200, 250, 300, 350, 400, 450, 500, 600, 700, 800, 900, 1,000, 1,100, 1,200, 1,300, 1,400, 1,500, 1,600, 1,700, 1,800, 1,900, 2,000, 2,500, 3,000, 4,000, 5,000, 6,000, 7,000, 8,000, 9,000, 10,000, 20,000, 30,000, 40,000, 50,000, 60,000, 70,000, 80,000, 90,000 or up to and including 100,000 nucleotides).

[0113] In some embodiments, the nucleic acid of the present invention includes from about 30 to about 100,000 nucleotides (e.g., from 30 to 50, from 30 to 100, from 30 to 250, from 30 to 500, from 30 to 1,000, from 30 to 1,500, from 30 to 3,000, from 30 to 5,000, from 30 to 7,000, from 30 to 10,000, from 30 to 25,000, from 30 to 50,000, from 30 to 70,000, from 100 to 250, from 100 to 500, from 100 to 1,000, from 100 to 1,500, from 100 to 3,000, from 100 to 5,000, from 100 to 7,000, from 100 to 10,000, from 100 to 25,000, from 100 to 50,000, from 100 to 70,000, from 100 to 100,000, from 500 to 1,000, from 500 to 1,500, from 500 to 2,000, from 500 to 3,000, from 500 to 5,000, from 500 to 7,000, from 500 to 10,000, from 500 to 25,000, from 500 to 50,000, from 500 to 70,000, from 500 to 100,000, from 1,000 to 1,500, from 1,000 to 2,000, from 1,000 to 3,000, from 1,000 to 5,000, from 1,000 to 7,000, from 1,000 to 10,000, from 1,000 to 25,000, from 1,000 to 50,000, from 1,000 to 70,000, from 1,000 to 100,000, from 1,500 to 3,000, from 1,500 to 5,000, from 1,500 to 7,000, from 1,500 to 10,000, from 1,500 to 25,000, from 1,500 to 50,000, from 1,500 to 70,000, from 1,500 to 100,000, from 2,000 to 3,000, from 2,000 to 5,000, from 2,000 to 7,000, from 2,000 to 10,000, from 2,000 to 25,000, from 2,000 to 50,000, from 2,000 to 70,000, and from 2,000 to 100,000).

[0114] In some embodiments, the nucleic acid of the present disclosure may comprise sequences that encode at least one peptide or polypeptide of interest. In some embodiments, the nucleic acid of the present disclosure may comprise sequences that are non-coding.

[0115] In some embodiments, the length of a portion/region of the nucleic acid encoding at least one peptide polypeptide of interest is greater than about 30 nucleotides in length (e.g., at least or greater than about 35, 40, 45, 50, 55, 60, 70, 80, 90, 100, 120, 140, 160, 180, 200, 250, 300, 350, 400, 450, 500, 600, 700, 800, 900, 1,000, 1,100, 1,200, 1,300, 1,400, 1,500, 1,600, 1,700, 1,800, 1,900, 2,000, 2,500, and 3,000, 4,000, 5,000, 6,000, 7,000, 8,000, 9,000, 10,000, 20,000, 30,000, 40,000, 50,000, 60,000, 70,000, 80,000, 90,000 or up to and including 100,000 nucleotides).

### DNA Vaccine

[0116] The first proof of concept of a DNA vaccine was made in 1990 and involved the injection of DNA molecules, expressing chloramphenicol acetyltransferase, luciferase, and beta-galactosidase into mouse skeletal muscle, and the expression of reporter genes in vivo, which can be detected for up to two months after infection. In brief, DNA vaccine consists of delivering genes or fragments of it, encoding immunogenic antigens to the host's cells by using DNA plasmids as a vector. This approach induces both humoral and cell-mediated immune responses efficiently. The vaccine formulation is made such that the genetic material is translocated to the host's cell nucleus. Once it reaches there, the mammalian promoter present in the vector structure is activated, triggering the transcription of the gene used for the vaccine through the host's cellular machinery. The antigen-presenting cells (APCs) are the major target cells to receive the genetic material. In addition, myocytes have been reported to play a crucial role. After the translation of the translocated gene into a protein or protein fragment, it is further processed into peptides that bind to major histocompatibility complex (MHC) class I or II. Cells other than APC, such as the myocytes, use MHCI for the antigen presentation, and APC, such as dendritic cells (DCs), can use MHC-II, resulting in cross-priming and presentation of antigens to both CD4+ and CD8+ T cells. In addition to this cellular immune response, humoral responses can be triggered if the produced immunogen is released from the cells and recognized by B cell receptors.

[0117] In addition, intrinsic elements of plasmid DNA, such as CpG unmethylated sequences, can activate innate immune responses, thereby enhancing adaptive immune responses against the expressed antigens. Clinical trials using DNA vaccines in humans induced both cellular and humoral responses. DNA vaccines have been licensed for use in veterinary medicine (see e.g., Silveira et al. (2017) Vaccine, 35:5559-5567; Ingolotti et al. (2014) Expert Review of Vaccines, 747-763), making it an appropriate way of vaccinating a ruminant.

[0118] Compared with traditional live or attenuated vaccines, DNA vaccines have several advantages, such as induction of broad immune responses without any risk being associated with replicating microorganisms; stimulation of both cellular and humoral immunity; construction of a vector encoding different antigens in a single vaccine; efficient largescale, low-cost, production; and high storage stability. In the vaccinology field, storage is a crucial factor, as preserving the high quality of the vaccine contents and, thus, the protective potential is necessary. Hence, cold storage is essential to ensure the survival of live vaccines and preserve their content. On the other hand, DNA vaccines are highly stable and have less need for refrigeration, which may be highly practical for use in endemic areas.

### Chemical Modification(s) of Nucleic Acid (e.g., DNA)

[0119] In some embodiments, the nucleic acid may be modified (e.g., with chemical modification). In some embodiments, such chemical modification(s) protect the nucleic acid (e.g., DNA) from being degraded by DNA exonucleases. Exemplary modifications are further described below.

### 1. Phosphorothioate Linkages

[0120] A phosphorothioate (pt) bond is a phosphodiester linkage where one of the two non-bridging oxygens has been replaced by a sulfur. This modification has been used for decades to inhibit nuclease phosphodiesterase and phosphoryl transferase activities. Chemically, the substitution of oxygen with sulfur does not dramatically change the reactivity of the bond, and pt-containing polynucleotides can still function in many enzymatic reactions. In a typical phosphodiester bond, the two non-bridging oxygens are chemically equivalent. When one of these oxygens is replaced by sulfur, however, the phosphorus is now connected to four distinct groups, rendering it a chiral center with two possible configurations referred to as “S_{P}” and “R_{P}.” It is this key feature that confers resistance for the majority of nuclease enzymes; one configuration will react at rates similar to a phosphodiester, while the other is significantly inhibitory or completely unreactive. Isomer reactivity varies from enzyme to enzyme, and different pt isomers can inhibit enzymes that catalyze the same reaction (e.g., phosphoryl transfer). For example, DNA Polymerase I can incorporate deoxynucleotide triphosphates with a pt ester at the a phosphate (dNTPαS), allowing formation of pt-bonded polynucleotides. However, it can only react with S_{P} configured dNTPαS molecules, and does so with inversion of the stereocenter to form exclusively R_{P}-configured pt bonds in the product. Conversely, the 3′-5′exo activity of this polymerase cleaves R_{P} but not S_{P} configured bonds. Alternatively, the 3′-5′ exo activity of E. coli Exonuclease III cleaves S_{P} but not R_{P} configured pt bonds (24). Therefore, DNA created from the incorporation of dNTPαS by DNA Pol I is highly resistant to exonuclease cleavage by Exo III.

[0121] Phosphorothioates can block many, but not all, exonucleases. To block exonuclease cleavage, the pt bonds must be placed at the end(s) where the enzyme initiates, e.g., the 5′ end for Lambda Exo and the 3′ end for Exo III. It is important to note that a single pt bond is insufficient to fully protect an oligonucleotide from exonuclease digestion. When the pt bond is installed via an oxidation step during phosphoramidite synthesis, a nearly equal amount of each isomer (S_{P} and R_{P}) is formed at each pt linkage. Since most enzymes can cleave one of these isomers, a single chemically installed pt will protect only half the molecules from digestion by a given exonuclease. Thus, it is typically recommended that 3-6 pt bonds be used to block exonuclease digestion, to prevent this read-through. One might expect that because each bond is a 50:50 mixture of isomers, when presented with 5 consecutive isomers, a given enzyme could cleave the first bond on half the molecules, then half of the molecules that had the first bond hydrolyzed would have the second hydrolyzed, and so on, such that there would be a range of partially degraded products. In practice, it has been reported that five consecutive pt bonds completely block all exonuclease activity at all pt bond positions. The exact reasons for this are not currently known, but it is likely that exonucleases engage multiple bases at once, and the net effect of the isomeric mixture somehow prevents the active site from properly organizing around bonds that are the normally cleavable pt isomer.

[0122] There are several commonly used exonucleases that are not blocked even by 5 consecutive pt bonds; for example, Exo V, Exo VII and T5 Exonuclease all can cleave, leaving short oligos instead of cutting at every bond in a series, and thus can digest DNA by skipping over termini blocked by multiple pt bonds and cleaving at the first phosphodiester. Importantly, any enzyme with endonuclease activity, like DNase I, will simply ignore the ends and degrade the polynucleotides from the inside out (unless every phosphodiester bond is replaced by a phosphorothioate). Keeping these important exceptions in mind, phosphorothioate bonds remain the most generally applicable (and relatively inexpensive) way to protect oligonucleotides from digestion by exonucleases.

### 2. 2′-Modified Nucleosides

[0123] Certain 2′-O-modified riboses are both stable to spontaneous hydrolysis and offer strong resistance to exonuclease activity. 2′-O-methyl, 2′-fluoro, or 2′-O-methoxyethyl (MOE) nucleosides, which contain bulky substituents off the sugar ring, have been shown to grant strong resistance to nucleases and additionally increase the strength of annealing to complementary DNA and RNA.

[0124] These sugar modifications also work in vitro to block exonuclease activity quite strongly. While a single terminal MOE nucleoside only weakly inhibits exonuclease activity, three successive MOE modifications provide enhanced resistance to many exonucleases, including Exo I, Exo III, Lambda Exo, RecJ_{F} and polymerase exonucleases activities, such as that of DNA Polymerase I, Large (Klenow) Fragment. Similar to pt bonds, several exonucleases can digest through these regions, notably T5 Exo, T7 Exo, Exo V, Exo VII and Exo VIII. Overall, exonuclease inhibition by MOE is quite strong, but pt bonds are cheaper to install for most manufacturers. However, if for some reason the pt chemistry is not desired, 2′-O-modified ribose moieties are a viable alternative.

### 3. Other 5′/3′ End Modifications

[0125] Several other modifications, such as the inverted deoxythymidine bases and dideoxynucleotides have been reported to suppress serum nuclease activity when appended to the end of synthetic oligonucleotides. Many other modifications may be attached through “linkers” at either the 5′ or 3′ end, including fluorescent tags, biotin or other affinity labels, or reactive groups for attachment to beads or surfaces. These linkers are typically connected to the 5′ or 3′ end via a phosphodiester. Such modifications can be used alone or in combination with other modifications, e.g., pt bonds and/or 2′-modified nucleosides.

[0126] In sum, various useful terminal modifications (e.g., 5′ terminus and/or 3′ terminus) protect DNA from degradation. Exemplary modifications include but are not limited to, biotin, phosphorothioate, triethylene glycol (TEG), Locked Nucleic Acid (LNA, a 2′-oxygen-4′-carbon methylene linkage), hexaethylene glycol (Sp18), 1,3-propanediol (SpC3), 2′-O-methoxyethyl (MOE) ribonucleotides, 2′-O-methyl ribonucleotides (2′-OMe), 2′-fluoro (2′-F) nucleotides, or any combination thereof. These modifications are further described in WO2021/081358, which is incorporated herein by reference.

### Types of DNA

[0127] The DNA in DNA vaccines can be liner or circular. In some embodiments, the DNA is double-stranded or single stranded.

[0128] In some embodiments, the DNA is single-stranded and comprises at least one hairpin. In some such embodiments, the hairpin comprises a portion of a protelomerase target sequence (see e.g., U.S. Pat. No. 11,149,302, the methods and compositions in which are incorporated herein by reference).

[0129] In some embodiments, the DNA is double-stranded and is a closed linear DNA. In some such embodiments, the DNA may be a doggybone DNA (dbDNA™; Touchlight, Hampton, UK), which is a linear, double-stranded DNA that is covalently closed through the action of the protelomerase enzyme TelN. The dbDNA™ comprises ˜28 bps of telomeric sequence at both ends, and can encode long, complex, or unstable DNA sequences, eliminates bacterial sequences and has a strong expression profile. The dbDNA™ is often synthesized via in vitro amplification process, which uses rolling-circle amplication by phi29 polymerase to produce long concatameric repeats of the template DNA. These concatamers are subsequently reduced to individual closed linear DNA called dbDNA™ through the action of the protelomerase enzyme TelN. In addition to a fast in vitro production, the dbDNA™ may be more safer in a clinical setting, as it does not evoke recognition by TLR9 such that it minimizes the immune response. The methods of producing the dbDNA™ is described in Karda et al. (2019) Gene Therapy 26:86-92, which is incorporated herein by reference.

[0130] In some embodiments, the DNA vaccines may be synthesized according to the compositions and methods as described in U.S. Pat. No. 11,149,302 B2, US 2021/0269793 A1, U.S. Pat. No. 9,499,847 B2, U.S. Pat. No. 9,109,250 B2, U.S. Pat. No. 9,029,134 B2, U.S. Pat. No. 9,765,343 B2; each of which is incorporated herein by reference.

### Certain Exemplary Features

[0131] Accordingly, in some embodiments, the vaccine comprises DNA (e.g., encoding at least one cell surface protein or a fragment thereof of at least one methanogen). Such DNA may comprise a coding sequence and/or a non-coding sequence.

[0132] In some embodiments, the DNA is operably linked to a promoter. In some embodiments, the coding sequence is operably linked to a promoter.

[0133] In some embodiments, the promoter is selected form CMV promoter, CAG promoter, SCP promoter, CMVe-SCP, CMVmax, JET, PGK, EF-1a, AHSP promoter, MND promoter, Wiskott-Aldrich promoter, and PKLR promoter.

[0134] In some embodiments, the DNA comprises: (a) a transcription regulatory element (e.g., an enhancer, a transcription termination sequence, a proximal promoter element, a locus control region); and/or (b) a translation regulatory element (e.g., Kozak sequence, an untranslated region (5′ UTR or 3′ UTR), a polyadenylation signal sequence).

[0135] In some embodiments, the DNA further comprises a sequence operatively coding for the secretion of the at least one cell surface protein or a fragment thereof.

[0136] In some embodiments, the DNA is linear or circular.

[0137] In some embodiments, the DNA comprises a telomeric sequence.

[0138] In some embodiments, the DNA is double-stranded or single-stranded.

[0139] In some embodiments, the DNA is single-stranded and comprises at least one hairpin.

[0140] In some embodiments, the DNA is double-stranded and comprises a telomeric sequence (e.g., a closed linear DNA, e.g., dbDNA™) In some embodiments, the the DNA comprises at least one chemical modification. In some embodiments, the at least one chemical modification is a terminal modification, which is present at 5′ end and/or 3′ end. In some embodiments, the at least one chemical modification comprises phosphorothioate, triethylene glycol (TEG), Locked Nucleic Acid (LNA, a 2′-oxygen-4′-carbon methylene linkage), hexaethylene glycol (Sp18), 1,3-propanediol (SpC3), 2′-O-methoxyethyl (MOE) ribonucleotides, 2′-O-methyl ribonucleotides (2′-OMe), 2′-fluoro (2′-F) nucleotides, or any combination thereof. In some embodiments, the at least one chemical modification comprises at least five consecutive phosphorothioate bonds. In some embodiments, the at least one chemical modification comprises at least three consecutive 2′-O-methyl nucleosides and/or 2′-O-methoxyethyl nucleosides.

[0141] In some embodiments, the DNA is in a vector. In some embodiments, the vector is a plasmid. In some embodiments, the DNA is packaged in a virus, e.g., AAV, e.g., bovine AAV (e.g., for transduction to a subject).

[0142] In some embodiments, the DNA vaccine is in a composition (e.g., pharmaceutical composition) further comprising an adjuvant.

[0143] In some embodiments, the adjuvant comprises: (a) (±)-N-(3-aminopropyl)-N,N-dimethyl-2,3-bis(syn-9-tetradeceneyloxy)-1-propanaminium bromide (GAP-DMORIE) and a neutral lipid; (b) a cytokine; (c) mono-phosphoryl lipid A and trehalosedicorynomycolateAF (MPL+TDM); (d) a solubilized mono-phosphoryl lipid A formulation; and/or (e) CRL1005/BAK.

[0144] In some embodiments, the neutral lipid in (a) comprises (a) 1,2-dioleoyl-sn-glycero-3-phosphoethanolamine (DOPE); (b) 1,2-diphytanoyl-sn-glycero-3-phosphoethanolamine (DPyPE); and/or (c) 1,2-dimyristoyl-glycer-3-phosphoethanolamine (DMPE).

[0145] In some embodiments, the DNA vaccine is in a composition (e.g., pharmaceutical composition) further comprising a transfection facilitating compound.

[0146] In some embodiments, the transfection facilitating compound comprises (±)-N-(2-hydroxyethyl)-N,N-dimethyl-2,3-bis(tetradecyloxy)-1-propanaminium bromide) (DMRIE).

### RNA Vaccine

[0147] The RNA vaccine (e.g., comprising mRNA) does not need to reach the cell nucleus like the DNA ones, which is one of the potential practical advantages. Thus, the mode of application and effectiveness of RNA vaccines may be increased. In preferred embodiments, the RNA vaccine comprises mRNA that encodes a protein antigen. Although RNA is known to be a relatively unstable molecule, it has been proven that the RNA vaccine designs improve its stability and protein translation efficiency, which enhanced immune response.

[0148] Accordingly, in some embodiments, the nucleic acid is messenger RNA (mRNA). The mRNA of the present disclosure may encode one or more peptides or polypeptides.

[0149] In some embodiments, the nucleic acids of the present disclosure are linear. In preferred embodiments, the linear nucleic acids are produced by in vitro transcription. The linear nucleic acids encoding one or more antigens of the nucleic acid vaccines of the present disclosure which are made using in vitro transcription (IVT) enzymatic synthesis methods are referred to as “IVT polynucleotides” or “IVT mRNA.” In some embodiments, the nucleic acids of the present disclosure are circular or cyclic.

[0150] The circular nucleic acid is a single stranded nucleic acid whose termini are joined in some fashion, whether by ligation, covalent bond, common association with the same protein or other molecule or complex or by hybridization. As used herein, the circular nucleic acid acts substantially like, and has the properties of, an RNA. The circular nucleic acid or circular polynucleotides are described in WO2015/034925 and WO2016/011222, each of which is incorporated herein by reference.

Mode of Action of mRNA Vaccines

[0151] According to mechanistic studies on the fate of mRNA LNPs in rhesus monkeys, primarily monocytes and dendritic cell (DC) subsets translate the mRNA, likely involving ApoE dependent endocytosis. These locally transfected antigen-presenting cells (APCs) subsequently migrate to the draining lymph nodes (LN) where they present the mRNAencoded antigens to B cells and T cells. Moreover, owing to their relatively small size (˜100 nm), neutral surface charge and diffusible PEG lipid coating, mRNA LNPs might also enter the lymphatics to directly target LN-resident APCs and B cells. Finally, although these cells are often overlooked in flow cytometry studies, it is very likely that cell types such as myocytes, epithelial cells and fibroblasts also contribute to local mRNA expression. At the same time, mRNA vaccines also need to engage the innate immune system to improve their ability to induce, and tailor, antigenspecific immune responses. Upon sensing inflammatory stimuli, lymphatic migration of innate immune cells is promoted, while APCs become activated (i.e. maturation), in their turn providing costimulatory signals and cytokine responses. mRNA can mediate type I IFN responses upon cellular uptake, which can vary greatly depending on their structural design. Among other effects on antiviral immunity, type I IFNs restrict viral replication in infected host cells and induce stimulatory-genes involved in the maturation process of DCs. Furthermore, IFN-α directly acts as a third cytokine signal during T cell priming. The type I IFN response can act as a driving force for mRNA vaccines to elicit cytotoxic T cell responses. Several studies have indicated that an unmodified mRNA platform induces a more pronounced type-I IFN-polarized innate immune response.

[0152] Both the mRNA and the LNP vehicle can have intrinsic adjuvant properties. Cationic lipids have been associated with the activation of several cellular pathways like proapoptotic and pro-inflammatory cascades. For Moderna's LNP formulation, Hassett et al. reported that the SM-102 lipid was selected based on its improved tolerability profile in non-human primates, as evidenced by a reduced local reactogenicity (e.g., edema and erythema) and lowest induction of systemic cytokine responses (e.g., IL-6), without affecting the ability to induce antibody production.

### Exemplary Design to Reduce Innate Immune Response

[0153] Several modifications to the mRNA structure can drastically improve the final outcome. The design of (non-coding) structural elements of the mRNA such as the CAP structure, polyA tail and untranslated regions (UTRs) all have a major impact on the mRNA stability and translation capacity (see e.g., Orlandini von Niessen et al. (2019) Mol Therapy 27(4):824-836; Holtkamp et al. (2006) Blood 108(13): 4009-4017). For example, mRNA comprising a 5′-cap that is the diastereomer D 1 of beta-S-ARCA has been shown to improve mRNA stability and translation capacity (WO2011015347A1). Codon optimization in the mRNA sequence to e.g., match host transfer (t)RNA abundances, or as a determinant of introducing secondary structures, can drastically impact the protein synthesis rate and ribosome dwell time (i.e. mRNA functional half-life). In this context, N1-methylpseudouridine (1mψ) nucleotide-modifications for uridine were shown to provide additional base pair stability, giving rise to a high degree of secondary structure which significantly improves the mRNA translation (Mauger et al. (2019) Proc Natl Acad Sci U.S.A., 116:24075). Furthermore, the secondary structure design of mRNA can be optimized in order to improve mRNA stability against cleavage by endonucleases and chemical degradation processes, including hydrolysis (Wayment-Steele et al. (2021) Nucleic Acids Res, 49(18):10604-10617). BNT162b2 and mRNA-1273 implement a combination of modified nucleotide 1mΨ replacement and removal of dsRNA fragments in the mRNA production process, which strongly reduces the innate immune signaling in response to mRNA through decreased activation of TLR signaling and cytosolic RNA sensors. Moderna demonstrated that with such an approach, both local and systemic innate immune effects upon mRNA (vaccine) administration can be limited to a bare minimum in mice, which not only allows improved mRNA expression but also repeat dosing of the mRNA vaccine (Nelson et al. (2020) Sci Adv 6(26): 1-13). In contrast to BNT162b2 and mRNA-1273, the CVnCoV vaccine candidate contains an “unmodified” mRNA, which employs sequence engineering (e.g., reduction in uridine content), selected UTRs, and a stringent purification protocol to remove dsRNA fragments, demonstrating diverse approach to mRNA vaccines (Lutz et al. (2017) npj Vaccines 2(29): 1-9).

[0154] In some embodiments, nucleic acid vaccines of the present disclosure do not substantially induce an innate immune response of a cell into which the nucleic acid (e.g., mRNA) is introduced. Features of an induced innate immune response include 1) increased expression of pro-inflammatory cytokines, 2) activation of intracellular pattern recognition receptors (PRRs) (e.g., RIG-I, MDA5, etc.), and/or 3) termination or reduction in protein translation.

### RNA Design and Modifications

[0155] In some embodiments, the nucleic acid of the present disclosure is modified. In some embodiments, the nucleic acid may be structurally modified or chemically modified. As used herein, a “structural” modification is one in which two or more linked nucleosides are inserted, deleted, duplicated, inverted or randomized in a polynucleotide without significant chemical modification to the nucleotides themselves. Accordingly, the structural modifications will result in a different sequence of nucleotides. For example, the polynucleotide “ATCG” may be chemically modified to “AT-5meC-G”. The same polynucleotide may be structurally modified from “ATCG” to “ATCCCG”. Here, the dinucleotide “CC” has been inserted, resulting in a structural modification to the polynucleotide.

[0156] In some embodiments, the nucleic acid of the present disclosure may comprise one or more naturally occurring components, including any of the canonical nucleotides A (adenosine), G (guanosine), C (cytosine), U (uridine), or T (thymidine). In some embodiments, all or substantially all of the nucleotides comprising (a) the 5′-UTR, (b) the open reading frame (ORF), (c) the 3′-UTR, (d) the poly A tail, and any combination of (a, b, c, or d above) comprise naturally occurring canonical nucleotides A (adenosine), G (guanosine), C (cytosine), U (uridine), or T (thymidine).

[0157] In some embodiments, the nucleic acid may be naturally or non-naturally occurring. Nucleic acids may include one or more modified (e.g., altered or alternative) nucleobases, nucleosides, nucleotides, or combinations thereof.

[0158] Nucleic acids may or may not be uniformly altered along the entire length of the molecule. In some embodiments, one or more or all types of nucleotide (e.g., purine or pyrimidine, or any one or more or all of A, G, U, C) may or may not be uniformly altered in a nucleic acid, or in a given predetermined sequence region thereof.

[0159] Different sugar alterations and/or internucleoside linkages (e.g., backbone structures) may exist at various positions in a nucleic acid. One of ordinary skill in the art will appreciate that the nucleotide analogs or other alteration(s) may be located at any position(s) of a nucleic acid such that the function of the nucleic acid is not substantially decreased. An alteration may also be a 5′- or 3′-terminal alteration. In some embodiments, the polynucleotide includes an alteration at the 3′-terminus. The nucleic acid may contain from about 1% to about 100% alternative nucleotides (either in relation to overall nucleotide content, or in relation to one or more types of nucleotide, i.e., any one or more of A, G, U, or C) or any intervening percentage (e.g., from 1% to 20%, from 1% to 25%, from 1% to 50%, from 1% to 60%, from 1% to 70%, from 1% to 80%, from 1% to 90%, from 1% to 95%, from 10% to 20%, from 10% to 25%, from 10% to 50%, from 10% to 60%, from 10% to 70%, from 10% to 80%, from 10% to 90%, from 10% to 95%, from 10% to 100%, from 20% to 25%, from 20% to 50%, from 20% to 60%, from 20% to 70%, from 20% to 80%, from 20% to 90%, from 20% to 95%, from 20% to 100%, from 50% to 60%, from 50% to 70%, from 50% to 80%, from 50% to 90%, from 50% to 95%, from 50% to 100%, from 70% to 80%, from 70% to 90%, from 70% to 95%, from 70% to 100%, from 80% to 90%, from 80% to 95%, from 80% to 100% from 90% to 95%, from 90% to 100%, and from 95% to 100%). It will be understood that any remaining percentage is accounted for by the presence of a canonical nucleotide (e.g., A, G, U, or C).

[0160] Nucleic acids may contain at a minimum zero and at a maximum 100% alternative nucleotides, or any intervening percentages, such as at least 5% alternative nucleotides, at least 10% alternative nucleotides, at least 25% alternative nucleotides, at least 50% alternative nucleotides, at least 80% alternative nucleotides, or at least 90% alternative nucleotides. In some embodiments, nucleic acids may comprise an alternative pyrimidine such as an alternative uracil or cytosine. In some embodiments, at least 5%, at least 10%, at least 25%, at least 50%, at least 80%, at least 90% or 100% of the uracil in a polynucleotide is replaced with an alternative uracil (e.g., a 5-substituted uracil). The alternative uracil can be replaced by a compound having a single unique structure, or can be replaced by a plurality of compounds having different structures (e.g., 2, 3, 4 or more unique structures). In some instances, at least 5%, at least 10%, at least 25%, at least 50%, at least 80%, at least 90% or 100% of the cytosine in the polynucleotide may be replaced with an alternative cytosine (e.g., a 5-substituted cytosine). The alternative cytosine can be replaced by a compound having a single unique structure, or can be replaced by a plurality of compounds having different structures (e.g., 2, 3, 4 or more unique structures).

[0161] In some embodiments, a nucleic acid molecule, formula, composition or method associated therewith comprises one or more polynucleotides comprising features as described in WO2002/098443, WO2003/051401, WO2008/052770, WO2009/127230, WO2006/122828, WO2008/083949, WO2010/088927, WO2010/037539, WO2004/004743, WO2005/016376, WO2006/024518, WO2007/095976, WO2008/014979, WO2008/077592, WO2009/030481, WO2009/095226, WO2011/069586, WO2011/026641, WO2011/144358, WO2012/019780, WO2012/013326, WO2012/089338, WO2012/113513, WO2012/116811, WO2012/116810, WO2013/113502, WO2013/113501, WO2013/113736, WO2013/143698, WO2013/143699, WO2013/143700, WO2013/120626, WO2013/120627, WO2013/120628, WO2013/120629, WO2013/174409, WO2014/127917, WO2015/024669, WO2015/024668, WO2015/024667, WO2015/024665, WO2015/024666, WO2015/024664, WO2015/058069, WO2015101415, WO2015101414, WO2015024667, WO2015062738, WO2015101416, WO2015/164674, and 2020/160397, each of which is incorporated by reference herein.

[0162] Nucleic acids useful in the disclosure typically include a first region of linked nucleosides encoding a polypeptide of interest (e.g., a coding region), a first flanking region located at the 5′ terminus of the first region (e.g., a 5′ UTR), a second flanking region located at the 3′ terminus of the first region (e.g., a 3′ UTR) at least one 5′cap region, and a 3′ stabilizing region. In some embodiments, a nucleic acid further comprises a polyA region (e.g., in the 3′ UTR) or a Kozak sequence (e.g., in the 5′ UTR).

[0163] In some embodiments, a polynucleotide or nucleic acid (e.g., an mRNA) may include a 5′ cap structure, a chain terminating nucleotide, a stem loop, a polyA sequence, and/or a polyadenylation signal. Any one of the regions of a nucleic acid may include one or more alternative components (e.g., an alternative nucleoside). In some embodiments, the 3′-stabilizing region may contain an alternative nucleoside such as an L-nucleoside, an inverted thymidine, or a 2′-O-methyl nucleoside and/or the coding region, 5;-UTR, 3′-UTR, or cap region may include an alternative nucleoside such as a 5-substituted uridine (e.g., 5-methoxy uridine), a 1-substituted pseudouridine (e.g., -methyl-pseudouridine), and/or a 5-substituted cytidine (e.g., 5-methyl-cytidine).

[0164] Accordingly, mRNA vaccines may comprise synthetic mRNA molecules that direct the production of the antigen that will generate an immune response. In vitro-transcribed (IVT) mRNA mimics the structure of endogenous mRNA, with five sections, from 5′ to 3′: 5′ cap, 5′ untranslated region (UTR), an open reading frame that encodes the antigen, 3′ UTR and a polyA tail (see FIG. 1). A variation on IVT mRNA, self-amplifying mRNA, also contains replicase genes that encode RNA-dependent RNA polymerase. The virus-derived polymerase amplifies mRNA transcripts intracellularly, enabling the expression of large amounts of antigen with reduced mRNA doses.

### 5′ Cap Structure

[0165] The 5′ cap structure, like that of natural eukaryotic mRNAs, contains a 7-methylguanosine nucleoside linked through a triphosphate bridge to the 5′ end of mRNA. As in mammals, the first or second nucleotide from the 5′ end is methylated on the 2′ hydroxyl of the ribose (2′-O-methylation), which prevents recognition by cytosolic sensors of viral RNA, and hence prevents unintended immune responses. Further, the 5′ cap protects the mRNA sterically from degradation by exonucleases, and it works synergistically with the polyA tail at the 3′ end, polyA binding proteins and translation initiation factor proteins to circularize mRNA and recruit ribosomes for initiating translation. The length of the polyA tail indirectly regulates both mRNA translation and half-life. A sufficiently long tail (100-150 bp) is necessary to interact with polyA binding proteins that form complexes necessary for initiating translation and protecting the cap from degradation by decapping enzymes.

[0166] A nucleic acid molecule (e.g., an mRNA) may include a 5′ cap structure. The 5′ cap structure of a nucleic acid is involved in nuclear export and increasing nucleic acid stability and binds the mRNA Cap Binding Protein (CBP), which is responsible for nucleic acid stability in the cell and translation competency through the association of CBP with polyA binding protein to form the mature cyclic mRNA species. The cap further assists the removal of 5′ proximal introns during mRNA splicing.

[0167] Endogenous nucleic acid molecules may be 5′-end capped generating a 5′-ppp-5′-triphosphate linkage between a terminal guanosine cap residue and the 5′-terminal transcribed sense nucleotide of the nucleic acid molecule. This 5′-guanylate cap may then be methylated to generate an N7-methyl-guanylate residue. The ribose sugars of the terminal and/or anteterminal transcribed nucleotides of the 5′ end of the polynucleotide may optionally also be 2′-O-methylated. 5′-decapping through hydrolysis and cleavage of the guanylate cap structure may target a nucleic acid molecule, such as an mRNA molecule, for degradation.

[0168] Alterations to polynucleotides may generate a non-hydrolyzable cap structure preventing decapping and thus increasing polynucleotide half-life. Because cap structure hydrolysis requires cleavage of 5′-ppp-5′ phosphorodiester linkages, alternative nucleotides may be used during the capping reaction. In some embodiments, a Vaccinia Capping Enzyme from New England Biolabs (Ipswich, MA) may be used with a-thio-guanosine nucleotides according to the manufacturer's instructions to create a phosphorothioate linkage in the 5′-ppp-5′ cap. Additional alternative guanosine nucleotides may be used such as α-methyl-phosphonate and seleno-phosphate nucleotides.

[0169] Additional alterations include, but are not limited to, 2′-O-methylation of the ribose sugars of 5′-terminal and/or 5′-anteterminal nucleotides of the nucleic acid molecules on the 2′-hydroxy group of the sugar. Multiple distinct 5′ cap structures can be used to generate the 5′ cap of a polynucleotide, such as an mRNA molecule.

[0170] 5′ cap structures include those described in International Patent Publication Nos. WO2008/127688, WO 2008/016473, and WO 2011/015347, the cap structures of each of which are incorporated herein by reference.

[0171] Cap analogs, which herein are also referred to as synthetic cap analogs, chemical caps, chemical cap analogs, or structural or functional cap analogs, differ from natural (e.g., endogenous, wild-type, or physiological) 5′ caps in their chemical structure, while retaining cap function. Cap analogs may be chemically (i.e., non-enzymatically) or enzymatically synthesized and/linked to a polynucleotide.

[0172] For example, the Anti-Reverse Cap Analog (ARCA) cap contains two guanosines linked by a 5′-5′-triphosphate group, wherein one guanosine contains an N7-methyl group as well as a 3′-O-methyl group (i.e., N7,3′-O-dimethyl-guanosine-5′-triphosphate-5′-guanosine, m⁷G-3′mppp-G, which may equivalently be designated 3′ O-Me-m7G(5′)ppp(5′)G). The 3′-O atom of the other, unaltered, guanosine becomes linked to the 5′-terminal nucleotide of the capped polynucleotide (e.g., an mRNA). The N7- and 3′-O-methylated guanosine provides the terminal moiety of the capped polynucleotide (e.g., mRNA).

[0173] Another exemplary cap is mCAP, which is similar to ARCA but has a 2′-O-methyl group on guanosine (i.e., N7,2′-O-dimethyl-guanosine-5′-triphosphate-5′-guanosine, m⁷Gm-ppp-G).

[0174] A cap may be a dinucleotide cap analog. As a non-limiting example, the dinucleotide cap analog may be modified at different phosphate positions with a boranophosphate group or a phophoroselenoate group such as the dinucleotide cap analogs described in U.S. Pat. No. 8,519,110, the cap structures of which are herein incorporated by reference.

[0175] Alternatively, a cap analog may be a N7-(4-chlorophenoxyethyl) substituted dinucleotide cap analog known in the art and/or described herein. Non-limiting examples of N7-(4-chlorophenoxy ethyl) substituted dinucleotide cap analogs include a N7-(4-chlorophenoxyethyl)-G(5′)ppp(5′)G and a N7-(4-chlorophenoxyethyl)-m3′-OG(5)ppp(5′)G cap analog (see, e.g., the various cap analogs and the methods of synthesizing cap analogs described in Kore et al. (2013) Bioorganic & Medicinal Chemistry 21:4570-4574; the cap structures of which are herein incorporated by reference). In other instances, a cap analog useful in the nucleic acids of the present disclosure is a 4-chloro/bromophenoxy ethyl analog.

[0176] While cap analogs allow for the concomitant capping of a polynucleotide in an in vitro transcription reaction, up to 20% of transcripts remain uncapped. This, as well as the structural differences of a cap analog from endogenous 5′-cap structures of polynucleotides produced by the endogenous, cellular transcription machinery, may lead to reduced translational competency and reduced cellular stability.

[0177] Alternative polynucleotides may also be capped post-transcriptionally, using enzymes, in order to generate more authentic 5′-cap structures. As used herein, the phrase “more authentic” refers to a feature that closely mirrors or mimics, either structurally or functionally, an endogenous or wild type feature. That is, a“more authentic” feature is better representative of an endogenous, wild-type, natural or physiological cellular function, and/or structure as compared to synthetic features or analogs of the prior art, or which outperforms the corresponding endogenous, wild-type, natural, or physiological feature in one or more respects. Non-limiting examples of more authentic 5′-cap structures useful in the polynucleotides of the present disclosure are those which, among other things, have enhanced binding of cap binding proteins, increased half-life, reduced susceptibility to 5′-endonucleases, and/or reduced 5′-decapping, as compared to synthetic 5′-cap structures known in the art (or to a wild-type, natural or physiological 5′-cap structure). In some embodiments, recombinant Vaccinia Virus Capping Enzyme and recombinant 2′-O-methyltransferase enzyme can create a canonical 5′-5′-triphosphate linkage between the 5′-terminal nucleotide of a polynucleotide and a guanosine cap nucleotide wherein the cap guanosine contains an N7-methylation and the 5′-terminal nucleotide of the polynucleotide contains a 2′-O-methyl. Such a structure is termed the Cap 1 structure. This cap results in a higher translational-competency, cellular stability, and a reduced activation of cellular pro-inflammatory cytokines, as compared, e.g., to other 5′ cap analog structures known in the art. Other exemplary cap structures include 7mG(5′)ppp(5′)N1pN2p (Cap 0), 7mG(5′)ppp(5′)N1mpNp (Cap 1), 7mG(5′)-ppp(5′)N1mpN2mp (Cap 2), and m(7)Gpppm(3)(6,6,2′)Apm(2′)Apm(2′)Cpm(2)(3,2′)Up (Cap 4).

[0178] Because the alternative nucleic acid molecule may be capped post-transcriptionally, and because this process is more efficient, nearly 100% of the alternative polynucleotides may be capped. This is in contrast to ˜80% when a cap analog is linked to a polynucleotide in the course of an in vitro transcription reaction.

[0179] 5′-terminal caps may include endogenous caps or cap analogs. A 5′-terminal cap may include a guanosine analog. Useful guanosine analogs include inosine, N1-methyl-guanosine, 2′-fluoro-guanosine, 7-deaza-guanosine, 8-oxo-guanosine, 2-amino-guanosine, LNA-guanosine, and 2-azido-guanosine.

[0180] In some cases, a nucleic acid molecule contains a modified 5′-cap. A modification on the 5′-cap may increase the stability of polynucleotide, increase the half-life of the polynucleotide, and could increase the polynucleotide translational efficiency. The modified 5′-cap may include, but is not limited to, one or more of the following modifications: modification at the 2′- and/or 3′-position of a capped guanosine triphosphate (GTP), a replacement of the sugar ring oxygen (that produced the carbocyclic ring) with a methylene moiety (CH2), a modification at the triphosphate bridge moiety of the cap structure, or a modification at the nucleobase (G) moiety.

### 5′ UTR, 3′ UTR, and Translation Enhancer Elements (TEEs)

[0181] The 5′ and 3′ UTRs flanking the coding region regulate mRNA translation, half-life and subcellular localization. Naturally occurring UTRs from highly expressed genes, such as the α- and β-globin genes, are preferred for synthetic mRNA. However, because UTR performance can vary by cell type, alternative UTR sequences may be used that have been optimized for the desired application and intended cell target. These engineered UTR sequences minimize mRNA degradation by excluding miRNA-binding sites and AU rich regions in the 3′ UTR. Furthermore, they minimize regions that prevent ribosomes from scanning the mRNA transcript, such as sequences with secondary and tertiary structure (for example, hairpins) in the 5′ UTR. The open reading frame of the mRNA vaccine is the most crucial component because it contains the coding sequence that is translated into protein. Although the open reading frame is not as malleable as the non-coding regions, it can be optimized to increase translation without altering the protein sequence by replacing rarely used codons with more frequently occurring codons that encode the same amino acid residue. Although replacement of rare codons is an attractive optimization strategy, it must be used judiciously. This is because, in the case of some proteins, the slower translation rate of rare codons is necessary for proper protein folding.

[0182] Natural 5′UTRs bear features which play roles in translation initiation. They harbor signatures like Kozak sequences which are commonly known to be involved in the process by which the ribosome initiates translation of many genes. Kozak sequences have the consensus CCR(A/G)CCAUGG, where R is a purine (adenine or guanine) three bases upstream of the start codon (AUG), which is followed by another ‘G’. 5′UTR also have been known to form secondary structures which are involved in elongation factor binding.

[0183] By engineering the features typically found in abundantly expressed genes of specific target organs, one can enhance the stability and protein production of the polynucleotides of the invention. For example, use of 5′ UTR from other tissue-specific mRNA to improve expression in that tissue is possible for muscle (MyoD, Myosin, Myoglobin, Myogenin, Herculin), for endothelial cells (Tie-1, CD36), and for lung epithelial cells (SP-A/B/C/D). Such 5′ UTRs are especially useful for intramuscular, intradermal, and nasal administration of the vaccines of the present disclosure.

[0184] A 5′-UTR may be provided as a flanking region to polynucleotides (e.g, mRNAs). A 5′-UTR may be homologous or heterologous to the coding region found in a polynucleotide. Multiple 5′-UTRs may be included in the flanking region and may be the same or of different sequences. Any portion of the flanking regions, including none, may be codon optimized and any may independently contain one or more different structural or chemical alterations, before and/or after codon optimization.

[0185] Shown in Table 21 in U.S. Provisional Application No. 61/775,509, and in Table 21 and in Table 22 in U.S. Provisional Application No. 61/829,372, of which are incorporated herein by reference, is a listing of the start and stop site of alternative polynucleotides (e.g., mRNA). In Table 21, each 5′-UTR (5′-UTR-005 to 5′-UTR 68511) is identified by its start and stop site relative to its native or wild type (homologous) transcript (ENST; the identifier used in the ENSEMBL database).

[0186] To alter one or more properties of a polynucleotide (e.g, mRNA), 5′-UTRs which are heterologous to the coding region of an alternative polynucleotide (e.g, mRNA) may be engineered. The polynucleotides (e.g, mRNA) may then be administered to cells, tissue or organisms and outcomes such as protein level, localization, and/or half-life may be measured to evaluate the beneficial effects the heterologous 5′-UTR may have on the alternative polynucleotides (mRNA). Variants of the 5′-UTRs may be utilized wherein one or more nucleotides are added or removed to the termini, including A, T, C or G. 5′-UTRs may also be codon-optimized, or altered in any manner described herein.

[0187] The 5′-UTR of a polynucleotides (e.g, mRNA) may include at least one translation enhancer element. The term“translational enhancer element” refers to sequences that increase the amount of polypeptide or protein produced from a polynucleotide. As a non-limiting example, the TEE may be located between the transcription promoter and the start codon. The polynucleotides (e.g, mRNA) with at least one TEE in the 5′-UTR may include a cap at the 5-UTR. Further, at least one TEE may be located in the 5-UTR of polynucleotides (e.g, mRNA) undergoing cap-dependent or cap-independent translation.

[0188] In some aspects, TEEs are conserved elements in the UTR which can promote translational activity of a polynucleotide such as, but not limited to, cap-dependent or cap-independent translation. The conservation of these sequences has been previously shown by Panek et al. (Nucleic Acids Research, 2013, 1-10) across 14 species.

[0189] In some embodiments, the TEEs known may be in the 5-leader of the Gtx homeodomain protein (Chappell et al, Proc. Natl. Acad. Sci. USA 101:9590-9594, 2004, the TEEs of which are incorporated herein by reference).

[0190] In other embodiments, TEEs are disclosed in US Patent Publication Nos. 2009/0226470 and 2013/0177581, International Patent Publication Nos. WO2009/075886, WO2012/009644, and WO1999/024595, U.S. Pat. Nos. 6,310,197, and 6,849,405, the TEE sequences of each of which are incorporated herein by reference.

[0191] In yet other embodiments, the TEE may be an internal ribosome entry site (IRES), HCV-IRES or an IRES element such as, but not limited to, those described in U.S. Pat. No. 7,468,275, US Patent Publication Nos. 2007/0048776 and 2011/0124100 and International Patent Publication Nos. WO2007/025008 and WO2001/055369, the IRES sequences of each of which are incorporated herein by reference. The IRES elements may include, but are not limited to, the Gtx sequences (e.g., Gtx9-nt, Gtx8-nt, Gtx7-nt) described by Chappell et al. (Proc. Natl. Acad. Sci. USA 101:9590-9594, 2004) and Zhou et al. (PNAS 102:6273-6278, 2005) and in US Patent Publication Nos. 2007/0048776 and 2011/0124100 and International Patent Publication No. WO2007/025008, the IRES sequences of each of which are incorporated herein by reference.

[0192] “Translational enhancer polynucleotides” are polynucleotides which include one or more of the specific TEE exemplified herein and/or disclosed in the art (see e.g., U.S. Pat. Nos. 6,310,197, 6,849,405, 7,456,273, 7,183,395, U.S. Patent Publication Nos. 2009/226470, 2007/0048776, 2011/0124100, 2009/0093049, 2013/0177581, International Patent Publication Nos. WO2009/075886, WO2007/025008, WO2012/009644, WO2001/055371, WO 1999/024595, and European Patent Nos. 2610341 and 2610340; the TEE sequences of each of which are incorporated herein by reference) or their variants, homologs or functional derivatives. One or multiple copies of a specific TEE can be present in a polynucleotide (e.g., mRNA). The TEEs in the translational enhancer polynucleotides can be organized in one or more sequence segments. A sequence segment can harbor one or more of the specific TEEs exemplified herein, with each TEE being present in one or more copies. When multiple sequence segments are present in a translational enhancer polynucleotide, they can be homogenous or heterogeneous. Thus, the multiple sequence segments in a translational enhancer polynucleotide can harbor identical or different types of the specific TEEs exemplified herein, identical or different number of copies of each of the specific TEEs, and/or identical or different organization of the TEEs within each sequence segment.

[0193] A polynucleotide (e.g., mRNA) may include at least one TEE that is described in International Patent Publication Nos. WO1999/024595, WO2012/009644, WO2009/075886, WO2007/025008, WO1999/024595, European Patent Publication Nos. 2610341 and 2610340, U.S. Pat. Nos. 6,310,197, 6,849,405, 7,456,273, 7,183,395, and US Patent Publication Nos. 2009/0226470, 2011/0124100, 2007/0048776, 2009/0093049, and 2013/0177581 the TEE sequences of each of which are incorporated herein by reference.

[0194] The TEE may be located in the 5′-UTR of the polynucleotides (e.g., mRNA).

[0195] A polynucleotide (e.g., mRNA) may include at least one TEE that has at least 50%, at least 55%, at least 60%, at least 65%, at least 70%, at least 75%, at least 80%, at least 85%, at least 90%, at least 95% or at least 99% identity with the TEEs described in US Patent Publication Nos. 2009/0226470, 2007/0048776, 2013/0177581 and 2011/0124100, International Patent Publication Nos. WO1999/024595, WO2012/009644, WO2009/075886 and WO2007/025008, European Patent Publication Nos. 2610341 and 2610340, U.S. Pat. Nos. 6,310,197, 6,849,405, 7,456,273, 7,183,395, the TEE sequences of each of which are incorporated herein by reference.

[0196] The 5′-UTR of a polynucleotide (e.g, mRNA) may include at least 1, at least 2, at least 3, at least 4, at least 5, at least 6, at least 7, at least 8, at least 9, at least 10, at least 11, at least 12, at least 13, at least 14, at least 15, at least 16, at least 17, at least 18 at least 19, at least 20, at least 21, at least 22, at least 23, at least 24, at least 25, at least 30, at least 35, at least 40, at least 45, at least 50, at least 55 or more than 60 TEE sequences. The TEE sequences in the 5′-UTR of a polynucleotide (e.g, mRNA) may be the same or different TEE sequences. The TEE sequences may be in a pattern such as ABABAB, AABBAABBAABB, or ABCABCABC, or variants thereof, repeated once, twice, or more than three times. In these patterns, each letter, A, B, or C represent a different TEE sequence at the nucleotide level.

[0197] In some cases, the 5-UTR may comprise a spacer to separate two TEE sequences. As a non-limiting example, the spacer may be a 15 nucleotide spacer and/or other spacers known in the art. As another non-limiting example, the 5′-UTR may include a TEE sequence-spacer module repeated at least once, at least twice, at least 3 times, at least 4 times, at least 5 times, at least 6 times, at least 7 times, at least 8 times, at least 9 times, or more than 9 times in the 5′-UTR.

[0198] In other instances, the spacer separating two TEE sequences may include other sequences known in the art which may regulate the translation of the polynucleotides (e.g., mRNA) of the present disclosure such as, but not limited to, miR sequences (e.g., miR binding sites and miR seeds). As a non-limiting example, each spacer used to separate two TEE sequences may comprise a different miR sequence or component of a miR sequence (e.g., miR seed sequence).

[0199] In some instances, the TEE in the 5′-UTR of a polynucleotide (e.g., mRNA) may include at least 5%, at least 10%, at least 15%, at least 20%, at least 25%, at least 30%, at least 35%, at least 40%, at least 45%, at least 50%, at least 55%, at least 60%, at least 65%, at least 70%, at least 75%, at least 80%, at least 85%, at least 90%, at least 95%, at least 99% or more than 99% of the TEE sequences disclosed in US Patent Publication Nos. 2009/0226470, 2007/0048776, 2013/0177581 and 2011/0124100, International Patent Publication Nos. WO1999/024595, WO2012/009644, WO2009/075886 and WO2007/025008, European Patent Publication Nos. 2610341 and 2610340, and U.S. Pat. Nos. 6,310,197, 6,849,405, 7,456,273, and 7,183,395, the TEE sequences of each of which are incorporated herein by reference. In other embodiments, the TEE in the 5′-UTR of the polynucleotides (e.g., mRNA) of the present disclosure may include a 5-30 nucleotide fragment, a 5-25 nucleotide fragment, a 5-20 nucleotide fragment, a 5-15 nucleotide fragment, a 5-10 nucleotide fragment of the TEE sequences disclosed in US Patent Publication Nos. 2009/0226470, 2007/0048776, 2013/0177581 and 2011/0124100, International Patent Publication Nos. WO 1999/024595, WO2012/009644, WO2009/075886, and WO2007/025008, European Patent Publication Nos. 2610341 and 2610340, and U.S. Pat. Nos. 6,310,197, 6,849,405, 7,456,273, and 7,183,395; the TEE sequences of each of which are incorporated herein by reference.

[0200] In certain cases, the TEE in the 5′-UTR of the polynucleotides (e.g., mRNA) of the present disclosure may include at least 5%, at least 10%, at least 15%, at least 20%, at least 25%, at least 30%, at least 35%, at least 40%, at least 45%, at least 50%, at least 55%, at least 60%, at least 65%, at least 70%, at least 75%, at least 80%, at least 85%, at least 90%, at least 95%, at least 99% or more than 99% of the TEE sequences disclosed in Chappell et al. (Proc. Natl. Acad. Sci. USA 101:9590-9594, 2004) and Zhou et al. (PNAS 102:6273-6278, 2005), in Supplemental Table 1 and in Supplemental Table 2 disclosed by Wellensiek et al (Nature Methods, 2013; DOI: 10.1038/NMETH.2522); the TEE sequences of each of which are herein incorporated by reference.

[0201] In other embodiments, the TEE in the 5′-UTR of the polynucleotides (e.g., mRNA) of the present disclosure may include a 5-30 nucleotide fragment, a 5-25 nucleotide fragment, a 5-20 nucleotide fragment, a 5-15 nucleotide fragment, a 5-10 nucleotide fragment of the TEE sequences disclosed in Chappell et al. (Proc. Natl. Acad. Sci. USA 101:9590-9594, 2004) and Zhou et al. (PNAS 102:6273-6278, 2005), in Supplemental Table 1 and in Supplemental Table 2 disclosed by Wellensiek et al (Nature Methods, 2013; DOI: 10.1038/NMETH.2522); the TEE sequences of each of which is incorporated herein by reference.

[0202] In some cases, the TEE used in the 5′-UTR of a polynucleotide (e.g., mRNA) is an IRES sequence such as, but not limited to, those described in U.S. Pat. No. 7,468,275 and International Patent Publication No. WO2001/055369, the TEE sequences of each of which are incorporated herein by reference.

[0203] In some instances, the TEEs used in the 5′-UTR of a polynucleotide (e.g., mRNA) may be identified by the methods described in US Patent Publication Nos. 2007/0048776 and 2011/0124100 and International Patent Publication Nos. WO2007/025008 and

[0204] WO2012/009644, the methods of each of which are incorporated herein by reference.

[0205] In some cases, the TEEs used in the 5-UTR of a polynucleotide (e.g., mRNA) of the present disclosure may be a transcription regulatory element described in U.S. Pat. Nos. 7,456,273 and 7,183,395, US Patent Publication No. 2009/0093049, and International Publication No. WO2001/055371, the TEE sequences of each of which is incorporated herein by reference. The transcription regulatory elements may be identified by methods known in the art, such as, but not limited to, the methods described in U.S. Pat. Nos. 7,456,273 and 7,183,395, US Patent Publication No. 2009/0093049, and International Publication No. WO2001/055371, the methods of each of which is incorporated herein by reference.

[0206] In yet other instances, the TEE used in the 5-UTR of a polynucleotide (e.g., mRNA) is a polynucleotide or portion thereof as described in U.S. Pat. Nos. 7,456,273 and 7,183,395, US Patent Publication No. 2009/0093049, and International Publication No. WO2001/055371, the TEE sequences of each of which are incorporated herein by reference.

[0207] The 5′-UTR including at least one TEE described herein may be incorporated in a monocistronic sequence such as, but not limited to, a vector system or a polynucleotide vector. As a non-limiting example, the vector systems and polynucleotide vectors may include those described in U.S. Pat. Nos. 7,456,273 and 7,183,395, US Patent Publication Nos. 2007/0048776, 2009/0093049 and 2011/0124100, and International Patent Publication Nos. WO2007/025008 and WO2001/055371, the TEE sequences of each of which are incorporated herein by reference.

[0208] The TEEs described herein may be located in the 5′-UTR and/or the 3′-UTR of the polynucleotides (e.g., mRNA). The TEEs located in the 3′-UTR may be the same and/or different than the TEEs located in and/or described for incorporation in the 5′-UTR.

[0209] In some cases, the 3′-UTR of a polynucleotide (e.g., mRNA) may include at least 1, at least 2, at least 3, at least 4, at least 5, at least 6, at least 7, at least 8, at least 9, at least 10, at least 11, at least 12, at least 13, at least 14, at least 15, at least 16, at least 17, at least 18 at least 19, at least 20, at least 21, at least 22, at least 23, at least 24, at least 25, at least 30, at least 35, at least 40, at least 45, at least 50, at least 55 or more than 60 TEE sequences. The TEE sequences in the 3′-UTR of the polynucleotides (e.g., mRNA) of the present disclosure may be the same or different TEE sequences. The TEE sequences may be in a pattern such as ABABAB, AABBAABBAABB, or ABCABCABC, or variants thereof, repeated once, twice, or more than three times. In these patterns, each letter, A, B, or C represent a different TEE sequence at the nucleotide level.

[0210] In one instance, the 3′-UTR may include a spacer to separate two TEE sequences. As a non-limiting example, the spacer may be a 15 nucleotide spacer and/or other spacers known in the art. As another non-limiting example, the 3′-UTR may include a TEE sequence-spacer module repeated at least once, at least twice, at least 3 times, at least 4 times, at least 5 times, at least 6 times, at least 7 times, at least 8 times, at least 9 times, or more than 9 times in the 3′-UTR.

[0211] In other cases, the spacer separating two TEE sequences may include other sequences known in the art which may regulate the translation of the polynucleotides (e.g., mRNA) of the present disclosure such as, but not limited to, miR sequences described herein (e.g., miR binding sites and miR seeds). As a non-limiting example, each spacer used to separate two TEE sequences may include a different miR sequence or component of a miR sequence (e.g., miR seed sequence).

[0212] In some embodiments, a polyribonucleotide of the disclosure comprises a miR and/or TEE sequence. In some embodiments, the incorporation of a miR sequence and/or a TEE sequence into a polyribonucleotide of the disclosure can change the shape of the stem loop region, which can increase and/or decrease translation. See e.g., Kedde et al, Nature Cell Biology 2010 12(10): 1014-20, herein incorporated by reference in its entirety.

TABLE 4A
Exemplary 5′ untranslated regions (UTRs)

See SEQ ID NO: 12148 to SEQ ID NO: 12164 for the representative 5′ UTR sequences.
SEQ ID NO: 16953 is a 5′ UTR sequence used in the BNT162b2 vaccine
(BioNTech/Pfizer) and has the following nucleic acid sequence:
GAGAATAAACTAGTATTCTTCTGGTCCCCACAGACTCAGAGAGAACCCGCCACC
(*The above sequence includes RNA sequence in which T is replaced with U or any variant thereof)

TABLE 4B
Exemplary 3′ untranslated regions (UTRs)

See SEQ ID NO: 12165 to SEQ ID NO: 12181 for the representative 3′ UTR sequences.
SEQ ID NO: 16954 is a 3′ UTR sequence used in the BNT162b2 vaccine
(BioNTech/Pfizer) and has the following nucleic acid sequence:
CTCGAGCTGGTACTGCATGCACGCAATGCTAGCTGCCCCTTTCCCGTCCTGGGTACC
CCGAGTCTCCCCCGACCTCGGGTCCCAGGTATGCTCCCACCTCCACCTGCCCCACTC
ACCACCTCTGCTAGTTCCAGACACCTCCCAAGCACGCAGCAATGCAGCTCAAAACG
CTTAGCCTAGCCACACCCCCACGGGAAACAGCAGTGATTAACCTTTAGCAATAAAC
GAAAGTTTAACTAAGCTATACTAACCCCAGGGTTGGTCAATTTCGTGCCAGCCACAC
CCTGGAGCTAGC
(*The above sequence includes RNA sequence in which T is replaced with U or any variant thereof)

* Included in Tables 4 and 5 are RNA nucleic acid molecules (e.g., thymidine replaced with uridine), as well as DNA or RNA nucleic acid sequences or any variant thereof (a structural variant or a chemical variant (e.g., chemically modified nucleotide)) comprising a nucleic acid sequence having at least 80%, 81%, 82%, 83%, 84%, 85%, 86%, 87%, 88%, 89%, 90%, 91%, 92%, 93%, 94%, 95%, 96%, 97%, 98%, 99%, 99.5%, or more identity across their full length with the nucleic acid sequence of any SEQ ID NO listed in Tables 4 or 5, or a portion thereof. Such nucleic acid molecules can have a function of the full-length nucleic acid (e.g., for the intended function of inducing an immune response) as described further herein. Further included are orthologous nucleic acid sequences. A person of ordinary skill in the art understands how to determine the orthologous nucleic acid sequences (e.g., of ruminants) described herein based on the sequence similarity (e.g., by BLAST search).

### Internal Ribosome Entry Sites

[0213] Polynucleotides may contain an internal ribosome entry site (IRES). An IRES may act as the sole ribosome binding site, or may serve as one of multiple ribosome binding sites of an mRNA. A polynucleotide containing more than one functional ribosome binding site may encode several peptides or polypeptides that are translated independently by the ribosomes (e.g., multicistronic mRNA). When polynucleotides are provided with an IRES, further optionally provided is a second translatable region. Examples of IRES sequences that can be used according to the present disclosure include without limitation, those from picomaviruses (e.g., FMDV), pest viruses (CFFV), polio viruses (PV), encephalomyocarditis viruses (ECMV), foot-and-mouth disease viruses (FMDV), hepatitis C viruses (HCV), classical swine fever viruses (CSFV), murine leukemia virus (MLV), simian immune deficiency viruses (SIV) or cricket paralysis viruses (CrPV).

### Nucleic Acid Sequence Encoding the Antigen

[0214] In some embodiments, the nucleic acid sequences that encode at least one cell surface protein or a fragment thereof of at least one methanogen are present on multiple (e.g., at least 2, 3, 4, 5, 6, 7, 8, 9, or 10) nucleic acid (e.g., mRNA) molecules.

[0215] In other embodiments, the nucleic acid sequences that encode at least one cell surface protein or a fragment thereof of at least one methanogen is present on one nucleic acid (e.g., mRNA) molecule.

[0216] In certain embodiments, nucleic acid sequences encoding multiple (e.g., at least 2, 3, 4, 5, 6, 7, 8, 9, or 10) polypeptides are in a nucleic acid (e.g., mRNA) molecule such that translation of the nucleic acid produces a concatemeric polypeptide, which comprises two or more heterologous polypeptides that are translated as a single fusion polypeptide. In some embodiments, such polypeptides are fragments of one cell surface protein. In other embodiments, such polypeptides are fragments of multiple cell surface proteins.

[0217] Any variation of the above is contemplated. In preferred embodiments, nucleic acid comprises sequences that encode multiple cell surface proteins or fragments thereof (e.g., antigenic fragment) to maximize the immune response against methanogens.

### Nucleoside Modification

[0218] To maximize translation, the mRNA sequence typically incorporates modified nucleosides, such as pseudouridine, N1-methylpseudouridine or other nucleoside analogues. Because all native mRNAs include modified nucleosides, the immune system has evolved to recognize unmodified single-stranded RNA, which is a hallmark of viral infection. Specifically, unmodified mRNA is recognized by pattern recognition receptors (PRRs), such as Toll-like receptor 3 (TLR3), TLR7 and TLR8, and the retinoic acid-inducible gene I (RIGI) receptor. TLR7 and TLR8 receptors bind to guanosine- or uridine-rich regions in mRNA and trigger the production of type I interferons, such as IFNα, that can block mRNA translation.

[0219] The use of modified nucleosides, particularly modified uridine, prevents recognition by pattern recognition receptors, enabling sufficient levels of translation to produce prophylactic amounts of protein. Another strategy to avoid detection by pattern recognition receptors, pioneered by CureVac, uses sequence engineering and codon optimization to deplete uridines by boosting the GC content of the vaccine mRNA. In addition to improvements to the mRNA sequence, significant advances have also been made to streamline mRNA production. Clinically used synthetic mRNA is transcribed in vitro from a DNA plasmid by using the bacteriophage RNA polymerase T7 (T3 and SP6 polymerases can also be used). It is co-transcriptionally capped (e.g., CleanCap, developed by TriLink BioTechnologies) with a 2′-O-methylated cap and purified to remove double-stranded RNA (dsRNA) contaminants, reactants and incomplete transcripts. Other methods add the cap with a post-transcriptional reaction using capping and 2′-O-methyltransferase enzymes derived from the vaccinia virus. The polyA tail is encoded in the DNA template, which eliminates reaction steps and reduces overall production time and material loss.

### 1. Nucleobase Alternatives

[0220] The alternative nucleosides and nucleotides can comprise an alternative nucleobase. A nucleobase of a nucleic acid is an organic base such as a purine or pyrimidine or a derivative thereof. A nucleobase may be a canonical base (e.g., adenine, guanine, uracil, thymine, and cytosine). These nucleobases can be altered or wholly replaced to provide polynucleotide molecules having enhanced properties, e.g., increased stability such as resistance to nucleases. Non-canonical or modified bases may comprise, for example, one or more substitutions or modifications including, but are not limited to, alkyl, aryl, halo, oxo, hydroxyl, alkyloxy, and/or thio substitutions; one or more fused or open rings; oxidation; and/or reduction.

[0221] Alternative nucleotide base pairing encompasses not only the standard adenine-thymine, adenine-uracil, or guanine-cytosine base pairs, but also base pairs formed between nucleotides and/or alternative nucleotides including non-standard or alternative bases, wherein the arrangement of hydrogen bond donors and hydrogen bond acceptors permits hydrogen bonding between a non-standard base and a standard base or between two complementary non-standard base structures. One example of such non-standard base pairing is the base pairing between the alternative nucleotide inosine and adenine, cytosine, or uracil.

[0222] In some embodiments, the nucleobase is an alternative uracil. Exemplary nucleobases and nucleosides having an alternative uracil include, but are not limited to, pseudouridine (Ψ), pyridin-4-one ribonucleoside, 5-aza-uracil, 6-aza-uracil, 2-thio-5-aza-uracil, 2-thio-uracil (s²U), 4-thio-uracil (s⁴U), 4-thio-pseudouridine, 2-thio-pseudouridine, 5-hydroxy-uracil (ho⁵U), 5-aminoallyl-uracil, 5-halo-uracil (e.g., 5-iodo-uracil or 5-bromo-uracil), 3-methyl-uracil (m³U), 5-methoxy-uracil (mo⁵U), uracil 5-oxyacetic acid (cmo⁵U), uracil 5-oxyacetic acid methyl ester (memo⁵U), 5-carboxy methyl-uracil (cm⁵U), 1-carboxymethyl-pseudouridine, 5-carboxyhydroxymethyl-uracil (chm⁵U), 5-carboxyhydroxymethyl-uracil methyl ester (mchm⁵U), 5-methoxycarbonylmethyl-uracil (mcm⁵U), 5-methoxycarbonylmethyl-2-thio-uracil (mcm⁵s²U), 5-aminomethyl-2-thio-uracil (nm⁵s²U), 5-methylaminomethy 1-uracil (mnm⁵U), 5-methylaminomethyl-2-thio-uracil (mnm⁵s²U), 5-methylaminomethyl-2-seleno-uracil (mnm⁵se²U), 5-carbamoylmethy 1-uracil (ncm⁵U), 5-carboxymethylaminomethyl-uracil (cmnm⁵U), 5-carboxymethylaminomethyl-2-thio-uracil (cmnm⁵s²U), 5-propyny 1-uracil, 1-propynyl-pseudouracil, 5-taurinomethy 1-uracil (xm⁵U), 1-taurinomethyl-pseudouridine, 5-taurinomethyl-2-thio-uracil(xm⁵s²U), 1-taurinomethyl-4-thio-pseudouridine, 5-methyl-uracil (m⁵U, i.e., having the nucleobase deoxythymine), 1-methyl-pseudouridine (m¹T), 5-methyl-2-thio-uracil (m⁵s²U), 1-methyl-4-thio-pseudouridine (m¹s⁴Ψ). 4-thio-1-methyl-pseudouridine, 3-methyl-pseudouridine (m³Ψ), 2-thio-1-methyl-pseudouridine, 1-methyl-1-deaza-pseudouridine, 2-thio-1-methyl-1-deaza-pseudouridine, dihydrouracil (D), dihydropseudouridine, 5,6-dihydrouracil, 5-methyl-dihydrouracil (m⁵D), 2-thio-dihydrouracil, 2-thio-dihydropseudouridine, 2-methoxy-uracil, 2-methoxy-4-thio-uracil, 4-methoxy-pseudouridine, 4-methoxy-2-thio-pseudouridine, Ni-methyl-pseudouridine, 3-(3-amino-3-carboxypropyl)uracil (acp³U), 1-methyl-3-(3-amino-3-carboxypropyl)pseudouridine (acp³′P), 5-(isopentenylaminomethyl)uracil (inm⁵U), 5-(isopentenylaminomethyl)-2-thio-uracil (inm⁵s²U), 5, 2′-O-dimethy 1-uridine (m⁵Um), 2-thio-2′-O_methyl-uridine (s²Um), 5-methoxycarbonylmethyl-2′-O-methyl-uridine (mcm⁵Um), 5-carbamoylmethyl-2′-O-methyl-uridine (ncm⁵Um), 5-carboxymethylaminomethyl-2′-O-methyl-uridine (cmnm⁵Um), 3, 2′-O-dimethy 1-uridine (m³Um), and 5-(isopentenylaminomethyl)-2′-O-methyl-uridine (inm⁵Um), 1-thio-uracil, deoxythymidine, 5-(2-carbomethoxyvinyl)-uracil, 5-(carbamoylhydroxymethyl)-uracil, 5-carbamoylmethy 1-2-thio-uracil, 5-carboxymethyl-2-thio-uracil, 5-cyanomethyl-uracil, 5-methoxy-2-thio-uracil, and 5-[3-(1-E-propenylamino)]uracil.

[0223] In some embodiments, the nucleobase is an alternative cytosine. Exemplary nucleobases and nucleosides having an alternative cytosine include, but are not limited to, 5-aza-cytosine, 6-aza-cytosine, pseudoisocytidine, 3-methyl-cytosine (m3C), N4-acetyl-cytosine (ac4C), 5-formyl-cytosine (f5C), N4-methy 1-cytosine (m4C), 5-methyl-cytosine (m5C), 5-halo-cytosine (e.g., 5-iodo-cytosine), 5-hydroxymethyl-cytosine (hm5C), 1-methyl-pseudoisocytidine, pyrrolo-cytosine, pyrrolo-pseudoisocytidine, 2-thio-cytosine (s2C), 2-thio-5-methyl-cytosine, 4-thio-pseudoisocytidine, 4-thio-1-methyl-pseudoisocytidine, 4-thio-1-methyl-1-deaza-pseudoisocytidine, 1-methyl-1-deaza-pseudoisocyti dine, zebularine, 5-aza-zebularine, 5-methyl-zebularine, 5-aza-2-thio-zebularine, 2-thio-zebularine, 2-methoxy-cytosine, 2-methoxy-5-methyl-cytosine, 4-methoxy-pseudoisocytidine, 4-methoxy-1-methyl-pseudoisocytidine, lysidine (k2C), 5,2′-O-dimethyl-cytidine (m5Cm), N4-acetyl-2′-O-methyl-cytidine (ac4Cm), N4,2′-O-dimethyl-cytidine (m4Cm), 5-formyl-2′-O-methyl-cytidine (f5Cm), N4,N4,2′-O-trimethyl-cytidine (m42Cm), 1-thio-cytosine, 5-hydroxy-cytosine, 5-(3-azidopropyl)-cytosine, and 5-(2-azidoethyl)-cytosine.

[0224] In some embodiments, the nucleobase is an alternative adenine. Exemplary nucleobases and nucleosides having an alternative adenine include, but are not limited to, 2-amino-purine, 2,6-diaminopurine, 2-amino-6-halo-purine (e.g., 2-amino-6-chloro-purine), 6-halo-purine (e.g., 6-chloro-purine), 2-amino-6-methyl-purine, 8-azido-adenine, 7-deaza-adenine, 7-deaza-8-aza-adenine, 7-deaza-2-amino-purine, 7-deaza-8-aza-2-amino-purine, 7-deaza-2,6-diaminopurine, 7-deaza-8-aza-2,6-diaminopurine, 1-methyl-adenine (m1A), 2-methyl-adenine (m2A), N6-methyl-adenine (m6A), 2-methylthio-N6-methy 1-adenine (ms2m6A), N6-isopentenyl-adenine (i6A), 2-methylthio-N6-isopentenyl-adenine (ms2i6A), N6-(cis-hydroxyisopentenyl)adenine (io6A), 2-methylthio-N6-(cis-hydroxyisopentenyl)adenine (ms2io6A), N6-glycinylcarbamoyl-adenine (g6A), N6-threonylcarbamoyl-adenine (t6A), N6-methyl-N6-threonylcarbamoyl-adenine (m6t6A), 2-methylthio-N6-threonylcarbamoyl-adenine (ms2 g6A), N6,N6-dimethyl-adenine (m62A), N6-hydroxynorvalylcarbamoyl-adenine (hn6A), 2-methylthio-N6-hydroxynorvalylcarbamoyl-adenine (ms2hn6A), N6-acety 1-adenine (ac6A), 7-methy 1-adenine, 2-methylthio-adenine, 2-methoxy-adenine, N6,2′-O-dimethyl-adenosine (m6Am), N6,N6,2′-O-trimethyl-adenosine (m62Am), 1,2′-O-dimethyl-adenosine (ml Am), 2-amino-N6-methy 1-purine, 1-thio-adenine, 8-azido-adenine, N6-(19-amino-pentaoxanonadecyl)-adenine, 2,8-dimethyl-adenine, N6-formyl-adenine, and N6-hydroxymethyl-adenine.

[0225] In some embodiments, the nucleobase is an alternative guanine. Exemplary nucleobases and nucleosides having an alternative guanine include, but are not limited to, inosine (I), 1-methyl-inosine (mlI), wyosine (imG), methylwyosine (mimG), 4-demethyl-wyosine (imG-14), isowyosine (imG2), wybutosine (yW), peroxywybutosine (o2yW), hydroxy wybutosine (OHyW), undermodified hydroxy wybutosine (OHyW*), 7-deaza-guanine, queuosine (Q), epoxy queuosine (oQ), galactosyl-queuosine (galQ), mannosyl-queuosine (manQ), 7-cyano-7-deaza-guanine (preQO), 7-aminomethyl-7-deaza-guanine (preQl), archaeosine (G+), 7-deaza-8-aza-guanine, 6-thio-guanine, 6-thio-7-deaza-guanine, 6-thio-7-deaza-8-aza-guanine, 7-methy 1-guanine (m7G), 6-thio-7-methy 1-guanine, 7-methyl-inosine, 6-methoxy-guanine, 1-methyl-guanine (mlG), N2-methyl-guanine (m2G), N2,N2-dimethyl-guanine (m22G), N2, 7-dimethyl-guanine (m2,7G), N2, N2,7-dimethy 1-guanine (m2,2,7G), 8-oxo-guanine, 7-methyl-8-oxo-guanine, 1-methyl-6-thio-guanine, N2-methyl-6-thio-guanine, N2,N2-dimethyl-6-thio-guanine, N2-methyl-2′-O-methyl-guanosine (m2Gm), N2,N2-dimethyl-2′-O-methyl-guanosine (m22Gm), 1-methyl-2′-O-methyl-guanosine (mlGm), N2,7-dimethyl-2′-O-methyl-guanosine (m2,7Gm), 2′-O-methyl-inosine (Im), 1,2′-O-dimethyl-inosine (mllm), 1-thio-guanine, and 0-6-methyl-guanine.

[0226] The alternative nucleobase of a nucleotide can be independently a purine, a pyrimidine, a purine or pyrimidine analog. In some embodiments, the nucleobase can be an alternative to adenine, cytosine, guanine, uracil, or hypoxanthine. In another embodiment, the nucleobase can also include, for example, naturally-occurring and synthetic derivatives of a base, including, but not limited to, pyrazolo[3,4-d]pyrimidines, 5-methylcytosine (5-me-C), 5-hydroxymethyl cytosine, xanthine, hypoxanthine, 2-aminoadenine, 6-methyl and other alkyl derivatives of adenine and guanine, 2-propyl and other alkyl derivatives of adenine and guanine, 2-thiouracil, 2-thiothymine and 2-thiocytosine, 5-propynyl uracil and cytosine, 6-azo uracil, cytosine and thymine, 5-uracil (pseudouracil), 4-thiouracil, 8-halo (e.g., 8-bromo), 8-amino, 8-thiol, 8-thioalkyl, 8-hydroxy and other 8-substituted adenines and guanines, 5-halo particularly 5-bromo, 5-trifluoromethyl and other 5-substituted uracils and cytosines, 7-methylguanine and 7-methyladenine, 8-azaguanine and 8-azaadenine, deazaguanine, 7-deazaguanine, 3-deazaguanine, deazaadenine, 7-deazaadenine, 3-deazaadenine, pyrazolo[3,4-d] pyrimidine, imidazo[1,5-a] 1,3,5 triazinones, 9-deazapurines, imidazo[4,5-d]pyrazines, thiazolo[4,5-d]pyrimidines, pyrazin-2-ones, 1,2,4-triazine, pyridazine; or 1,3,5 triazine.

[0227] When the nucleotides are depicted using the shorthand A, G, C, T or U, each letter refers to the representative base and/or derivatives thereof, e.g., A includes adenine or adenine analogs, e.g., 7-deaza adenine).

[0228] Additional modifications of the nucleotides are taught by e.g., Tables 22, 23, and 25 of WO2015/164674, which is incorporated herein by reference.

### 2. Alteration on the Sugar

[0229] Nucleosides include a sugar molecule (e.g., a 5-carbon or 6-carbon sugar, such as pentose, ribose, arabinose, xylose, glucose, galactose, or a deoxy derivative thereof) in combination with a nucleobase, while nucleotides are nucleosides containing a nucleoside and a phosphate group or alternative group (e.g., boranophosphate, thiophosphate, selenophosphate, phosphonate, alkyl group, amidate, and glycerol). A nucleoside or nucleotide may be a canonical species, e.g., a nucleoside or nucleotide including a canonical nucleobase, sugar, and, in the case of nucleotides, a phosphate group, or may be an alternative nucleoside or nucleotide including one or more alternative components. In some embodiments, alternative nucleosides and nucleotides can be altered on the sugar of the nucleoside or nucleotide. In some embodiments, the alternative nucleosides or nucleotides include the structures described in WO2020/160397, which is incorporated herein by reference.

[0230] In some embodiments, the 2′-hydroxy group (OH) can be modified or replaced with a number of different substituents. Exemplary substitutions at the 2′-position include, but are not limited to, H, azido, halo (e.g., fluoro), optionally substituted Ci-6 alkyl (e.g., methyl); optionally substituted Ci-6 alkoxy (e.g., methoxy or ethoxy); optionally substituted C6-io aryloxy; optionally substituted C3-8 cycloalkyl; optionally substituted G,-in aryl-Ci-6 alkoxy, optionally substituted Ci-12 (heterocyclyl)oxy; a sugar (e.g., ribose, pentose, or any described herein); a polyethyleneglycol (PEG), —O(CH2CH2O)nCH2CH2OR, where R is H or optionally substituted alkyl, and n is an integer from 0 to 20 (e.g., from 0 to 4, from 0 to 8, from 0 to 10, from 0 to 16, from 1 to 4, from 1 to 8, from 1 to 10, from 1 to 16, from 1 to 20, from 2 to 4, from 2 to 8, from 2 to 10, from 2 to 16, from 2 to 20, from 4 to 8, from 4 to 10, from 4 to 16, and from 4 to 20); “locked” nucleic acids (LNA) in which the 2′-hydroxy is connected by a Ci-6 alkylene or Ci-6 heteroalkylene bridge to the 4′-carbon of the same ribose sugar, where exemplary bridges included methylene, propylene, ether, or amino bridges; aminoalkyl, as defined herein; aminoalkoxy, as defined herein; amino as defined herein; and amino acid, as defined herein.

[0231] Generally, RNA includes the sugar group ribose, which is a 5-membered ring having an oxygen. Exemplary, non-limiting alternative nucleotides include replacement of the oxygen in ribose (e.g., with S, Se, or alkylene, such as methylene or ethylene); addition of a double bond (e.g., to replace ribose with cyclopentenyl or cyclohexenyl); ring contraction of ribose (e.g., to form a 4-membered ring of cyclobutane or oxetane); ring expansion of ribose (e.g., to form a 6- or 7-membered ring having an additional carbon or heteroatom, such as for anhydrohexitol, altritol, mannitol, cyclohexanyl, cyclohexenyl, and morpholino (that also has a phosphoramidate backbone)); multicyclic forms (e.g., tricyclo and “unlocked” forms, such as glycol nucleic acid (GNA) (e.g., R-GNA or S-GNA, where ribose is replaced by glycol units attached to phosphodiester bonds), threose nucleic acid (TNA, where ribose is replace with α-L-threofuranosyl-(3′ 2′)), and peptide nucleic acid (PNA, where 2-amino-ethyl-glycine linkages replace the ribose and phosphodiester backbone).

[0232] In some embodiments, the sugar group contains one or more carbons that possess the opposite stereochemical configuration of the corresponding carbon in ribose. Thus, a polynucleotide molecule can include nucleotides containing, e.g., arabinose or L-ribose, as the sugar.

[0233] In some embodiments, the polynucleotide includes at least one nucleoside wherein the sugar is L-ribose, 2′-O-methy 1-ribose, 2′-fluoro-ribose, arabinose, hexitol, an LNA, or a PNA.

### 3. Alterations on the Internucleoside Linkage

[0234] Alternative nucleotides can be altered on the intemucleoside linkage (e.g., phosphate backbone). Herein, in the context of the polynucleotide backbone, the phrases “phosphate” and“phosphodiester” are used interchangeably. Backbone phosphate groups can be altered by replacing one or more of the oxygen atoms with a different substituent.

[0235] The alternative nucleotides can include the wholesale replacement of an unaltered phosphate moiety with another intemucleoside linkage as described herein. Examples of alternative phosphate groups include, but are not limited to, phosphorothioate, phosphoroselenates, boranophosphates, boranophosphate esters, hydrogen phosphonates, phosphoramidates, phosphorodiamidates, alkyl or aryl phosphonates, and phosphotriesters. Phosphorodithioates have both non-linking oxygens replaced by sulfur. The phosphate linker can also be altered by the replacement of a linking oxygen with nitrogen (bridged phosphoramidates), sulfur (bridged phosphorothioates), and carbon (bridged methylene-phosphonates).

[0236] The alternative nucleosides and nucleotides can include the replacement of one or more of the non-bridging oxygens with a borane moiety (BFE), sulfur (thio), methyl, ethyl, and/or methoxy. As a non-limiting example, two non-bridging oxygens at the same position (e.g., the alpha (a), beta (b) or gamma (g) position) can be replaced with a sulfur (thio) and a methoxy.

[0237] The replacement of one or more of the oxygen atoms at the a position of the phosphate moiety (e.g., a-thio phosphate) is provided to confer stability (such as against exonucleases and endonucleases) to RNA and DNA through the unnatural phosphorothioate backbone linkages. Phosphorothioate DNA and RNA have increased nuclease resistance and subsequently a longer half-life in a cellular environment.

[0238] Other intemucleoside linkages that may be employed according to the present disclosure, including intemucleoside linkages which do not contain a phosphorous atom, are described herein.

### Stemp Loops

[0239] Polynucleotides (e.g., mRNAs) may include a stem loop such as, but not limited to, a histone stem loop. The stem loop may be a nucleotide sequence that is about 25 or about 26 nucleotides in length such as, but not limited to, those as described in International Patent Publication No. WO2013/103659, which is incorporated herein by reference. The histone stem loop may be located 3′-relative to the coding region (e.g., at the 3′-terminus of the coding region). As a non-limiting example, the stem loop may be located at the 3′-end of a polynucleotide described herein. In some cases, a polynucleotide (e.g., an mRNA) includes more than one stem loop (e.g., two stem loops). Examples of stem loop sequences are described in International Patent Publication Nos. WO2012/019780 and WO2015/02667, the stem loop sequences of which are herein incorporated by reference. In some instances, a polynucleotide comprises the stem loop sequence CAAAGGCTCTTTTCAGAGCCACCA (SEQ ID NO: 16955). In others, a polynucleotide includes the stem loop sequence

(SEQ ID NO: 16956)
CAAAGGCUCUUUUCAGAGCCACCA.

[0240] A stem loop may be located in a second terminal region o a polynucleotide. As a non-limiting example, the stem loop may be located within an untranslated region (e.g., 3′-UTR) in a second terminal region.

[0241] In some cases, a polynucleotide such as, but not limited to mRNA, which includes the histone stem loop may be stabilized by the addition of a 3′-stabilizing region (e.g., a 3′-stabilizing region including at least one chain terminating nucleoside). Not wishing to be bound by theory, the addition of at least one chain terminating nucleoside may slow the degradation of a polynucleotide and thus can increase the half-life of the polynucleotide.

[0242] In other cases, a polynucleotide such as, but not limited to mRNA, which includes the histone stem loop may be stabilized by an alteration to the 3′-region of the polynucleotide that can prevent and/or inhibit the addition of oligio (U) (see e.g., International Patent Publication No. WO2013/103659).

[0243] In yet other cases, a polynucleotide such as, but not limited to mRNA, which includes the histone stem loop may be stabilized by the addition of an oligonucleotide that terminates in a 3′-deoxynucleoside, 2′,3′-dideoxynucleoside 3′-O-methylnucleosides, 3′-O-ethylnucleosides, 3′-arabinosides, and other alternative nucleosides known in the art and/or described herein.

[0244] In some instances, the polynucleotides of the present disclosure may include a histone stem loop, a polyA region, and/or a 5′-cap structure. The histone stem loop may be before and/or after the polyA region. The polynucleotides including the histone stem loop and a polyA region sequence may include a chain terminating nucleoside described herein.

[0245] In other instances, the polynucleotides of the present disclosure may include a histone stem loop and a 5′-cap structure. The 5′-cap structure may include, but is not limited to, those described herein and/or known in the art.

[0246] In certain instances, the conserved stem loop region may comprise a miR sequence described herein and may also comprise a TEE sequence.

[0247] In some cases, the incorporation of a miR sequence and/or a TEE sequence changes the shape of the stem loop region which may increase and/or decrease translation. (See, e.g., Kedde et al. (2010) Nature Cell Biology, herein incorporated by reference in its entirety).

[0248] Polynucleotides may comprise at least one histone stem-loop and a polyA region or polyadenylation signal. Non-limiting examples of polynucleotide sequences encoding for at least one histone stem loop and a polyA region or a polyadenylation signal are described in International Patent Publication No. WO2013/120497, WO2013/120629, WO2013/120500, WO2013/120627, WO2013/120498, WO2013/120626, WO2013/120499 and WO2013/120628, the sequences of each of which are incorporated herein by reference.

### PolyA Tail

[0249] Incorporating the polyA tail in the DNA plasmid also overcomes the tail length variability that arises from enzymatic polyadenylation using polyA polymerase. PolyA tails of >100 bp are optimal for therapeutic mRNAs; however, the DNA sequences that encode these long polyA stretches can destabilize the DNA plasmids used for transcription. A solution to overcome this stability issue is to include a short UGC linker in the polyA tail (US 2017/0166905, which is incorporated herein by reference). The Pfizer-BioNTech vaccine BNT162b2 against SARS-CoV-2 uses this strategy and contains a 10 bp UGC linker to produce the sequence A30(10 bp UGC linker)A70. Together, these innovations have overcome significant manufacturing bottlenecks and facilitated the development of a simple, cost-effective and scalable one-step mRNA synthesis process.

[0250] A polynucleotide or nucleic acid (e.g., an mRNA) may include a polyA sequence and/or polyadenylation signal. A polyA sequence may be comprised entirely or mostly of adenine nucleotides or analogs or derivatives thereof. A polyA sequence may be a tail located adjacent to a 3′ untranslated region of a nucleic acid.

[0251] During RNA processing, a long chain of adenosine nucleotides (polyA region) is normally added to messenger RNA (mRNA) molecules to increase the stability of the molecule. Immediately after transcription, the 3′-end of the transcript is cleaved to free a 3′-hydroxy. Then polyA polymerase adds a chain of adenosine nucleotides to the RNA. The process, called polyadenylation, adds a polyA region that is between 100 and 250 residues long (SEQ ID NO: 16957).

[0252] Unique polyA region lengths may provide certain advantages to the alternative polynucleotides of the present disclosure.

[0253] Generally, the length of a polyA region of the present disclosure is at least 30 nucleotides in length. In another embodiment, the polyA region is at least 35 nucleotides in length. In another embodiment, the length is at least 40 nucleotides. In another embodiment, the length is at least 45 nucleotides. In another embodiment, the length is at least 55 nucleotides. In another embodiment, the length is at least 60 nucleotides. In another embodiment, the length is at least 70 nucleotides. In another embodiment, the length is at least 80 nucleotides. In another embodiment, the length is at least 90 nucleotides. In another embodiment, the length is at least 100 nucleotides. In another embodiment, the length is at least 120 nucleotides. In another embodiment, the length is at least 140 nucleotides. In another embodiment, the length is at least 160 nucleotides. In another embodiment, the length is at least 180 nucleotides. In another embodiment, the length is at least 200 nucleotides. In another embodiment, the length is at least 250 nucleotides. In another embodiment, the length is at least 300 nucleotides. In another embodiment, the length is at least 350 nucleotides. In another embodiment, the length is at least 400 nucleotides. In another embodiment, the length is at least 450 nucleotides. In another embodiment, the length is at least 500 nucleotides. In another embodiment, the length is at least 600 nucleotides. In another embodiment, the length is at least 700 nucleotides. In another embodiment, the length is at least 800 nucleotides. In another embodiment, the length is at least 900 nucleotides. In another embodiment, the length is at least 1000 nucleotides. In another embodiment, the length is at least 1100 nucleotides. In another embodiment, the length is at least 1200 nucleotides. In another embodiment, the length is at least 1300 nucleotides. In another embodiment, the length is at least 1400 nucleotides. In another embodiment, the length is at least 1500 nucleotides. In another embodiment, the length is at least 1600 nucleotides. In another embodiment, the length is at least 1700 nucleotides. In another embodiment, the length is at least 1800 nucleotides. In another embodiment, the length is at least 1900 nucleotides. In another embodiment, the length is at least 2000 nucleotides. In another embodiment, the length is at least 2500 nucleotides. In another embodiment, the length is at least 3000 nucleotides.

[0254] In some instances, the polyA region may be 80 nucleotides (SEQ ID NO: 16993), 120 nucleotides (SEQ ID NO: 16988), 160 nucleotides (SEQ ID NO: 16994) in length on an alternative polynucleotide molecule described herein.

[0255] In other instances, the polyA region may be 20 (SEQ ID NO: 16995), 40 (SEQ ID NO: 16996), 80 (SEQ ID NO: 16993), 100 (SEQ ID NO: 16997), 120 (SEQ ID NO: 16988), 140 (SEQ ID NO: 16998) or 160 nucleotides (SEQ ID NO: 16994) in length on an alternative polynucleotide molecule described herein.

[0256] In some cases, the polyA region is designed relative to the length of the overall alternative polynucleotide. This design may be based on the length of the coding region of the alternative polynucleotide, the length of a particular feature or region of the alternative polynucleotide (such as mRNA), or based on the length of the ultimate product expressed from the alternative polynucleotide. When relative to any feature of the alternative polynucleotide (e.g., other than the mRNA portion which includes the poly-A region) the polyA region may be 10, 20, 30, 40, 50, 60, 70, 80, 90 or 100% greater in length than the additional feature. The polyA region may also be designed as a fraction of the alternative polynucleotide to which it belongs. In this context, the polyA region may be 10, 20, 30, 40, 50, 60, 70, 80, or 90% or more of the total length of the construct or the total length of the construct minus the polyA region.

[0257] In certain cases, engineered binding sites and/or the conjugation of polynucleotides (e.g., mRNA) for polyA binding protein may be used to enhance expression. The engineered binding sites may be sensor sequences which can operate as binding sites for ligands of the local microenvironment of the polynucleotides (e.g., mRNA). As a non-limiting example, the polynucleotides (e.g., mRNA) may include at least one engineered binding site to alter the binding affinity of polyA binding protein (PABP) and analogs thereof. The incorporation of at least one engineered binding site may increase the binding affinity of the PABP and analogs thereof.

[0258] Additionally, multiple distinct polynucleotides (e.g., mRNA) may be linked together to the PABP (polyA binding protein) through the 3′-end using alternative nucleotides at the 3′-terminus of the polyA region. Transfection experiments can be conducted in relevant cell lines at and protein production can be assayed by ELISA at 12 hours, 24 hours, 48 hours, 72 hours, and day 7 post-transfection. As a non-limiting example, the transfection experiments may be used to evaluate the effect on PABP or analogs thereof binding affinity as a result of the addition of at least one engineered binding site.

[0259] In certain cases, a polyA region may be used to modulate translation initiation. While not wishing to be bound by theory, the polyA region recruits PABP which in turn can interact with translation initiation complex and thus may be essential for protein synthesis.

[0260] In some cases, a polyA region may also be used in the present disclosure to protect against 3′-5′-exonuclease digestion.

[0261] In some instances, a polynucleotide (e.g., mRNA) may include a polyA-G Quartet. The G-quartet is a cyclic hydrogen bonded array of four guanosine nucleotides that can be formed by G-rich sequences in both DNA and RNA. In such embodiments, the G-quartet is incorporated at the end of the polyA region. The resultant polynucleotides (e.g., mRNA) may be assayed for stability, protein production and other parameters including half-life at various time points. It has been discovered that the polyA-G quartet results in protein production equivalent to at least 75% of that seen using a polyA region of 120 nucleotides alone (SEQ ID NO: 16988).

[0262] In some cases, a polynucleotide (e.g., mRNA) may include a polyA region and may be stabilized by the addition of a 3′-stabilizing region. The polynucleotides (e.g., mRNA) with a poly-A region may further include a 5′-cap structure.

[0263] In other cases, a polynucleotide (e.g., mRNA) may include a poly-A-G Quartet. The polynucleotides (e.g., mRNA) with a poly-A-G Quartet may further include a 5′-cap structure.

[0264] In some cases, the 3′-stabilizing region which may be used to stabilize a polynucleotide (e.g., mRNA) including a polyA region or poly-A-G Quartet may be, but is not limited to, those described in International Patent Publication No. WO2013/103659, the polyA regions and poly-A-G Quartets of which are incorporated herein by reference. In other cases, the 3′-stabilizing region which may be used with the present disclosure include a chain termination nucleoside such as 3′-deoxyadenosine (cordycepin), 3′-deoxyuridine, 3′-deoxycytosine, 3′-deoxyguanosine, 3′-deoxythymine, 2′,3′-dideoxynucleosides, such as 2′, 3′-dideoxyadenosine, 2′,3′-dideoxyuridine, 2′, 3′-dideoxycytosine, 2′, 3′-dideoxyguanosine, 2′,3′-dideoxythymine, a 2′-deoxynucleoside, or an O-methylnucleoside.

[0265] In other cases, a polynucleotide such as, but not limited to mRNA, which includes a polyA region or a poly-A-G Quartet may be stabilized by an alteration to the 3′-region of the polynucleotide that can prevent and/or inhibit the addition of oligio (U) (see e.g., International Patent Publication No. WO2013/103659).

[0266] In yet other instances, a polynucleotide such as, but not limited to mRNA, which includes a polyA region or a poly-A-G Quartet may be stabilized by the addition of an oligonucleotide that terminates in a 3′-deoxynucleoside, 2′,3′-dideoxynucleoside 3-O-methylnucleosides, 3′-O-ethylnucleosides, 3′-arabinosides, and other alternative nucleosides known in the art and/or described herein.

### Chain Terminating Nucleosides

[0267] A nucleic acid may include a chain terminating nucleoside. In some embodiments, a chain terminating nucleoside may include those nucleosides deoxy genated at the 2′ and/or 3′ positions of their sugar group. Such species may include 3′-deoxyadenosine (cordycepin), 3′-deoxy uridine, 3′-deoxy cytosine, 3′-deoxyguanosine, 3′-deoxythymine, and 2′,3′-dideoxynucleosides, such as 2′,3′-dideoxyadenosine, 2′,3′-dideoxyuridine, 2′,3′-dideoxy cytosine, 2′,3′-dideoxyguanosine, and 2′,3′-dideoxythymine.

[0268] An exemplary utility of a chain terminating nucleoside is described in e.g., US20140342402, which is incorporated herein by reference. For example, a chain terminating nucleoside incorporated at the 3′ end of an mRNA comprising a histone loop stabilizes said mRNA. Specifically, the chain-terminating nucleoside blocks the addition of a 3′-terminal oligo(U) sequence to the mRNA containing the histone stem-loop. When the 3′-terminal oligo(U) sequence cannot be added, degradation of the mRNA is retarded. The mRNA then remains available to the translational machinery for a longer time, resulting in higher levels of protein synthesis.

### Nucleic Acid Vaccine Expression

[0269] In certain aspects, a nucleic acid vaccine of the present disclosure (e.g., a vaccine comprising DNA, RNA, or any variant thereof) may present at least one antigen (e.g., methanogen antigen, cell surface protein of a methanogen or a fragment thereof) as a free antigen, as a secreted antigen, or as a membrane-tethered antigen.

[0270] In some embodiments, a nucleic acid vaccine presents at least one antigen as a free antigen. In some such embodiments, the nucleic acid vaccine comprises a sequence encoding at least one antigen, but does not comprise a signal peptide sequence or a transmembrane domain sequence. In some embodiments, a polypeptide encoded by such a nucleic acid vaccine may reside in the cell cytoplasm.

[0271] In some embodiments, a nucleic acid vaccine presents at least one antigen as a secreted antigen. In some such embodiments, the nucleic acid vaccine comprises a sequence encoding at least one antigen and a signal peptide sequence, but does not comprise a transmembrane domain sequence. In some embodiments, a polypeptide encoded by such a nucleic acid vaccine is secreted from a cell.

[0272] In some embodiments, a nucleic acid vaccine presents at least one antigen as a membrane-tethered antigen. In some such embodiments, the nucleic acid vaccine comprises a sequence encoding at least one antigen, a signal peptide sequence, and a transmembrane domain sequence. In some embodiments, a polypeptide encoded by such a nucleic acid vaccine is tethered to a cell membrane. In preferred embodiments, a polypeptide encoded by such a nucleic acid vaccine is tethered to a cell cytoplasmic membrane.

[0273] In certain aspects, any signal peptide sequence can be used in a nucleic acid vaccine of the present disclosure.

[0274] In some embodiments, a signal peptide sequence is of Bos taurus (cow). Signal peptide sequences are known in the art. For example, signal peptide sequences of various mammals (e.g., ruminants) are available at World Wide Web at signalpeptide.de and uniprot.org. Representative sequences are shown in Table 5A.

[0275] In some embodiments, a signal peptide sequence is from any one of the mRNA vaccines that are known in the art. For example, in some embodiments, a signal peptide sequence is from a COVID-19 mRNA vaccine. In some embodiments, a signal peptide sequence is from the BNT162b2 vaccine (BioNTech/Pfizer). In some embodiments, a signal peptide sequence is from the mRNA-1273 vaccine (Moderna).

[0276] In some embodiments, a signal peptide sequence of the BNT162b2 SARS CoV2 spike-encoding mRNA vaccine (BioNTech/Pfizer) is used for the nucleic acid vaccine of the present disclosure. An exemplary sequence is shown in Table 5C. Said sequence is also described at World Wide Web at github.com/NAalytics/Assemblies-of-putative-SARS-CoV2-spike-encoding-mRNA-sequences-for-vaccines-BNT-162b2-and-mRNA-1273/.

[0277] In certain aspects, any transmembrane domain sequence can be used in a nucleic acid vaccine of the present disclosure.

[0278] In some embodiments, a transmembrane domain sequence is from any one of the mRNA vaccines that are known in the art. For example, in some embodiments, a transmembrane domain sequence is from a COVID-19 mRNA vaccine. In some embodiments, a transmembrane domain sequence is from the BNT162b2 vaccine (BioNTech/Pfizer). In some embodiments, a transmembrane domain sequence is from the mRNA-1273 vaccine (Moderna).

[0279] In some embodiments, a transmembrane domain sequence is of Bos taurus (cow). Comprehensive signal peptide sequences are known in the art. For example, transmembrane domain sequences of various mammals (e.g., ruminants) are available at World Wide Web at membranome.org and also described in Lomize et al., (2017) Nucleic Acids Research 45:250-255, which is incorporated herein by reference. Representative sequences are shown in Table 5B.

[0280] In some embodiments, a transmembrane domain sequence of the BNT162b2 SARS CoV2 spike-encoding mRNA vaccine (BioNTech/Pfizer) is used for the nucleic acid vaccine of the present disclosure. An exemplary sequence is shown in Table 5C. In some embodiments, a cytoplasmic domain sequence of the BNT162b2 SARS CoV2 spike-encoding mRNA vaccine (BioNTech/Pfizer) is used for the nucleic acid vaccine of the present disclosure. In some embodiments, both the transmembrane domain and cytoplasmic domain sequences of the BNT162b2 SARS CoV2 spike-encoding mRNA vaccine (BioNTech/Pfizer) are used for the nucleic acid vaccine of the present disclosure. An exemplary sequence is shown in Table 5C. Such transmembrane domain and cytoplasmic domain sequences are available at World Wide Web at github.com/NAalytics/Assemblies-of-putative-SARS-CoV2-spike-encoding-mRNA-sequences-for-vaccines-BNT-162b2-and-mRNA-1273/.

TABLE 5A
Representative signal peptide sequences of Bos Taurus (cow)

See SEQ ID NO: 12182 to SEQ ID NO: 12361 for the representative signal peptide
sequences of Bos Taurus (cow).

TABLE 5B
Representative transmembrane (TM) sequences of Bos Taurus (cow) genome

See SEQ ID NO: 12362 to SEQ ID NO: 16672 for the representative transmembrane
sequences of Bos Taurus (cow).

TABLE 5C
Exemplary signal peptide sequence, transmembrane (TM) domain sequence,
and cytoplasmic domain sequence of the BNT162b2 SARS CoV2 spike-encoding
mRNA vaccine

| | Amino acid | Native nucleic | Bovine codon-optimized |
|---|---|---|---|
| Domain | sequence | acid sequence | nucleic acid |
| Signal | MFVFLVLLPLVS | ATGTTCGTGTTCCTGGTG | ATGTTCGTGTTCCTC |
| peptide | S | CTGCTGCCTCTGGTGTCC | GTGCTCCTGCCCCTC |
| | (SEQ ID NO: | AGCCAGTGTGTG | GTCTCCAGCCAGTGC |
| | 16958) | (SEQ ID NO: 16961) | GTG |
| | | | (SEQ ID NO: 16964) |
| TM domain | PWYIWLGFIAGL | CCCTGGTACATCTGGCTG | CCCTGGTACATCTGG |
| | IAIVMVTIMLCC | GGCTTTATCGCCGGACTG | CTGGGCTTCATCGCA |
| | M | ATTGCCATCGTGATGGTC | GGACTGATCGCCATC |
| | (SEQ ID NO: | ACAATCATGCTGTGTTGC | GTCATGGTCACCATA |
| | 16959) | ATG (SEQ ID NO: 16962) | ATGCTCTGTTGCATG |
| | | | (SEQ ID NO: 16991) |
| Cytoplasmic | MTSCCSCLKGCC | ATGACCAGCTGCTGTAG | ACCTCCTGCTGTAGC |
| domain | SCGSCCKFDEDD | CTGCCTGAAGGGCTGTTG | TGCCTGAAAGGCTGT |
| | SEPVLKGVKLHY | TAGCTGTGGCAGCTGCTG | TGCAGCTGCGGGAG |
| | T | CAAGTTCGACGAGGACG | CTGCTGCAAATTCGA |
| | (SEQ ID NO: | ATTCTGAGCCCGTGCTGA | CGAAGACGATAGCG |
| | 16960) | AGGGCGTGAAACTGCAC | AACCTGTGCTCAAAG |
| | | TACACA | GGGTGAAGTTGCATT |
| | | (SEQ ID NO: 16963) | ACACA |
| | | | (SEQ ID NO: 16992) |

### Pharmaceutical Composition

[0281] Vaccines, antibodies, milk, animal feed, agents (e.g., an agent that reduces methane production in a ruminant, a probiotic bacterial strain, etc.), or other compositions of the present disclosure may be in a pharmaceutical composition, and thus further comprise at least one excipient and/or carrier described herein or those known in the art.

[0282] The vaccine of the present disclosure (e.g., protein vaccine, nucleic acid vaccine (e.g., DNA vaccine, RNA vaccine, etc.) may comprise at least one excipient that (1) increases stability; (2) increases cell transfection; (3) permits the sustained or delayed release (e.g., from a depot formulation); (4) alters the biodistribution (e.g., target to specific tissues or cell types); (5) increases the translation of encoded protein in vivo; and/or (6) alter the release profile of encoded protein (antigen) in vivo. In addition to traditional excipients such as any and all solvents, dispersion media, diluents, or other liquid vehicles, dispersion or suspension aids, surface active agents, isotonic agents, thickening or emulsifying agents, preservatives, excipients of the present disclosure include, without limitation, lipidoids, liposomes, lipid nanoparticles, polymers, lipoplexes, core-shell nanoparticles, peptides, proteins, hyaluronidase, nanoparticle mimics, and combinations thereof.

[0283] Formulations of the pharmaceutical compositions described herein may be prepared by any method known or hereafter developed in the art of pharmacology. In general, such preparatory methods include the step of associating the active ingredient with an excipient and/or one or more other accessory ingredients.

[0284] A pharmaceutical composition in accordance with the present disclosure may be prepared, packaged, and/or sold in bulk, as a single unit dose, and/or as a plurality of single unit doses. As used herein, a “unit dose” refers to a discrete amount of the pharmaceutical composition comprising a predetermined amount of the active ingredient (e.g., the vaccine). The amount of the active ingredient may be generally equal to the dosage of the active ingredient which would be administered to a ruminant and/or a convenient fraction of such a dosage such as, for example, one-half or one-third of such a dosage.

[0285] Relative amounts of the active ingredient, the pharmaceutically acceptable excipient, and/or any additional ingredients in a pharmaceutical composition in accordance with the present disclosure may vary, depending upon the identity, size, and/or condition of the ruminant being treated and further depending upon the route by which the composition is to be administered. For example, the composition may comprise between 0.01% and 99% (w/w) of the active ingredient. By way of example, the composition may comprise between 0.01% and 100%, e.g., between 0.05 and 50%, between 0.1-30%, between 5-80%, at least 80% (w/w) active ingredient.

[0286] In some embodiments, the active ingredient is a nucleic acid. Accordingly, in some embodiments, the composition may comprise between 0.01% and 99% (w/w) of the nucleic acid (DNA or RNA). By way of example, the composition may comprise between 0.01% and 100%, e.g., between 0.05 and 50%, between 0.1-30%, between 5-80%, at least 80% (w/w) nucleic acid (DNA or RNA).

[0287] In some embodiments, the formulations described herein may comprise at least one nucleic acid, e.g., an antigen-encoding polynucleotide. As a non-limiting example, the formulations may comprise at least 1, 2, 3, 4, or 5 nucleic acids. In some embodiments, the formulation comprises at least 1, 2, 3, 4, or 5 nucleic acids encoding at least one cell surface protein or a fragment thereof of at least one methanogen.

[0288] In some embodiments, the formulations described herein may comprise more than one type of polynucleotide, e.g., antigen-encoding polynucleotide. In some embodiments, the formulation may comprise a polynucleotide in linear and circular form. For example, in some embodiments, the formulation may comprise a circular polynucleotide and an IVT polynucleotide.

[0289] Pharmaceutical compositions may additionally comprise a pharmaceutically acceptable excipient, which, as used herein, includes, but is not limited to, any and all solvents, dispersion media, diluents, or other liquid vehicles, dispersion or suspension aids, surface active agents, isotonic agents, thickening or emulsifying agents, preservatives, and the like, as suited to the particular dosage form desired. Various excipients for formulating pharmaceutical compositions and techniques for preparing the composition are known in the art (see Remington: The Science and Practice of Pharmacy, 21^{st} Edition, A. R. Gennaro, Lippincott, Williams & Wilkins, Baltimore, M D, 2006; incorporated herein by reference in its entirety). The use of a conventional excipient medium may be contemplated within the scope of the present disclosure, except insofar as any conventional excipient medium may be incompatible with a substance or its derivatives, such as by producing any undesirable biological effect or otherwise interacting in a deleterious manner with any other component(s) of the pharmaceutical composition.

[0290] In some embodiments, the particle size of the lipid nanoparticle may be increased and/or decreased. The change in particle size may be able to help counter biological reaction such as, but not limited to, inflammation or may increase the biological effect of the modified mRNA delivered to mammals.

[0291] Pharmaceutically acceptable excipients used in the manufacture of pharmaceutical compositions include, but are not limited to, inert diluents, surface active agents and/or emulsifiers, preservatives, buffering agents, lubricating agents, and/or oils. Such excipients may optionally be included in the pharmaceutical formulations of the invention.

### Delivery System—Overview

[0292] How much protein will be produced from the mRNA template will initially be determined by the amount of intact mRNA that reaches the cytosolic compartment.

[0293] In certain embodiments, lipid nanoparticle (“LNP”) delivery technology is used. Upon administration, proteins and other biological components present in the extracellular space can bind at the surface of the nucleic acid LNPs. The polyethylene glycol (PEG)-lipid stabilizing the nucleic acid LNP system against aggregation during manufacturing and storage contains short acyl chains. This design facilitates that the PEG-lipid (also referred to as PEGylated lipid) rapidly dissociates from the LNP following injection, as an essential first step to allow cellular interactions (Harvie et al. (2000) J Pharm Sci, 89:652-663; Chen et al. (2016) J Control Release, 235:236-244). Upon intravenous administration, it was found that the surface of neutrally-charged LNPs is strongly enriched with apolipoprotein E (ApoE), which leads to enhanced uptake by hepatocytes through low density lipoprotein (LDL) receptor-mediated endocytosis (Akinc et al. (2010) Mol Therapy, 18(7): 1357-1364). ApoE binding also plays a critical role in the uptake of the nucleic acid LNP vaccines after intramuscular injection. Vaccine targeted cell types, such as dendritic cells (DCs) and monocytes, highly express LDL receptors and other scavenger receptors (Liang et al. (2017) Mol Therapy, 25(12):2635-2647). Moreover, the transfection of human DCs with nucleic acid LNPs in an in vitro setting was also reported to be promoted in the presence of ApoE. Upon internalization, nucleic acid LNPs are routed through the endo-lysosomal compartment, where most of the nucleic acid LNPs remain entrapped in endosomes and degrade over time. While the intracellular trafficking and underlying mechanisms on how LNPs enable the escape of nucleic acid from the endosomes to reach the cytoplasm are still not fully understood, it may be facilited by the changes in the LNPs. Specifically, the ionizable lipid components of the LNPs (pKa <7) become protonated due to the acidic pHs in the endosomes, and leads to lipid exchange with anionic phospholipids of the endosomal membrane. This lipid mixing also induces a non-bilayer structure conversion in the LNPs (i.e. lamellar-to-inverted hexagonal phase), which facilitates the release of nucleic acid (e.g., mRNA) from the LNPs (Sayers et al. (2019) Mol Therapy, 27(11): 1950-1962). These effects of membrane fusion and structural changes in the LNPs are suggested to drive the destabilization of the endosomal membrane and eventually the endosomal escape of the nucleic acid (e.g., mRNA). It was recently demonstrated that ApoE binding also affects the internal structure of LNPs, which might contribute to the endosomal escape and successful cytosolic delivery of mRNA (Sebastiani et al. (2021) ACS Nano, 15(4):6709-6722). Thus, depending on the fusogenic properties of the LNPs a fraction of the mRNA can be released into the cytosol, where the mRNA molecules need to be recruited in ribosomes in order to be translated into proteins.

[0294] The vaccines of the present disclosure contemplates the use of the classical LNPs as well as the “next-generation” LNP delivery systems, which exemplary COVID-19 mRNA vaccines of BioNTech and Moderna employ. Such LNP delivery systems are composed of biodegradable ionizable lipids that introduces ester-linkages in the lipid tails. As an example, the usage of the SM-102 lipid in Moderna's mRNA-1273 vaccine was found to outperform Onpattro's MC3 LNPs for the intramuscular (i.m.) delivery of mRNA in rodents and non-human primates, given its improved tolerability and higher endosomal escape efficiency (Sabnis et al. (2018) Mol Therapy, 26(6):1509-1519; Hassett et al. (2019) Mol Therapy Nucl Acids, 15:1-11).

[0295] A strong chemical similarity can be found between the ionizable lipid ALC-0315 (Acuitas' proprietary lipid; see e.g., U.S. Pat. No. 10,166,298 and WO 2017/075531) and SM-102 (Moderna) used in the LNP formulations of BNT162b2 and mRNA-1273, respectively. The LNPs may also contain similar helper lipids; 1,2-distearoyl-snglycero-3-phosphocholine (DSPC), cholesterol and a diffusible PEG-lipid (2-[(polyethylene glycol)-2000]-N,N-ditetradecylacetamide, PEG2000-DMA in BNT162b2 or 1,2-dimyristoyl-rac-glycero3-methoxypolyethylene glycol-2000, PEG2000-DMG in mRNA-1273). All three mRNA LNPs contain a lipid formulation of ionizable lipid: DSPC: cholesterol: PEG-lipid at molar ratios of 50:10:38.5:1.5 mol %, and an mRNA-to-lipid ratio of 0.05 (wt/wt).

[0296] In preferred embodiments, the vaccines of the present disclosure have similar or identical LNP formulations as those of the vaccines that have been validated in a mammal (e.g., human) (e.g., Moderna's SPIKEVAX, each 0.5 mL dose of which contains a total lipid content of 1.93 mg (SM-102, polyethylene glycol [PEG] 2000 dimyristoyl glycerol [DMG], cholesterol, and 1,2-distearoyl-sn-glycero-3-phosphocholine [DSPC]), 0.31 mg tromethamine, 1.18 mg tromethamine hydrochloride, 0.043 mg acetic acid, 0.20 mg sodium acetate trihydrate, and 43.5 mg sucrose) (e.g., Pfizer/BioNTech's COMIRNATY purple caps, each 0.3 mL dose of which contains lipids (0.43 mg ((4-hydroxybutyl)azanediyl)bis(hexane-6,1-diyl)bis(2-hexyldecanoate), 0.05 mg 2-(polyethylene glycol 2000)-N,N-ditetradecylacetamide, 0.09 mg 1,2-distearoyl-sn-glycero-3-phosphocholine, and 0.2 mg cholesterol), 0.01 mg potassium chloride, 0.01 mg monobasic potassium phosphate, 0.36 mg sodium chloride, 0.07 mg dibasic sodium phosphate dihydrate, and 6 mg sucrose. The diluent (sterile 0.9% Sodium Chloride Injection, USP) contributes an additional 2.16 mg sodium chloride per dose) (e.g., Pfizer/BioNTech's COMIRNATY gray caps, each 0.3 mL dose of which contains lipids (0.43 mg ((4-hydroxybutyl)azanediyl)bis(hexane-6,1-diyl)bis(2-hexyldecanoate), 0.05 mg 2-(polyethylene glycol 2000)-N,N-ditetradecylacetamide, 0.09 mg 1,2-distearoyl-sn-glycero-3-phosphocholine, and 0.19 mg cholesterol), 0.06 mg tromethamine, 0.4 mg tromethamine hydrochloride, and 31 mg sucrose).

### Lipidoids

[0297] The synthesis of lipidoids (e.g., any material having characteristics of a lipid) has been extensively described and formulations comprising these compounds are particularly suited for delivery of nucleic acids (see Mahon et al., Bioconjug Chem. 2010 21: 1448-1454; Schroeder et al., J Intern Med. 2010 267:9-21; Akinc et al., Nat Biotechnol. 2008 26:561-569; Love et al., Proc Natl Acad Sci USA. 2010 107: 1864-1869; Siegwart et al., Proc Natl Acad Sci USA. 2011 108: 12996-3001; all of which are incorporated herein in their entireties). Accordingly, lipoids are suitable means to deliver the nucleic acid vaccine of the present disclosure (e.g., especially those comprising DNA or RNA).

[0298] While these lipidoids have been used to effectively deliver double-stranded small interfering RNA molecules in rodents and non-human primates (see Akinc et al., Nat Biotechnol. 2008 26:561-569; Frank-Kamenetsky et al., Proc Natl Acad Sci USA. 2008 105: 11915-11920; Akinc et al., Mol Ther. 2009 17:872-879; Love et al., Proc Natl Acad Sci USA. 2010 107: 1864-1869; Leuschner et al., Nat Biotechnol. 2011 29: 1005-1010; all of which are incorporated herein in their entirety), the present disclosure encompasses their formulation and use in delivering nucleic acid vaccines or polynucleotides contained therein.

[0299] Complexes, micelles, liposomes or particles can be prepared comprising these lipidoids and therefore, can result in an effective delivery of the nucleic acid, as judged by the production of an encoded protein, following the administration of a lipidoid formulation to a ruminant.

[0300] In vivo delivery of nucleic acids may be affected by many parameters, including, but not limited to, the formulation composition, nature of particle PEGylation, degree of loading, polynucleotide to lipid ratio, and biophysical parameters such as, but not limited to, particle size (Akinc et al., Mol Ther. 2009 17:872-879; herein incorporated by reference in its entirety). As an example, small changes in the anchor chain length of poly(ethylene glycol) (PEG) lipids may result in significant effects on in vivo efficacy. Formulations with the different lipidoids, including, but not limited to penta[3-(1-laurylaminopropionyl)]-triethylenetetramine hydrochloride (TETA-5LAP; aka 98N12-5, see Murugaiah et al., Analytical Biochemistry, 401:61 (2010); herein incorporated by reference in its entirety), C12-200 (including derivatives and variants), and MD1, can be tested for in vivo activity.

[0301] The lipidoid referred to herein as “98N12-5” is disclosed by Akinc et al., Mol Ther. 2009 17:872-879 and is incorporated by reference in its entirety. The lipidoid referred to herein as “C12-200” is disclosed by Love et al., Proc Natl Acad Sci USA. 2010 107: 1864-1869 and Liu and Huang, Molecular Therapy. 2010 669-670; both of which are herein incorporated by reference in their entirety. The lipidoid formulations can comprise particles comprising either 3 or 4 or more components in addition to the nucleic acid. As an example, formulations with certain lipidoids, include, but are not limited to, 98N12-5 and may comprise 42% lipidoid, 48% cholesterol and 10% PEG (C14 alkyl chain length). As another example, formulations with certain lipidoids, include, but are not limited to, C12-200 and may comprise 50% lipidoid, 10% disteroylphosphatidyl choline, 38.5% cholesterol, and 1.5% PEG-DMG.

[0302] In some embodiments, a polynucleotide formulated with a lipidoid for systemic intravenous administration can target the liver. For example, a final optimized intravenous formulation using polynucleotides, and comprising a lipid molar composition of 42% 98N12-5, 48% cholesterol, and 10% PEG-lipid with a final weight ratio of about 7.5 to 1 total lipid to polynucleotides, and a C14 alkyl chain length on the PEG lipid, with a mean particle size of roughly 50-60 nm, can result in the distribution of the formulation to be greater than 90% to the liver.(see Akinc et al., Mol Ther. 2009 17:872-879; herein incorporated by reference in its entirety). In another example, an intravenous formulation using a C12-200 (see U.S. provisional application 61/175,770 and published international application WO2010129709, each of which is herein incorporated by reference in their entirety) lipidoid may have a molar ratio of 50/10/38.5/1.5 of C12-200/disteroylphosphatidyl choline/cholesterol/PEG-DMG, with a weight ratio of 7 to 1 total lipid to polynucleotides, and a mean particle size of 80 nm may be effective to deliver polynucleotides to hepatocytes (see, Love et al., Proc Natl Acad Sci USA. 2010 107: 1864-1869 herein incorporated by reference in its entirety).

[0303] The characteristics of optimized lipidoid formulations for intramuscular or subcutaneous routes may vary significantly depending on the target cell type and the ability of formulations to diffuse through the extracellular matrix into the blood stream. While a particle size of less than 150 nm may be desired for effective hepatocyte delivery due to the size of the endothelial fenestrae (see, Akinc et al., Mol Ther. 2009 17:872-879 herein incorporated by reference in its entirety), use of a lipidoid-formulated nucleic acid vaccines to deliver the formulation to other cells types including, but not limited to, endothelial cells, myeloid cells, and muscle cells may not be similarly size-limited.

[0304] Use of lipidoid formulations to deliver siRNA in vivo to other non-hepatocyte cells such as myeloid cells and endothelium has been reported (see Akinc et al., Nat Biotechnol. 2008 26:561-569; Leuschner et al., Nat Biotechnol. 2011 29: 1005-1010; Cho et al. Adv. Funct. Mater. 2009 19:3112-3118; 8^{th} International Judah Folkman Conference, Cambridge, MA Oct. 8-9, 2010; each of which is herein incorporated by reference in its entirety). Effective delivery to myeloid cells, such as monocytes, lipidoid formulations may have a similar component molar ratio. Different ratios of lipidoids and other components including, but not limited to, disteroylphosphatidyl choline, cholesterol, and PEG-DMG, may be used to optimize the formulation of the nucleic acid vaccines for delivery to different cell types including, but not limited to, hepatocytes, myeloid cells, muscle cells, etc. For example, the component molar ratio may include, but is not limited to, 50% C12-200, 10% disteroylphosphatidyl choline, 38.5% cholesterol, and % 1.5 PEG-DMG (see Leuschner et al., Nat Biotechnol 2011 29: 1005-1010; herein incorporated by reference in its entirety). In certain cases, the use of lipidoid formulations for the localized delivery of nucleic acids to cells (such as, but not limited to, adipose cells and muscle cells) via either subcutaneous or intramuscular delivery, may not require all of the formulation components desired for systemic delivery, and as such may comprise only the lipidoid and the nucleic acid vaccine.

[0305] Combinations of different lipidoids may be used to improve the efficacy of the polynucleotide-directed protein production as the lipidoids may be able to increase cell transfection by the nucleic acid vaccine; and/or increase the translation of encoded protein (see Whitehead et al., Mol. Ther. 2011, 19: 1688-1694, herein incorporated by reference in its entirety).

[0306] In some embodiments, the vaccines of the present disclosure are formulated in lipid or saline. In preferred embodiments, the nucleic acid vaccines are formulated in lipid.

### Liposomes, Lipoplexes, and Lipid Nanoparticles

[0307] The nucleic acid vaccines of the invention can be formulated using one or more liposomes, lipoplexes, or lipid nanoparticles.

### Liposomes

[0308] In some embodiments, pharmaceutical compositions of nucleic acid vaccines comprise liposomes. Liposomes are artificially-prepared vesicles which may primarily be composed of a lipid bilayer and may be used as a delivery vehicle for the administration of pharmaceutical formulations. Liposomes can be of different sizes such as, but not limited to, a multilamellar vesicle (MLV) which may be hundreds of nanometers in diameter and may contain a series of concentric bilayers separated by narrow aqueous compartments, a small unicellular vesicle (SUV) which may be smaller than 50 nm in diameter, and a large unilamellar vesicle (LUV) which may be between 50 and 500 nm in diameter. Liposome design may include, but is not limited to, opsonins or ligands in order to improve the attachment of liposomes to tissue or to activate events such as, but not limited to, endocytosis. Liposomes may contain a low or a high pH in order to improve the delivery of the pharmaceutical formulations.

[0309] The formation of liposomes may depend on the physicochemical characteristics such as, but not limited to, the pharmaceutical formulation entrapped and the liposomal ingredients, the nature of the medium in which the lipid vesicles are dispersed, the effective concentration of the entrapped substance and its potential toxicity, any additional processes involved during the application and/or delivery of the vesicles, the optimization size, polydispersity, and the shelf-life of the vesicles for the intended application, and the batch-to-batch reproducibility and possibility of large-scale production of safe and efficient liposomal products.

[0310] As a non-limiting example, liposomes such as synthetic membrane vesicles may be prepared by the methods, apparatus and devices described in US Patent Publication No. US20130177638, US20130177637, US20130177636, US20130177635, US20130177634, US20130177633, US20130183375, US20130183373 and US20130183372, the contents of each of which are herein incorporated by reference in its entirety.

[0311] In some embodiments, pharmaceutical compositions described herein may include, without limitation, liposomes such as those formed from 1,2-dioleyloxy-N,N-dimethylaminopropane (DODMA) liposomes, DiLa2 liposomes from Marina Biotech (Bothell, WA), 1,2-dilinoleyloxy-3-dimethylaminopropane (DLin-DMA), 2,2-dilinoleyl-4-(2-dimethylaminoethyl)-[1,3]-dioxolane (DLin-KC2-DMA), and MC3 (US20100324120; herein incorporated by reference in its entirety) and liposomes which may deliver small molecule drugs such as, but not limited to, DOXIL® from Janssen Biotech, Inc. (Horsham, PA). In some embodiments, pharmaceutical compositions described herein may include, without limitation, liposomes such as those formed from the synthesis of stabilized plasmid-lipid particles (SPLP) or stabilized nucleic acid lipid particle (SNALP) that have been previously described and shown to be suitable for oligonucleotide delivery in vitro and in vivo (see Wheeler et al. Gene Therapy. 1999 6:271-281; Zhang et al. Gene Therapy. 1999 6: 1438-1447; Jeffs et al. Pharm Res. 2005 22:362-372; Morrissey et al., Nat Biotechnol. 2005 2: 1002-1007; Zimmermann et al., Nature. 2006 441: 111-114; Heyes et al. J Contr Rel. 2005 107:276-287; Semple et al. Nature Biotech. 2010 28: 172-176; Judge et al. J Clin Invest. 2009 119:661-673; deFougerolles Hum Gene Ther. 2008 19: 125-132; U.S. Patent Publication No US20130122104; all of which are incorporated herein in their entireties). The original manufacture method by Wheeler et al. was a detergent dialysis method, which was later improved by Jeffs et al. and is referred to as the spontaneous vesicle formation method. The liposome formulations may be composed of 3 to 4 lipid components in addition to the polynucleotide. As an example a liposome can comprise, but is not limited to, 55% cholesterol, 20% disteroylphosphatidyl choline (DSPC), 10% PEG-S-DSG, and 15% 1,2-dioleyloxy-N,N-dimethylaminopropane (DODMA), as described by Jeffs et al. As another example, certain liposome formulations may comprise, but are not limited to, 48% cholesterol, 20% DSPC, 2% PEG-c-DMA, and 30% cationic lipid, where the cationic lipid can be 1,2-distearloxy-N,N-dimethylaminopropane (DSDMA), DODMA, DLin-DMA, or 1,2-dilinolenyloxy-3-dimethylaminopropane (DLenDMA), as described by Heyes et al.

[0312] In some embodiments, liposome formulations may comprise from about about 25.0% cholesterol to about 40.0% cholesterol, from about 30.0% cholesterol to about 45.0% cholesterol, from about 35.0% cholesterol to about 50.0% cholesterol and/or from about 48.5% cholesterol to about 60% cholesterol. In preferred embodiments, formulations may comprise a percentage of cholesterol selected from the group consisting of 28.5%, 31.5%, 33.5%, 36.5%, 37.0%, 38.5%, 39.0% and 43.5%. In some embodiments, formulations may comprise from about 5.0% to about 10.0% DSPC and/or from about 7.0% to about 15.0% DSPC.

[0313] In some embodiments, pharmaceutical compositions may include liposomes which may be formed to deliver polynucleotides which may encode at least one antigen or any other polypeptide of interest. The nucleic acid vaccine may be encapsulated by the liposome and/or it may be contained in an aqueous core which may then be encapsulated by the liposome (see International Pub. Nos. WO2012031046, WO2012031043, WO2012030901 and WO2012006378 and US Patent Publication No. US20130189351, US20130195969 and US20130202684; the contents of each of which are herein incorporated by reference in their entirety).

[0314] In other embodiments, liposomes may be formulated for targeted delivery. As a non-limiting example, the liposome may be formulated for targeted delivery to the liver. The liposome used for targeted delivery may include, but is not limited to, the liposomes described in and methods of making liposomes described in US Patent Publication No. US20130195967, the contents of which are herein incorporated by reference in its entirety.

[0315] In other embodiments, the polynucleotide which may encode an antigen may be formulated in a cationic oil-in-water emulsion where the emulsion particle comprises an oil core and a cationic lipid which can interact with the polynucleotide anchoring the molecule to the emulsion particle (see International Pub. No. WO2012006380; herein incorporated by reference in its entirety).

[0316] In some embodiments, the nucleic acid vaccines may be formulated in a water-in-oil emulsion comprising a continuous hydrophobic phase in which the hydrophilic phase is dispersed. As a non-limiting example, the emulsion may be made by the methods described in International Publication No. WO201087791, the contents of which are herein incorporated by reference in its entirety.

[0317] In other embodiments, the lipid formulation may include at least cationic lipid, a lipid which may enhance transfection and a least one lipid which contains a hydrophilic head group linked to a lipid moiety (International Pub. No. WO2011076807 and U.S. Pub. No. 20110200582; the contents of each of which is herein incorporated by reference in their entirety).

[0318] In other embodiments, the polynucleotides encoding an immunogen may be formulated in a lipid vesicle which may have crosslinks between functionalized lipid bilayers (see U.S. Pub. No. 20120177724, the contents of which is herein incorporated by reference in its entirety).

[0319] In some embodiments, the polynucleotides may be formulated in a lipsome as described in International Patent Publication No. WO2013086526, the contents of which is herein incorporated by reference in its entirety. The nucleic acid vaccines may be encapsulated in a liposome using reverse pH gradients and/or optimized internal buffer compositions as described in International Patent Publication No. WO2013086526, the contents of which is herein incorporated by reference in its entirety.

[0320] In some embodiments, the nucleic acid vaccine pharmaceutical compositions may be formulated in liposomes such as, but not limited to, DiLa2 liposomes (Marina Biotech, Bothell, WA), SMARTICLES® (Marina Biotech, Bothell, WA), neutral DOPC (1,2-dioleoyl-sn-glycero-3-phosphocholine) based liposomes (e.g., siRNA delivery for ovarian cancer (Landen et al. Cancer Biology & Therapy 2006 5(12)1708-1713); herein incorporated by reference in its entirety) and hyaluronan-coated liposomes (Quiet Therapeutics, Israel).

[0321] In some embodiments, the cationic lipid may be a low molecular weight cationic lipid such as those described in US Patent Application No. 20130090372, the contents of which are herein incorporated by reference in its entirety.

[0322] In some embodiments, the nucleic acid vaccines may be formulated in a lipid vesicle which may have crosslinks between functionalized lipid bilayers.

[0323] In some embodiments, the nucleic acid vaccines may be formulated in a liposome comprising a cationic lipid. The liposome may have a molar ratio of nitrogen atoms in the cationic lipid to the phophates in the RNA (N:P ratio) of between 1:1 and 20:1 as described in International Publication No. WO2013006825, herein incorporated by reference in its entirety. In another embodiment, the liposome may have a N:P ratio of greater than 20:1 or less than 1:1.

[0324] In some embodiments, the nucleic acid vaccines may be formulated in a lipid-polycation complex. The formation of the lipid-polycation complex may be accomplished by methods known in the art and/or as described in U.S. Pub. No. 20120178702, herein incorporated by reference in its entirety. As a non-limiting example, the polycation may include a cationic peptide or a polypeptide such as, but not limited to, polylysine, polyornithine and/or polyarginine and the cationic peptides described in International Pub. No. WO2012013326 or US Patent Pub. No. US20130142818; each of which is herein incorporated by reference in its entirety. In other embodiments, the nucleic acid vaccines may be formulated in a lipid-polycation complex which may further include a non-cationic lipid such as, but not limited to, cholesterol or dioleoyl phosphatidylethanolamine (DOPE).

[0325] In some embodiments, the nucleic acid vaccines may be formulated in an aminoalcohol lipidoid. Aminoalcohol lipidoids which may be used in the present invention may be prepared by the methods described in U.S. Pat. No. 8,450,298, herein incorporated by reference in its entirety.

[0326] The liposome formulation may be influenced by, but not limited to, the selection of the cationic lipid component, the degree of cationic lipid saturation, the nature of the PEGylation, ratio of all components and biophysical parameters such as size. In one example by Semple et al. (Semple et al. Nature Biotech. 2010 28: 172-176; herein incorporated by reference in its entirety), the liposome formulation was composed of 57.1% cationic lipid, 7.1% dipalmitoylphosphatidylcholine, 34.3% cholesterol, and 1.4% PEG-c-DMA. As another example, changing the composition of the cationic lipid could more effectively deliver nucleic acid to various antigen presenting cells (Basha et al. Mol Ther. 2011 19:2186-2200; herein incorporated by reference in its entirety). In some embodiments, liposome formulations may comprise from about 35 to about 45% cationic lipid, from about 40% to about 50% cationic lipid, from about 50% to about 60% cationic lipid and/or from about 55% to about 65% cationic lipid. In some embodiments, the ratio of lipid to mRNA in liposomes may be from about about 5: 1 to about 20: 1, from about 10: 1 to about 25: 1, from about 15: 1 to about 30: 1 and/or at least 30: 1.

### Lipid Nanoparticles

[0327] In certain aspects, the vaccines (e.g., nucleic acid vaccines) of the present disclosure may be formulated in a lipid nanoparticle (LNP) described herein or of those known in the art.

[0328] In some embodiments, the lipid nanoparticle comprises an ionizable lipid, a helper lipid, a PEGylated lipid, a structural lipid (e.g., sterol), or any combination thereof.

[0329] In some embodiments, the lipid nanoparticle comprises an ionizable lipid, a helper lipid, a PEGylated lipid, and a structural lipid (e.g., sterol).

[0330] In some embodiments, the ionizable lipid is an ionizable cationic lipid. In some embodiments, the helper lipid is a neutral lipid or a non-cationic lipid.

[0331] In some embodiments, the lipid nanoparticle formulations described herein may comprise an ionizable lipid (e.g., a cationic lipid), a PEGylated lipid (also referred to as PEG lipid), and a structural lipid; and optionally comprise a helper lipid (e.g., a non-cationic lipid, phospholipid). In some embodiments, the lipid nanoparticle may comprise a molar ratio of about 20-60% ionizable lipid: about 5-25% helper lipid: about 25-55% structural lipid; and about 0.5-15% PEGylated lipid. In some embodiments, the lipid nanoparticle may comprise a molar ratio of about 40-60% of ionizable lipid (e.g., cationic lipid), about 5-15% of a helper lipid, about 1-2% of a PEG lipid and about 30-50% of a structural lipid. In some embodiments, the lipid nanoparticle may comprise a molar ratio of about 50% ionizable lipid (e.g., cationic lipid), about 10% helper lipid, about 1.5% PEG lipid and about 38.5% structural lipid. In other embodiments, the lipid nanoparticle may comprise a molar ratio of about 55% ionizable lipid (e.g., cationic lipid), about 10% helper lipid, about 2.5% PEG lipid and about 32.5% structural lipid.

[0332] In some embodiments, the lipid nanoparticle formulations described herein may be 4 component lipid nanoparticles. The lipid nanoparticle may comprise a ionizable lipid (e.g., cationic lipid), a helper lipid, a PEG lipid, and a structural lipid. In some embodiments, the lipid nanoparticle may comprise a molar ratio of about 20-60% ionizable lipid: about 5-25% helper lipid: about 25-55% structural lipid; and about 0.5-15% PEGylated lipid. In some embodiments, the lipid nanoparticle may comprise a molar ratio of about 40-60% of ionizable lipid (e.g., cationic lipid), about 5-15% of a helper lipid, about 1-2% of a PEG lipid and about 30-50% of a structural lipid. In some embodiments, the lipid nanoparticle may comprise a molar ratio of about 50% ionizable lipid (e.g., cationic lipid), about 10% helper lipid, about 1.5% PEG lipid and about 38.5% structural lipid. In other embodiments, the lipid nanoparticle may comprise a molar ratio of about 55% ionizable lipid (e.g., cationic lipid), about 10% helper lipid, about 2.5% PEG lipid and about 32.5% structural lipid.

[0333] In some embodiments, the lipid nanoparticle formulations described herein may comprise an ionizable lipid (e.g., cationic lipid), a helper lipid, a PEG lipid, and a structural lipid. In some embodiments, the lipid nanoparticle may comprise a molar ratio of about 20-60% ionizable lipid: about 5-25% helper lipid: about 25-55% structural lipid; and about 0.5-15% PEGylated lipid. In some embodiments, the lipid nanoparticle may comprise a molar ratio of about 40-60% of ionizable lipid (e.g., cationic lipid), about 5-15% of a helper lipid, about 1-2% of a PEG lipid and about 30-50% of a structural lipid. In some embodiments, the lipid nanoparticle may comprise a molar ratio of about 50% ionizable lipid (e.g., cationic lipid), about 10% helper lipid, about 1.5% PEG lipid and about 38.5% structural lipid. In other embodiments, the lipid nanoparticle may comprise a molar ratio of about 55% ionizable lipid (e.g., cationic lipid), about 10% helper lipid, about 2.5% PEG lipid and about 32.5% structural lipid.

[0334] Exemplary lipid nanoparticle compositions and methods of making same are described, for example, in Semple et al. (2010) Nat. Biotechnol. 28: 172-176; Jayarama et al. (2012), Angew. Chem. Int. Ed., 51: 8529-8533; and Maier et al. (2013) Molecular Therapy 21, 1570-1578 (the contents of each of which are incorporated herein by reference in their entirety).

[0335] In certain aspects, the nucleic acid (e.g., DNA or RNA) to total lipid ratio is between 0.01 and 10 (wt/wt). In some embodiments, the nucleic acid (e.g., DNA or RNA) to total lipid ratio is at least about 0.005, 0.01, 0.015, 0.02, 0.025, 0.03, 0.035, 0.04, 0.045, 0.05, 0.055, 0.06, 0.065, 0.07, 0.075, 0.08, 0.085, 0.09, 0.095, 0.1, 0.1, 0.2, 0.3, 0.4, 0.5, 0.6, 0.7, 0.8, 0.9, 1, 1.1, 1.2, 1.3, 1.4, 1.5, 1.6, 1.7, 1.8, 1.9, 2, 2.1, 2.2, 2.3, 2.4, 2.5, 2.6, 2.7, 2.8, 2.9, 3, 3.1, 3.2, 3.3, 3.4, 3.5, 3.6, 3.7, 3.8, 3.9, 4, 4.1, 4.2, 4.3, 4.4, 4.5, 4.6, 4.7, 4.8, 4.9, 5, 5.1, 5.2, 5.3, 5.4, 5.5, 5.6, 5.7, 5.8, 5.9, 6, 6.1, 6.2, 6.3, 6.4, 6.5, 6.6, 6.7, 6.8, 6.9, 7, 7.1, 7.2, 7.3, 7.4, 7.5, 7.6, 7.7, 7.8, 7.9, 8, 8.1, 8.2, 8.3, 8.4, 8.5, 8.6, 8.7, 8.8, 8.9, 9, 9.1, 9.2, 9.3, 9.4, 9.5, 9.6, 9.7, 9.8, 9.9, or 10 (wt/wt). In some embodiments, the nucleic acid (e.g., DNA or RNA) to total lipid ratio is at least about 0.03, 0.04, 0.05, 0.06, 0.07, or 0.08 (wt/wt). In some embodiments, the nucleic acid (e.g., DNA or RNA) to total lipid ratio is at least about 0.05 (wt/wt).

[0336] In some embodiments, a lipid nanoparticle may be relatively homogenous. A polydispersity index (PDI) may be used to indicate the homogeneity of a lipid nanoparticle, e.g., the particle size distribution of the lipid nanoparticles. A small (e.g., less than 0.3) polydispersity index generally indicates a narrow particle size distribution.

[0337] In some embodiments, a lipid nanoparticle may have a polydispersity index from about 0 to about 0.3. For example, a lipid nano particle may have a PDI of at least about 0.01, 0.02, 0.03, 0.04, 0.05, 0.06, 0.07, 0.08, 0.09, 0.10, 0.11, 0.12, 0.13, 0.14, 0.15, 0.16, 0.17, 0.18, 0.19, 0.20, 0.21, 0.22, 0.23, 0.24, 0.25, 0.26, 0.27, 0.28, 0.29, or 0.3. In some embodiments, the polydispersity index of a lipid nanoparticle may be from about 0.10 to about 0.20.

[0338] In other embodiments, a lipid nanoparticle may have a polydispersity index that is less than about 0.6. For example, a lipid nanoparticle may have a PDI that is less than about 0.31, 0.32, 0.33, 0.34, 0.35, 0.36, 0.37, 0.38, 0.39, 0.4, 0.41, 0.42, 0.43, 0.44, 0.45, 0.46, 0.47, 0.48, 0.49, 0.5, 0.51, 0.52, 0.53, 0.54, 0.55, 0.56, 0.57, 0.58, 0.59, or 0.6. In some embodiments, the polydispersity index of a lipid nanoparticle may be less than 0.4.

[0339] In some embodiments, the nucleic acid vaccine formulation comprises the polynucleotide is a nanoparticle which may comprise at least one lipid. In some embodiments, the lipid may be selected from, but is not limited to, DLin-DMA, DLin-K-DMA, 98N12-5, C12-200, DLin-MC3-DMA, DLin-KC2-DMA, DODMA, PLGA, PEG, PEG-DMG, PEGylated lipids and amino alcohol lipids. In another aspect, the lipid may be a cationic lipid such as, but not limited to, DLin-DMA, DLin-D-DMA, DLin-MC3-DMA, DLin-KC2-DMA, DODMA and amino alcohol lipids. The amino alcohol cationic lipid may be the lipids described in and/or made by the methods described in US Patent Publication No. US20130150625, herein incorporated by reference in its entirety. As a non-limiting example, the cationic lipid may be 2-amino-3-[(9Z,12Z)-octadeca-9, 12-dien-1-yloxy]-2-{[(9Z,2Z)-octadeca-9,12-dien-1-yloxy]methyl}propan-1-ol (Compound 1 in US20130150625); 2-amino-3-[(9Z)-octadec-9-en-1-yloxy]-2-{[(9Z)-octadec-9-en-1-yloxy]methyl}propan-1-ol (Compound 2 in US20130150625); 2-amino-3-[(9Z, 12Z)-octadeca-9,12-dien-1-yloxy]-2-[(octyloxy)methyl]propan-1-ol (Compound 3 in US20130150625); and 2-(dimethylamino)-3-[(9Z,12Z)-octadeca-9, 12-dien-1-yloxy]-2-{[(9Z,12Z)-octadeca-9,12-dien-1-yloxy]methyl}propan-1-ol (Compound 4 in US20130150625); or any pharmaceutically acceptable salt or stereoisomer thereof.

[0340] In some embodiments, the lipid nanoparticle comprises SM-102, polyethylene glycol 2000 dimyristoyl glycerol (PEG2000-DMG), 1,2-distearoyl-sn-glycero-3-phosphocholine (DSPC), and cholesterol.

[0341] In some embodiments, the lipid nanoparticle comprises SM-102, polyethylene glycol 2000 dimyristoyl glycerol (PEG2000-DMG), 1,2-distearoyl-sn-glycero-3-phosphocholine (DSPC), and cholesterol, wherein (a) the nucleic acid to total lipid ratio is at least about 0.05 (wt/wt), and/or (b) the nanoparticle has a molar ratio of about 50% ionizable lipid: about 10% helper lipid: about 38.5% structural lipid; and about 1.5% PEGylated lipid.

[0342] In some embodiments, the lipid nanoparticle comprises ((4-hydroxybutyl)azanediyl)bis(hexane-6,1-diyl)bis(2-hexyldecanoate, 2-(polyethylene glycol 2000)-N,N-ditetradecylacetamide (PEG2000-DMA), 1,2-distearoyl-sn-glycero-3-phosphocholine (DSPC), and cholesterol.

[0343] In some embodiments, the lipid nanoparticle comprises ((4-hydroxybutyl)azanediyl)bis(hexane-6,1-diyl)bis(2-hexyldecanoate, 2-(polyethylene glycol 2000)-N,N-ditetradecylacetamide (PEG2000-DMA), 1,2-distearoyl-sn-glycero-3-phosphocholine (DSPC), and cholesterol, wherein (a) the nucleic acid to total lipid ratio is at least about 0.05 (wt/wt), and/or (b) the nanoparticle has a molar ratio of about 50% ionizable lipid: about 10% helper lipid: about 38.5% structural lipid; and about 1.5% PEGylated lipid.

[0344] In some embodiments, the lipid nanoparticle further comprises potassium chloride, monobasic potassium phosphate, sodium chloride, dibasic sodium phosphate dihydrate, sucrose, or any combination thereof.

[0345] In some embodiments, the lipid nanoparticle further comprises tromethamine, tromethamine hydrochloride, sucrose, or any combination thereof.

[0346] In some embodiments, a unit comprises a total lipid content of 1.93 mg (SM-102, polyethylene glycol [PEG] 2000 dimyristoyl glycerol [DMG], cholesterol, and 1,2-distearoyl-sn-glycero-3-phosphocholine [DSPC]), 0.31 mg tromethamine, 1.18 mg tromethamine hydrochloride, 0.043 mg acetic acid, 0.20 mg sodium acetate trihydrate, and 43.5 mg sucrose. In some embodiments, a single unit is administered to a ruminant as a single dose. In other embodiments, a plurality of such a unit is administered to a ruminant as a single dose.

[0347] In some embodiments, each unit comprises lipids (0.43 mg ((4-hydroxybutyl)azanediyl)bis(hexane-6,1-diyl)bis(2-hexyldecanoate), 0.05 mg 2-(polyethylene glycol 2000)-N,N-ditetradecylacetamide, 0.09 mg 1,2-distearoyl-sn-glycero-3-phosphocholine, and 0.2 mg cholesterol), 0.01 mg potassium chloride, 0.01 mg monobasic potassium phosphate, 0.36 mg sodium chloride, 0.07 mg dibasic sodium phosphate dihydrate, and 6 mg sucrose. In some embodiments, a single unit is administered to a ruminant as a single dose. In other embodiments, a plurality of such a unit is administered to a ruminant as a single dose.

[0348] In some embodiments, each unit comprises lipids (0.43 mg ((4-hydroxybutyl)azanediyl)bis(hexane-6,1-diyl)bis(2-hexyldecanoate), 0.05 mg 2-(polyethylene glycol 2000)-N,N-ditetradecylacetamide, 0.09 mg 1,2-distearoyl-sn-glycero-3-phosphocholine, and 0.19 mg cholesterol), 0.06 mg tromethamine, 0.4 mg tromethamine hydrochloride, and 31 mg sucrose. In some embodiments, a single unit is administered to a ruminant as a single dose. In other embodiments, a plurality of such a unit is administered to a ruminant as a single dose.

[0349] In some embodiments, the lipid nanoparticle has a net neutral charge at a neutral pH.

[0350] In some embodiments, the lipid nanoparticle has a mean diameter of about 50 nm to about 200 nm. In some embodiments, the lipid nanoparticle has a mean diameter of about 80 nm to about 100 nm.

[0351] In some embodiments, the lipid nanoparticle has a polydispersity index (PDI) of less than 0.4.

### 1. Ionizable Lipid

[0352] In some embodiments, the ionizable lipid is selected from 3-(didodecylamino)-N 1,N 1,4-tridodecyl-1-piperazineethanamine (KL 10), N 1-[2-(didodecylamino)ethyl]-N1,N4,N4-tridodecyl-1,4-piperazinediethanamine (KL22), 14,25-ditridecy 1-15,18,21,24-tetraaza-octatriacontane (KL25), di((Z)-non-2-en-1-yl) 9-((4-(dimethylamino)butanoyl)oxy)heptadecanedioate (L319), 1,2-dilinoley loxy-N,N-dimethylaminopropane (DLin-DMA), 2,2-dilinoleyl-4-dimethylaminomethyl-[1,3]-dioxolane (DLin-K-DMA), heptatriaconta-6,9,28,31-tetraen-19-yl 4-(dimethylamino)butanoate (DLin-MC3-DMA), 2,2-dilinoleyl-4-(2-dimethylaminoethyl)-[1,3]-dioxolane (DLin-KC2-DMA), 1,2-dioleyloxy-N,N-dimethylaminopropane (DODMA), 2-({8-[(3)-cholest-5-en-3-yloxy]octyl}oxy)-N,N-dimethyl-3-[(9Z,12Z)-octadeca-9,12-dien-1-yloxy]propan-1-amine (Octyl-CLinDMA), (2R)-2-((8-|(3P)-cholest-5-en-3-yloxy|octyl}oxy)-N.N-dimethyl-3-[(9Z,12Z)-octadeca-9,12-dien-1-yloxy]propan-1-amine (Octyl-CLinDMA (2R)), (2S)-2-({8-[(3)-cholest-5-en-3-yloxy]octyl}oxy)-N,N-dimethyl-3-[(9Z,12Z)-octadeca-9,12-dien-1-yloxy] propan-1-amine (Octyl-CLinDMA (2S)), ALC-0315, and SM-102.

[0353] In some embodiments, the the ionizable lipid comprises 2,2-dilinoleyl-4-dimethylaminoethyl-[1,3]-dioxolane (DLin-KC2-DMA), dilinoleyl-methyl-4-dimethylaminobutyrate (DLin-MC3-DMA), di((Z)-non-2-en-1-yl) 9-((4-(dimethylamino)butanoyl)oxy)heptadecanedioate (L319), 4-hydroxybutyl)azanediyl)bis(hexane-6,1-diyl)bis(2-hexyldecanoate (ALC-0315), SM-102, A18-Iso5-2DC18, A6, 3060i10, or any combination thereof.

[0354] In some embodiments, the ionizable lipid (e.g., cationic lipid) may be selected from, but not limited to, a cationic lipid described in International Publication Nos. WO2012040184, WO2011153120, WO2011149733, WO2011090965, WO2011043913, WO2011022460, WO2012061259, WO2012054365, WO2012044638, WO2010080724, WO201021865, WO2008103276, WO2013086373 and WO2013086354, U.S. Pat. Nos. 7,893,302, 7,404,969, 8,283,333, and 8,466,122 and US Patent Publication No. US20100036115, US20120202871, US20130064894, US20130129785, US20130150625, US20130178541 and US20130225836; the contents of each of which are herein incorporated by reference in their entirety. In another embodiment, the cationic lipid may be selected from, but not limited to, formula A described in International Publication Nos. WO2012040184, WO2011153120, WO2011149733, WO2011090965, WO2011043913, WO2011022460, WO2012061259, WO2012054365, WO2012044638 and WO2013116126 or US Patent Publication No. US20130178541 and US20130225836; the contents of each of which is herein incorporated by reference in their entirety. In yet another embodiment, the cationic lipid may be selected from, but not limited to, formula CLI-CLXXIX of International Publication No. WO2008103276, formula CLI-CLXXIX of U.S. Pat. No. 7,893,302, formula CLI-CLXXXXII of U.S. Pat. No. 7,404,969 and formula I-VI of US Patent Publication No. US20100036115, formula I of US Patent Publication No US20130123338; each of which is herein incorporated by reference in their entirety. As a non-limiting example, the cationic lipid may be selected from (20Z,23Z)-N,N-dimethylnonacosa-20,23-dien-10-amine, (17Z,20Z)-N,N-dimemylhexacosa-17,20-dien-9-amine, (1Z,19Z)-N5N-dimethylpentacosa-1 6, 19-dien-8-amine, (13Z,16Z)-N,N-dimethyldocosa-13,16-dien-5-amine, (12Z,15Z)-N,N-dimethylhenicosa-12,15-dien-4-amine, (14Z,17Z)-N,N-dimethyltricosa-14,17-dien-6-amine, (15Z,18Z)-N,N-dimethyltetracosa-15,18-dien-7-amine, (18Z,21Z)-N,N-dimethylheptacosa-18,21-dien-10-amine, (15Z, 18Z)-N,N-dimethyltetracosa-15,18-dien-5-amine, (14Z, 17Z)-N,N-dimethyltricosa-14,17-dien-4-amine, (19Z,22Z)-N,N-dimeihyloctacosa-19,22-dien-9-amine, (18Z,21 Z)-N,N-dimethylheptacosa-18,21-dien-8-amine, (17Z,20Z)-N,N-dimethylhexacosa-17,20-dien-7-amine, (16Z,19Z)-N,N-dimethylpentacosa-16,19-dien-6-amine, (22Z,25Z)-N,N-dimethylhentriaconta-22,25-dien-10-amine, (21 Z,24Z)-N,N-dimethyltriaconta-21,24-dien-9-amine, (18Z)-N,N-dimetylheptacos-18-en-10-amine, (17Z)-N,N-dimethylhexacos-17-en-9-amine, (19Z,22Z)-N,N-dimethyloctacosa-19,22-dien-7-amine, N,N-dimethylheptacosan-10-amine, (20Z,23Z)-N-ethyl-N-methylnonacosa-20,23-dien-10-amine, 1-[(11Z,14Z)-1-nonylicosa-11,14-dien-1-yl] pyrrolidine, (20Z)-N,N-dimethylheptacos-20-en-1 0-amine, (15Z)-N,N-dimethyl eptacos-15-en-1 O-amine, (14Z)-N,N-dimethylnonacos-14-en-10-amine, (17Z)-N,N-dimethylnonacos-17-en-10-amine, (24Z)-N,N-dimethyltritriacont-24-en-10-amine, (20Z)-N,N-dimethylnonacos-20-en-1 O-amine, (22Z)-N,N-dimethylhentriacont-22-en-10-amine, (16Z)-N,N-dimethylpentacos-16-en-8-amine, (12Z,15Z)-N,N-dimethyl-2-nonylhenicosa-12,15-dien-i-amine, (13Z,16Z)-N,N-dimethyl-3-nonyldocosa-13,16-dien-1-amine, N,N-dimethyl-1-[(1S,2R)-2-octylcyclopropyl] eptadecan-8-amine, 1-[(1S,2R)-2-hexylcyclopropyl]-N,N-dimethylnonadecan- 10-amine, N,N-dimethyl-1-[(1S,2R)-2-octylcyclopropyl]nonadecan-10-amine, N,N-dimethyl-21-[(1S,2R)-2-octylcyclopropyl]henicosan-10-amine, N,N-dimethyl-1-[(1S,2S)-2-{[(1R,2R)-2-pentylcyclopropyl] methyl} cyclopropyl] nonadecan-10-amine, N,N-dimethyl-1-[(1S,2R)-2-octylcyclopropyl]hexadecan-8-amine, N,N-dimethyl-[(1R,2S)-2-undecylcyclopropyl]tetradecan-5-amine, N,N-dimethyl-3-{7-[(1S,2R)-2-octylcyclopropyl]heptyl} dodecan-i-amine, i-[(1R,2S)-2-heptylcyclopropyl]-N,N-dimethyloctadecan-9-amine, 1-[(1 S,2R)-2-decylcyclopropyl]-N,N-dimethylpentadecan-6-amine, N,N-dimethyl-1-[(1S,2R)-2-octylcyclopropyl]pentadecan-8-amine, R—N,N-dimethyl-1-[(9Z, 12Z)-octadeca-9, 12-dien-1-yloxy]-3-(octyloxy)propan-2-amine, S—N,N-dimethyl-1-[(9Z,12Z)-octadeca-9,12-dien-1-yloxy]-3-(octyloxy)propan-2-amine, i-{2-[(9Z,12Z)-octadeca-9,12-dien-i-yloxy]-1-[(octyloxy)methyl]ethyl}pyrrolidine, (2S)—N,N-dimethyl-1-[(9Z,12Z)-octadeca-9,12-dien-1-yloxy]-3-[(5Z)-oct-5-en-1-yloxy]propan-2-amine, 1-{2-[(9Z,12Z)-octadeca-9,12-dien-1-yloxy]-1-[(octyloxy)methyl]ethylIazetidine, (2S)-1-(hexyloxy)-N,N-dimethyl-3-[(9Z,12Z)-octadeca-9, 12-dien-i-yloxy]propan-2-amine, (2S)-1-(heptyloxy)-N,N-dimethyl-3-[(9Z, 12Z)-octadeca-9, 12-dien-1-yloxy]propan-2-amine, N,N-dimethyl-1-(nonyloxy)-3-[(9Z,12Z)-octadeca-9, 12-dien-1-yloxy]propan-2-amine, N,N-dimethyl-1-[(9Z)-octadec-9-en-1-yloxy]-3-(octyloxy)propan-2-amine; (2S)—N,N-dimethyl-1-[(6Z,9Z,12Z)-octadeca-6,9,12-trien-1-yloxy]-3-(octyloxy)propan-2-amine, (2S)-1-[(11Z,14Z)-icosa-11,14-dien-1-yloxy]-N,N-dimethyl-3-(pentyloxy)propan-2-amine, (2S)-1-(hexyloxy)-3-[(1 1Z,14Z)-icosa-1 1,14-dien-1-yloxy]-N,N-dimethylpropan-2-amine, 1-[(11Z,14Z)-icosa-1 1,14-dien-1-yloxy]-N,N-dimethy 1-3-(octyloxy)propan-2-amine, 1-[(13Z, 16Z)-docosa-13, 16-dien-1-yloxy]-N,N-dimethyl-3-(octyloxy)propan-2-amine, (2S)-1-[(13Z,16Z)-docosa-13,16-dien-1-yloxy]-3-(hexyloxy)-N,N-dimethylpropan-2-amine, (2S)-1-[(13Z)-docos-13-en-1-yloxy]-3-(hexyloxy)-N,N-dimethylpropan-2-amine, 1-[(13Z)-docos-13-en-1-yloxy]-N,N-dimethyl-3-(octyloxy)propan-2-amine, 1-[(9Z)-hexadec-9-en-1-yloxy]-N,N-dimethyl-3-(octyloxy)propan-2-amine, (2R)—N,N-dimethyl-H(1-metoyloctyl)oxy]-3-[(9Z,12Z)-octadeca-9, 12-dien-1-yloxy]propan-2-amine, (2R)-1-[(3,7-dimethyloctyl)oxy]-N,N-dimethyl-3-[(9Z, 12Z)-octadeca-9, 12-dien-1-yloxy]propan-2-amine, N,N-dimethyl-1-(octyloxy)-3-({8-[(1S,2S)-2-{[(1R,2R)-2-pentylcyclopropyl] methyl} cyclopropyl] octyl} oxy)propan-2-amine, N,N-dimethyl-1-{[8-(2-oclylcyclopropyl)octyl]oxy}-3-(octyloxy)propan-2-amine and (11E,20Z,23Z)-N,N-dimethylnonacosa-11,20,2-trien-10-amine or a pharmaceutically acceptable salt or stereoisomer thereof.

[0355] In some embodiments, the lipid may be a cleavable lipid such as those described in International Publication No. WO2012170889, herein incorporated by reference in its entirety.

[0356] In some embodiments, the lipid may be a cationic lipid such as, but not limited to, Formula (I) of U.S. Patent Application No. US20130064894, the contents of which are herein incorporated by reference in its entirety.

[0357] In some embodiments, the the ionizable lipid (e.g., cationic lipid) may be synthesized by methods known in the art and/or as described in International Publication Nos. WO2012040184, WO2011153120, WO2011149733, WO2011090965, WO2011043913, WO2011022460, WO2012061259, WO2012054365, WO2012044638, WO2010080724, WO201021865, WO2013086373 and WO2013086354; the contents of each of which are herein incorporated by reference in their entirety. In other embodiments, the cationic lipid may be a trialkyl cationic lipid. Non-limiting examples of trialkyl cationic lipids and methods of making and using the trialkyl cationic lipids are described in International Patent Publication No. WO2013126803, the contents of which are herein incorporated by reference in its entirety.

[0358] In some embodiments, the ionizable lipids are one or more of the compounds described in U.S. Application Nos. 62/220,091, 62/252,316, 62/253,433, 62/266,460, 62/333,557, 62/382,740, 62/393,940, 62/471,937, 62/471,949, 62/475,140, and 62/475,166, and PCT Application No. PCT/US2016/052352.

### 2. PEGylated Lipid

[0359] The lipid component of a lipid nanoparticle or lipid nanoparticle formulation may include one or more molecules comprising polyethylene glycol, such as PEGylated, PEG, or PEG-modified lipids. Such species may be alternately referred to as PEGylated lipids. A PEG lipid is a lipid modified with polyethylene glycol. A PEG lipid may be selected from the non-limiting group including PEG-modified phosphatidylethanolamines, PEG-modified phosphatidic acids, PEG-modified ceramides, PEG-modified dialkylamines, PEG-modified diacylglycerols, PEG-modified dialkylglycerols, and mixtures thereof. In some embodiments, a PEG lipid may be PEG-c-DOMG, PEG-DMG, PEG-DLPE, PEG-DMPE, PEG-DPPC, or a PEG-DSPE lipid.

[0360] In some embodiments, the PEG lipid is selected from the group consisting of a PEG-modified phosphatidylethanolamine, a PEG-modified phosphatidic acid, a PEG-modified ceramide, a PEG-modified dialkylamine, a PEG-modified diacylglycerol, a PEG-modified dialkylglycerol, and mixtures thereof.

[0361] In some embodiments, PEG lipids useful in the present invention can be PEGylated lipids described in International Publication No. WO2012099755, the contents of which is herein incorporated by reference in its entirety. Any of these exemplary PEG lipids described herein may be modified to comprise a hydroxyl group on the PEG chain. In some embodiments, the PEG lipid is a PEG-OH lipid. As generally defined herein, a “PEG-OH lipid” (also referred to herein as “hydroxy-PEGylated lipid”) is a PEGylated lipid having one or more hydroxyl (—OH) groups on the lipid. In some embodiments, the PEG-OH lipid includes one or more hydroxyl groups on the PEG chain. In some embodiments, a PEG-OH or hydroxy-PEGylated lipid comprises an —OH group at the terminus of the PEG chain. Each possibility represents a separate embodiment of the present invention.

[0362] In some embodiments, the formulation includes from about 0.5% to about 20% on a molar basis of the PEGylated or PEG-modified lipid (e.g., about 0.5 to about 10%, about 0.5 to about 5%, about 1.5%, about 0.5%, about 1.5%, about 3.5%, or about 5% on a molar basis. Exemplary PEG-modified lipids include, but are not limited to, PEG-distearoyl glycerol (PEG-DMG) (also referred herein as PEG-C14 or C14-PEG), PEG-cDMA (further discussed in Reyes et al. J. Controlled Release, 107, 276-287 (2005) the contents of which are herein incorporated by reference in its entirety).

[0363] In some embodiments, the lipid moiety of the PEG lipids includes those having lengths of from about C14 to about C22, e.g., from about C14 to about C16. In some embodiments, a PEG moiety, for example an mPEG-NEb, has a size of about 1000, 2000, 5000, 10,000, 15,000 or 20,000 daltons. In some embodiments, the PEG lipid is PEG2000-DMG.

[0364] In some embodiments, the ratio of PEG in the lipid nanoparticle formulations may be increased or decreased and/or the carbon chain length of the PEG lipid may be modified from C14 to C18 to alter the pharmacokinetics and/or biodistribution of the LNP formulations.

[0365] Non-limiting examples of PEG lipids include PEG-modified phosphatidylethanolamine and phosphatidic acid, PEG-ceramide conjugates (e.g., PEG-CerC14 or PEG-CerC20), PEG-modified dialkylamines, PEG-modified 1,2-diacyloxypropan-3-amines, (2-[(polyethylene glycol)-2000]-N,N-ditetradecylacetamide (PEG2000-DMA), and 1,2-dimyristoyl-rac-glycero3-methoxypolyethylene glycol-2000 (PEG2000-DMG). Such lipids are also referred to as PEGylated lipids. In some embodiments, a PEG lipid can be PEG-c-DOMG, PEG-DMG, PEG-DLPE, PEG-DMPE, PEG-DPPC, or a PEG-DSPE lipid.

[0366] In some embodiments, the PEG lipid includes, but are not limited to, 1,2-dimyristoyl-sn-glycerol methoxypoly ethylene glycol (PEG-DMG), 1,2-distearoyl-sn-glycero-3-phosphoethanolamine-N-[amino(polyethylene glycol)] (PEG-DSPE), PEG-disteryl glycerol (PEG-DSG), PEG-dipalmetoleyl, PEG-dioleyl, PEG-distearyl, PEG-diacylglycamide (PEG-DAG), PEG-dipalmitoyl phosphatidylethanolamine (PEG-DPPE), or PEG-1, 2-dimyristyloxlpropy 1-3-amine (PEG-c-DMA).

[0367] In some embodiments, the lipid nanoparticles described herein can comprise a PEG lipid which is a non-diffusible PEG. Non-limiting examples of non-diffusible PEGs include PEG-DSG and PEG-DSPE.

[0368] PEG lipids are known in the art, such as those described in U.S. Pat. Nos. 8,158,601, 8,492,359, PCT/US2016/000129, WO2012/099755, and WO 2015/130584 A2, which are incorporated herein by reference in their entirety.

[0369] In preferred embodiments, the Pegylated lipid comprises (2-[(polyethylene glycol)-2000]-N,N-ditetradecylacetamide (PEG2000-DMA (also called ALC-0159)); and/or polyethylene glycol 2000 dimyristoyl glycerol (PEG2000-DMG).

### 3. Structural Lipid

[0370] As used herein, the term“structural lipid” refers to sterols and also to lipids containing sterol moieties.

[0371] Incorporation of structural lipids in the lipid nanoparticle may help mitigate aggregation of other lipids in the particle. Structural lipids can be selected from the group including but not limited to, cholesterol, fecosterol, sitosterol, ergosterol, campesterol, stigmasterol, brassicasterol, tomatidine, tomatine, ursolic acid, alpha-tocopherol, hopanoids, phytosterols, steroids, and mixtures thereof. In some embodiments, the structural lipid is a mixture of two or more components each independently selected from cholesterol, fecosterol, sitosterol, ergosterol, campesterol, stigmasterol, brassicasterol, tomatidine, tomatine, ursolic acid, alpha-tocopherol, hopanoids, phytosterols, and steroids. In some embodiments, the structural lipid is a sterol. In some embodiments, the structural lipid is a mixture of two or more sterols.

[0372] As used herein, “sterols” are a subgroup of steroids consisting of steroid alcohols. In some embodiments, the structural lipid is a steroid. In some embodiments, the structural lipid is cholesterol. In some embodiments, the structural lipid is an analog of cholesterol. In some embodiments, the structural lipid is alpha-tocopherol.

[0373] In some embodiments, the structural lipid comprises: cholesterol, β-Sitosterol, 20α-Hydroxycholesterol, sterol, or any combination thereof.

[0374] In some embodiments, the structural lipids may be one or more structural lipids described in U.S. Application No. 62/520,530.

### 4. Helper Lipid

[0375] Helper lipids contribute to their stability and delivery efficiency. Helper lipids with cone-shape geometry favoring the formation hexagonal II phase, such as dioleoylphosphatidylethanolamine (DOPE), can promote endosomal release of the nucleic acid. Meanwhile, cylindrical-shaped lipid phosphatidylcholine can provide greater bilayer stability, which is important for in vivo application of LNPs.

[0376] Helper lipids include phospholipids. Phospholipids may assemble into one or more lipid bilayers. In general, phospholipids comprise a phospholipid moiety and one or more fatty acid moieties.

[0377] A phospholipid moiety can be selected, for example, from the non-limiting group consisting of phosphatidyl choline, phosphatidyl ethanolamine, phosphatidyl glycerol, phosphatidyl serine, phosphatidic acid, 2-lysophosphatidyl choline, and a sphingomyelin.

[0378] A fatty acid moiety can be selected, for example, from the non-limiting group consisting of lauric acid, myristic acid, myristoleic acid, palmitic acid, palmitoleic acid, stearic acid, oleic acid, linoleic acid, alpha-linolenic acid, erucic acid, phytanoic acid, arachidic acid, arachidonic acid, eicosapentaenoic acid, behenic acid, docosapentaenoic acid, and docosahexaenoic acid.

[0379] Particular phospholipids can facilitate fusion to a membrane. In some embodiments, a cationic phospholipid can interact with one or more negatively charged phospholipids of a membrane (e.g., a cellular or intracellular membrane). Fusion of a phospholipid to a membrane can allow one or more elements (e.g., a therapeutic agent) of a lipid-containing composition (e.g., LNPs) to pass through the membrane permitting, e.g., delivery of the one or more elements to a target tissue.

[0380] Non-natural phospholipid species including natural species with modifications and substitutions including branching, oxidation, cyclization, and alkynes are also contemplated. In some embodiments, a phospholipid can be functionalized with or cross-linked to one or more alkynes (e.g., an alkenyl group in which one or more double bonds is replaced with a triple bond). Under appropriate reaction conditions, an alkyne group can undergo a copper-catalyzed cycloaddition upon exposure to an azide. Such reactions can be useful in functionalizing a lipid bilayer of a nanoparticle composition to facilitate membrane permeation or cellular recognition or in conjugating a nanoparticle composition to a useful component such as a targeting or imaging moiety (e.g., a dye).

[0381] Phospholipids include, but are not limited to, glycerophospholipids such as phosphatidylcholines, phosphatidylethanolamines, phosphatidylserines, phosphatidylinositols, phosphatidy glycerols, and phosphatidic acids. Phospholipids also include phosphosphingolipid, such as sphingomyelin (SM).

[0382] In some embodiments, a phospholipid useful or potentially useful in the present invention is an analog or variant of DSPC.

[0383] In some embodiments, the helper lipid comprises the phospholipid selected from one or more of the phospholipids described in U.S. Application No. 62/520,530 and WO 2020/160397, each of which is incorporated herein by reference.

[0384] In some embodiments, the helper lipid comprises the phospholipid selected from the non-limiting group of 1,2-distearoyl-sn-glycero-3-phosphocholine (DSPC), 1,2-dioleoyl-sn-glycero-3-phosphoethanolamine (DOPE), 1,2-dilinoleoyl-sn-glycero-3-phosphocholine (DLPC), 1,2-dimyristoyl-sn-glycero-phosphocholine (DMPC), 1,2-dioleoyl-sn-glycero-3-phosphocholine (DOPC), 1,2-dipalmitoyl-sn-glycero-3-phosphocholine (DPPC), 1,2-diundecanoyl-sn-glycero-phosphocholine (DUPC), 1-palmitoyl-2-oleoyl-sn-glycero-3-phosphocholine (POPC), 1.2-di-O-octadecenyl-s7i-glycero-3-phosphocholine (18:0 Diether PC), 1-oleoyl-2-cholesterylhemisuccinoyl-s7i-glycero-3-phosphocholine (OChemsPC), 1-hexadecyl-sn-glycero-3-phosphocholine (Cl 6 Lyso PC), 1,2-dilinolenoyl-sn-glycero-3-phosphocholine, 1,2-diarachidonoyl-sn-glycero-3-phosphocholine, 1,2-didocosahexaenoyl-sn-glycero-3-phosphocholine, 1,2-diphytanoyl-sn-glycero-3-phosphoethanolamine (ME 16.0 PE), 1,2-distearoyl-sn-glycero-3-phosphoethanolamine, 1,2-dilinoleoyl-sn-glycero-3-phosphoethanolamine, 1,2-dilinolenoyl-sn-gly cero-3-phosphoethanolamine, 1,2-diarachidonoyl-sn-glycero-3-phosphoethanolamine, 1,2-didocosahexaenoyl-sn-glycero-3-phosphoethanolamine, 1,2-dioleoyl-sn-glycero-3-phospho-rac-(1-glycerol) sodium salt (DOPG), and sphingomyelin. In some embodiments, a LNP includes DSPC. In some embodiments, a LNP includes DOPE.

[0385] In some embodiments, the helper lipid comprises 1,2-distearoyl-sn-glycero-3-phosphocholine (DSPC) and/or 1,2-dioleoyl-sn-glycero-3-phosphoethanolamine (DOPE).

### Lipoplexes

[0386] In some embodiments, the nucleic acid vaccine is formulated as a lipoplex, such as, without limitation, the ATUPLEX™ system, the DACC system, the DBTC system and other siRNA-lipoplex technology from Silence Therapeutics (London, United Kingdom), STEMFECT™ from STEMGENT® (Cambridge, MA), and polyethylenimine (PEI) or protamine-based targeted and non-targeted delivery of nucleic acids acids (Aleku et al. Cancer Res. 2008 68:9788-9798; Strumberg et al. Int J Clin Pharmacol Ther 2012 50:76-78; Santel et al., Gene Ther 2006 13: 1222-1234; Santel et al., Gene Ther 2006 13: 1360-1370; Gutbier et al., Pulm Pharmacol. Ther. 2010 23:334-344; Kaufmann et al. Microvasc Res 2010 80:286-293Weide et al. J Immunother. 2009 32:498-507; Weide et al. J Immunother. 2008 31: 180-188; Pascolo Expert Opin. Biol. Ther. 4: 1285-1294; Fotin-Mleczek et al., 2011 J. Immunother. 34: 1-15; Song et al., Nature Biotechnol. 2005, 23:709-717; Peer et al., Proc Natl Acad Sci USA. 2007 6; 104:4095-4100; deFougerolles Hum Gene Ther. 2008 19: 125-132; all of which are incorporated herein by reference in its entirety).

[0387] In some embodiments, such formulations may also be constructed or compositions altered such that they passively or actively are directed to different cell types in vivo, including but not limited to hepatocytes, immune cells, tumor cells, endothelial cells, antigen presenting cells, and leukocytes (Akinc et al. Mol Ther. 2010 18: 1357-1364; Song et al., Nat Biotechnol. 2005 23:709-717; Judge et al., J Clin Invest. 2009 119:661-673; Kaufmann et al., Microvasc Res 2010 80:286-293; Santel et al., Gene Ther 2006 13: 1222-1234; Santel et al., Gene Ther 2006 13: 1360-1370; Gutbier et al., Pulm Pharmacol. Ther. 2010 23:334-344; Basha et al., Mol. Ther. 2011 19:2186-2200; Fenske and Cullis, Expert Opin Drug Deliv. 2008 5:25-44; Peer et al., Science. 2008 319:627-630; Peer and Lieberman, Gene Ther. 2011 18: 1127-1133; all of which are incorporated herein by reference in its entirety). Examples of passive targeting of formulations to liver cells include the DLin-DMA, DLin-KC2-DMA and DLin-MC3-DMA-based lipid nanoparticle formulations which have been shown to bind to apolipoprotein E and promote binding and uptake of these formulations into hepatocytes in vivo (Akinc et al. Mol Ther. 2010 18: 1357-1364; herein incorporated by reference in its entirety). Formulations can also be selectively targeted through expression of different ligands on their surface as exemplified by, but not limited by, folate, transferrin, N-acetylgalactosamine (GalNAc), and antibody targeted approaches (Kolhatkar et al., Curr Drug Discov Technol. 2011 8: 197-206; Musacchio and Torchilin, Front Biosci. 2011 16: 1388-1412; Yu et al., Mol Membr Biol. 2010 27:286-298; Patil et al., Crit Rev Ther Drug Carrier Syst. 2008 25: 1-61; Benoit et al., Biomacromolecules. 2011 12:2708-2714; Zhao et al., Expert Opin Drug Deliv. 2008 5:309-319; Akinc et al., Mol Ther. 2010 18: 1357-1364; Srinivasan et al., Methods Mol Biol. 2012 820: 105-116; Ben-Arie et al., Methods Mol Biol. 2012 757:497-507; Peer 2010 J Control Release. 20:63-68; Peer et al., Proc Natl Acad Sci USA. 2007 104:4095-4100; Kim et al., Methods Mol Biol. 2011 721:339-353; Subramanya et al., Mol Ther. 2010 18:2028-2037; Song et al., Nat Biotechnol. 2005 23:709-717; Peer et al., Science. 2008 319:627-630; Peer and Lieberman, Gene Ther. 2011 18: 1127-1133; all of which are incorporated herein by reference in its entirety).

[0388] Liposomes, lipoplexes, or lipid nanoparticles may be used to improve the efficacy of polynucleotides directed protein production as these formulations may be able to increase cell transfection by the nucleic acid vaccine; and/or increase the translation of encoded protein. The liposomes, lipoplexes, or lipid nanoparticles may also be used to increase the stability of the polynucleotide.

[0389] Additional lipids useful in preparing the vaccines of the present disclosure are known in the art. Representative references are listed in Table 6A below, each of which is incorporated herein by reference.

TABLE 6A

| | | | | |
|---|---|---|---|---|
| US7758869B2 | US11357856B2 | EP3808177A1 | US20230090515A1 | US20220409536A1 |
| EP1420818B1 | US11453639B2 | EP3988104A1 | US8703906B2 | US20220411361A1 |
| EP4169579A1 | US11524932B2 | EP4074344A1 | US9314535B2 | US20230000773A1 |
| EP4169580A1 | US11542225B2 | US10077232B2 | US9421255B2 | US9533047B2 |
| EP4186528A1 | US11634379B2 | US10117941B2 | US9907862B2 | US9867888B2 |
| EP3532094A1 | US11639329B2 | US10456473B2 | EP3350157B1 | US9868692B2 |
| US20200163878A1 | US11648324B2 | US10821186B2 | EP3386484B1 | US9868693B2 |
| US20210251898A1 | US20190022247A1 | US10835612B2 | EP3394030B1 | US9950068B2 |
| EP3289083A4 | US20200121809A1 | US10953095B2 | EP3458590B9 | EP1747262B1 |
| EP3532097A1 | US20200172472A1 | US20090247608A1 | EP3596041B1 | EP2678038B1 |
| US20190274968A1 | US20210395188A1 | US20210162053A1 | EP3638678A1 | EP2955230A1 |
| EP3551169A4 | US20220081392A1 | US20220023427A1 | EP3736261A1 | EP4076647A1 |
| EP3456317A1 | US20220106257A1 | US20220040308A1 | EP3852732A1 | US10369216B2 |
| US9701623B2 | US20220204439A1 | US20220072154A1 | EP3853202A1 | US10568958B2 |
| EP2512449B1 | US20230097090A1 | US20220074925A1 | EP3853305A1 | US10751424B2 |
| US10653780B2 | US20230123534A1 | US20230109183A1 | EP3964200A1 | US11110166B2 |
| EP2224912B1 | US9737619B2 | US20230174459A1 | EP4009955A1 | US20200338215A1 |
| EP3100718B1 | US9738593B2 | US8034376B2 | EP4031521A1 | US20210361764A1 |
| EP4169534A1 | EP2788006A1 | US8158601B2 | EP4031524A1 | EP3097908A1 |
| EP3737386A1 | EP2788316B1 | US8642076B2 | EP4031527A1 | EP3156077B1 |
| US20220001025A1 | EP3860561B1 | US8722082B2 | EP4036079A3 | EP3192788A1 |
| US20210023100A1 | EP3988537A1 | US8802644B2 | EP4186888A1 | EP3207944B1 |
| EP2830593B1 | EP4183400A1 | US8883202B2 | US10195156B2 | EP3238738B1 |
| EP3427723B1 | US10369226B2 | US8999351B2 | US10207010B2 | EP3284482B1 |
| EP3484445B1 | US11071784B2 | US9139554B2 | US10266485B2 | EP3431076B1 |
| EP3881827A1 | US11110174B2 | US9186325B2 | US10392341B2 | EP3699172A3 |
| US11318195B2 | US11246933B1 | US9220683B2 | US10442756B2 | US8569256B2 |
| US11559587B2 | US11400158B2 | US9352042B2 | US10485885B2 | US9868691B2 |
| US20220313811A1 | US11679158B2 | US9394234B2 | US10494636B2 | EP4148083A1 |
| EP3595727A1 | US20220008541A1 | US9663449B2 | US10519455B2 | EP4182297A1 |
| EP2760477B1 | US20220370356A1 | US9682139B2 | US10556018B2 | US10106490B2 |
| EP4169578A1 | US8450467B2 | US9687550B2 | US10799463B2 | US10166298B2 |
| EP2350043B9 | US8828956B2 | US9694077B2 | US10857105B2 | US10221127B2 |
| EP2743265B1 | US8987377B2 | US9764036B2 | US10898574B2 | US10723692B2 |
| EP1999137B1 | US9061063B2 | US9814777B2 | US11220476B2 | US11040112B2 |
| EP2109459B1 | US9463247B2 | EP2903652B1 | US11285222B2 | US11168051B2 |
| US8758763B2 | EP2068886B1 | EP3145550B1 | US11597698B2 | EP2823810B9 |
| EP3160938B1 | EP2231195B1 | EP3197433A1 | US11649461B2 | US9018187B2 |
| EP3313829A1 | EP2279254B1 | EP4085930A1 | US20190382774A1 | US20220296517A1 |
| EP3368507B1 | EP2355658B1 | US10039714B2 | US20210154148A1 | US20220380299A1 |
| EP3397613A1 | EP2355851B1 | US10729785B2 | US20210161829A1 | US9677073B2 |
| EP3615510A1 | EP2391343B1 | US11045418B2 | US20210198200A1 | EP2331138B1 |
| EP3668833A1 | EP2440183B1 | US11173120B2 | US20220031631A1 | EP2817287B1 |
| EP3668834A1 | EP2509636B1 | US11541010B2 | US20220047518A1 | EP3033325B1 |
| EP3766916B1 | EP2695608B1 | US20220023212A1 | US20220265857A1 | EP3908568A1 |
| EP3867225A1 | | | | |

### Controlled/Sustained Release

[0390] In some embodiments, the nucleic acid vaccines of the present invention can be formulated for controlled release and/or targeted delivery. As used herein, “controlled release” refers to a pharmaceutical composition or compound release profile that conforms to a particular pattern of release to effect a specific outcome.

[0391] In some embodiments, the nucleic acid vaccines may be encapsulated into a delivery agent described herein and/or known in the art for controlled release and/or targeted delivery. As used herein, the term “encapsulate” means to enclose, surround or encase. As it relates to the formulation of the compounds of the invention, encapsulation may be substantial, complete or partial. The term “substantially encapsulated” means that at least greater than 50, 60, 70, 80, 85, 90, 95, 96, 97, 98, 99, 99.9, 99.9 or greater than 99.999% of the pharmaceutical composition or compound of the invention may be enclosed, surrounded or encased within the delivery agent. “Partially encapsulation” means that less than 10, 10, 20, 30, 40 50 or less of the pharmaceutical composition or compound of the invention may be enclosed, surrounded or encased within the delivery agent. Advantageously, encapsulation may be determined by measuring the escape or the activity of the pharmaceutical composition or compound of the invention using fluorescence and/or electron micrograph. For example, at least 1, 5, 10, 20, 30, 40, 50, 60, 70, 80, 85, 90, 95, 96, 97, 98, 99, 99.9, 99.99 or greater than 99.99% of the pharmaceutical composition or compound of the invention are encapsulated in the delivery agent.

[0392] In some embodiments, the controlled release formulation may include, but is not limited to, tri-block co-polymers. As a non-limiting example, the formulation may include two different types of tri-block co-polymers (International Pub. No. WO2012131104 and WO2012131106; the contents of each of which is herein incorporated by reference in its entirety).

[0393] In other embodiments, the nucleic acid vaccines may be encapsulated into a lipid nanoparticle or a rapidly eliminated lipid nanoparticle and the lipid nanoparticles or a rapidly eliminated lipid nanoparticle may then be encapsulated into a polymer, hydrogel and/or surgical sealant described herein and/or known in the art. As a non-limiting example, the polymer, hydrogel or surgical sealant may be PLGA, ethylene vinyl acetate (EVAc), poloxamer, GELSITE® (Nanotherapeutics, Inc. Alachua, FL), HYLENEX® (Halozyme Therapeutics, San Diego CA), surgical sealants such as fibrinogen polymers (Ethicon Inc. Cornelia, GA), TISSELL® (Baxter International, Inc Deerfield, IL), PEG-based sealants, and COSEAL® (Baxter International, Inc Deerfield, IL).

[0394] In other embodiments, the lipid nanoparticle may be encapsulated into any polymer known in the art which may form a gel when injected into a subject. As another non-limiting example, the lipid nanoparticle may be encapsulated into a polymer matrix which may be biodegradable.

[0395] In some embodiments, the the nucleic acid vaccine formulation for controlled release and/or targeted delivery may also include at least one controlled release coating. Controlled release coatings include, but are not limited to, OPADRY®, polyvinylpyrrolidone/vinyl acetate copolymer, polyvinylpyrrolidone, hydroxypropyl methylcellulose, hydroxypropyl cellulose, hydroxyethyl cellulose, EUDRAGIT RL®, EUDRAGIT RS® and cellulose derivatives such as ethylcellulose aqueous dispersions (AQUACOAT® and SURELEASE®).

[0396] In some embodiments, the nucleic acid vaccine controlled release and/or targeted delivery formulation may comprise at least one degradable polyester which may comprise polycationic side chains. Degradeable polyesters include, but are not limited to, poly(serine ester), poly(L-lactide-co-L-lysine), poly(4-hydroxy-L-proline ester), and combinations thereof. In another embodiment, the degradable polyesters may include a PEG conjugation to form a PEGylated polymer.

[0397] In some embodiments, the nucleic acid vaccine controlled release and/or targeted delivery formulation comprising at least one polynucleotide may comprise at least one PEG and/or PEG related polymer derivatives as described in U.S. Pat. No. 8,404,222, herein incorporated by reference in its entirety.

[0398] In other embodiments, the nucleic acid vaccine controlled release delivery formulation comprising at least one polynucleotide may be the controlled release polymer system described in US20130130348, herein incorporated by reference in its entirety.

[0399] In some embodiments, the the nucleic acid vaccines of the present invention may be encapsulated in a nanoparticle formulated by methods described herein and known in the art such as, but not limited to, International Pub Nos. WO2010005740, WO2010030763, WO2010005721, WO2010005723, WO2012054923, US Pub. Nos. US20110262491, US20100104645, US20100087337, US20100068285, US20110274759, US20100068286, US20120288541, US20130123351 and US20130230567 and U.S. Pat. Nos. 8,206,747, 8,293,276, 8,318,208 and 8,318,211; the contents of each of which are herein incorporated by reference in their entirety. In other embodiments, polymer nanoparticles may be identified by the methods described in US Pub No. US20120140790, the contents of which is herein incorporated by reference in its entirety.

[0400] In some embodiments, the nanoparticle nucleic acid vaccine may be formulated for sustained release. As used herein, “sustained release” refers to a pharmaceutical composition or compound that conforms to a release rate over a specific period of time. The period of time may include, but is not limited to, hours, days, weeks, months and years. As a non-limiting example, the sustained release nanoparticle may comprise a polymer and a therapeutic agent such as, but not limited to, the the polynucleotides of the present invention (see International Pub No. 2010075072 and US Pub No. US20100216804, US20110217377 and US20120201859, each of which is herein incorporated by reference in their entirety). In another non-limiting example, the sustained release formulation may comprise agents which permit persistent bioavailability such as, but not limited to, crystals, macromolecular gels and/or particulate suspensions (see US Patent Publication No US20130150295, the contents of which is herein incorporated by reference in its entirety).

### Nanocarriers

[0401] In some embodiments, the nucleic acid vaccines may be encapsulated in, linked to and/or associated with synthetic nanocarriers. Synthetic nanocarriers include, but are not limited to, those described in International Pub. Nos. WO2010005740, WO2010030763, WO201213501, WO2012149252, WO2012149255, WO2012149259, WO2012149265, WO2012149268, WO2012149282, WO2012149301, WO2012149393, WO2012149405, WO2012149411, WO2012149454 and WO2013019669, and US Pub. Nos. US20110262491, US20100104645, US20100087337 and US20120244222, each of which is herein incorporated by reference in their entirety. The synthetic nanocarriers may be formulated using methods known in the art and/or described herein. As a non-limiting example, the synthetic nanocarriers may be formulated by the methods described in International Pub Nos. WO2010005740, WO2010030763 and WO201213501 and US Pub. Nos. US20110262491, US20100104645, US20100087337 and US2012024422, each of which is herein incorporated by reference in their entirety.

[0402] In some embodiments, the synthetic nanocarrier formulations may be lyophilized by methods described in International Pub. No. WO2011072218 and U.S. Pat. No. 8,211,473; the content of each of which is herein incorporated by reference in their entirety.

[0403] In some embodiments, formulations of the present disclosure, including, but not limited to, synthetic nanocarriers, may be lyophilized or reconstituted by the methods described in US Patent Publication No. US20130230568, the contents of which are herein incorporated by reference in its entirety.

[0404] In some embodiments, the synthetic nanocarriers may comprise reactive groups to release the polynucleotides described herein (see International Pub. No. WO20120952552 and US Pub No. US20120171229, each of which is herein incorporated by reference in their entirety). In some embodiments, the synthetic nanocarriers may comprise an immuno stimulatory agent to enhance the immune response from delivery of the synthetic nanocarrier. As a non-limiting example, the synthetic nanocarrier may comprise a Th1 immuno stimulatory agent which may enhance a Th1-based response of the immune system (see International Pub No. WO2010123569 and US Pub. No. US20110223201, each of which is herein incorporated by reference in its entirety).

[0405] In some embodiments, the synthetic nanocarriers may be formulated for targeted release. In one embodiment, the synthetic nanocarrier is formulated to release the polynucleotides at a specified pH and/or after a desired time interval. As a non-limiting example, the synthetic nanoparticle may be formulated to release the nucleic acid vaccines after 24 hours and/or at a pH of 4.5 (see International Pub. Nos. WO2010138193 and WO2010138194 and US Pub Nos. US20110020388 and US20110027217, each of which is herein incorporated by reference in their entireties).

[0406] In some embodiments, the synthetic nanocarriers may be formulated for controlled and/or sustained release of the polynucleotides described herein. As a non-limiting example, the synthetic nanocarriers for sustained release may be formulated by methods known in the art, described herein and/or as described in International Pub No. WO2010138192 and US Pub No. 20100303850, each of which is herein incorporated by reference in their entirety.

[0407] In some embodiments, the nucleic acid vaccine may be formulated for controlled and/or sustained release wherein the formulation comprises at least one polymer that is a crystalline side chain (CYSC) polymer. CYSC polymers are described in U.S. Pat. No. 8,399,007, herein incorporated by reference in its entirety.

[0408] In some embodiments, the synthetic nanocarrier may be formulated for use as a vaccine. In some embodiments, the synthetic nanocarrier may encapsulate at least one polynucleotide which encode at least one antigen. As a non-limiting example, the synthetic nanocarrier may include at least one antigen and an excipient for a vaccine dosage form (see International Pub No. WO2011150264 and US Pub No. US20110293723, each of which is herein incorporated by reference in their entirety). As another non-limiting example, a vaccine dosage form may include at least two synthetic nanocarriers with the same or different antigens and an excipient (see International Pub No. WO2011150249 and US Pub No. US20110293701, each of which is herein incorporated by reference in their entirety). The vaccine dosage form may be selected by methods described herein, known in the art and/or described in International Pub No. WO2011150258 and US Pub No. US20120027806, each of which is herein incorporated by reference in their entirety).

[0409] In some embodiments, the synthetic nanocarrier may comprise at least one polynucleotide which encodes at least one adjuvant. As non-limiting example, the adjuvant may comprise dimethyldioctadecylammonium-bromide, dimethyldioctadecylammonium-chloride, dimethyldioctadecylammonium-phosphate or dimethyldioctadecylammonium-acetate (DDA) and an apolar fraction or part of said apolar fraction of a total lipid extract of a mycobacterium (See e.g, U.S. Pat. No. 8,241,610; herein incorporated by reference in its entirety).

[0410] In some embodiments, the synthetic nanocarrier may comprise at least one polynucleotide and an adjuvant. As a non-limiting example, the synthetic nanocarrier comprising and adjuvant may be formulated by the methods described in International Pub No. WO2011150240 and US Pub No. US20110293700, each of which is herein incorporated by reference in its entirety.

[0411] In some embodiments, the synthetic nanocarrier may encapsulate at least one polynucleotide which encodes a peptide, fragment or region from a virus. As a non-limiting example, the synthetic nanocarrier may include, but is not limited to, the nanocarriers described in International Pub No. WO2012024621, WO201202629, WO2012024632 and US Pub No. US20120064110, US20120058153 and US20120058154, each of which is herein incorporated by reference in their entirety.

[0412] In some embodiments, the synthetic nanocarrier may be coupled to a polynucleotide which may be able to trigger a humoral and/or cytotoxic T lymphocyte (CTL) response (See e.g., International Publication No. WO2013019669, herein incorporated by reference in its entirety).

[0413] In some embodiments, the nucleic acid vaccine may be encapsulated in, linked to and/or associated with zwitterionic lipids. Non-limiting examples of zwitterionic lipids and methods of using zwitterionic lipids are described in US Patent Publication No. US20130216607, the contents of which are herein incorporated by reference in its entirety.

[0414] In certain aspects, the zwitterionic lipids may be used in the liposomes and lipid nanoparticles described herein.

[0415] In some embodiments, the nucleic acid vaccine may be formulated in colloid nanocarriers as described in US Patent Publication No. US20130197100, the contents of which are herein incorporated by reference in its entirety.

[0416] In some embodiments, the nanoparticle may be optimized for oral administration. The nanoparticle may comprise at least one cationic biopolymer such as, but not limited to, chitosan or a derivative thereof. As a non-limiting example, the nanoparticle may be formulated by the methods described in U.S. Pub. No. 20120282343; herein incorporated by reference in its entirety.

[0417] In some embodiments, LNPs comprise the lipid KL52 (an amino-lipid disclosed in U.S. Application Publication No. 2012/0295832 incorporated herein by reference in its entirety). Activity and/or safety (as measured by examining one or more of ALT/AST, white blood cell count and cytokine induction) of LNP administration may be improved by incorporation of such lipids. LNPs comprising KL52 may be administered intravenously and/or in one or more doses. In some embodiments, administration of LNPs comprising KL52 results in equal or improved mRNA and/or protein expression as compared to LNPs comprising MC3.

### Additional Encapsulation Agents

[0418] Exemplary encapsulation agents include, but are not limited to, ethyl lauroyl arginate, ethyl myristoyl arginate, ethyl palmitoyl arginate, ethyl cholesterol-arginate, ethyl oleic arginate, ethyl capric arginate, and ethyl carprylic arginate.

[0419] In certain embodiments, the encapsulation agent is ethyl lauroyl arginate,

[chemical structure]

(ELA-1) or a salt or isomer thereof.

### Lipid Nanoparticle Size/Synthesis

[0420] The lipid nanoparticles of the present disclosure may comprise various diameters.

[0421] In some embodiments, particles may comprise a diameter less than 1000 nm. In some embodiments, the LNP particle may comprise a diameter less than 900 nm, 890 nm, 880 nm, 870 nm, 860 nm, 850 nm, 840 nm, 830 nm, 820 nm, 810 nm, 800 nm, 790 nm, 780 nm, 770 nm, 760 nm, 750 nm, 740 nm, 730 nm, 720 nm, 710 nm, 700 nm, 690 nm, 680 nm, 670 nm, 660 nm, 650 nm, 640 nm, 630 nm, 620 nm, 610 nm, 600 nm, 590 nm, 580 nm, 570 nm, 560 nm, 550 nm, 540 nm, 530 nm, 520 nm, 510 nm, 500 nm, 490 nm, 480 nm, 470 nm, 460 nm, 450 nm, 440 nm, 430 nm, 420 nm, 410 nm, 400 nm, 390 nm, 380 nm, 370 nm, 360 nm, 350 nm, 340 nm, 330 nm, 320 nm, 310 nm, 300 nm, 290 nm, 280 nm, 270 nm, 260 nm, 250 nm, 240 nm, 230 nm, 220 nm, or 210 nm.

[0422] In some embodiments, the LNP particle may comprise a diameter that is at least about 1 nm, 2 nm, 4 nm, 6 nm, 8 nm, 10 nm, 12 nm, 14 nm, 16 nm, 18 nm, 20 nm, 22 nm, 24 nm, 26 nm, 28 nm, 30 nm, 32 nm, 34 nm, 36 nm, 38 nm, 40 nm, 42 nm, 44 nm, 46 nm, 48 nm, 50 nm, 52 nm, 54 nm, 56 nm, 58 nm, 60 nm, 62 nm, 64 nm, 66 nm, 68 nm, 70 nm, 72 nm, 74 nm, 76 nm, 78 nm, 80 nm, 82 nm, 84 nm, 86 nm, 88 nm, 90 nm, 92 nm, 94 nm, 96 nm, 98 nm, 100 nm, 102 nm, 104 nm, 106 nm, 108 nm, 110 nm, 112 nm, 114 nm, 116 nm, 118 nm, 120 nm, 122 nm, 124 nm, 126 nm, 128 nm, 130 nm, 132 nm, 134 nm, 136 nm, 138 nm, 140 nm, 142 nm, 144 nm, 146 nm, 148 nm, 150 nm, 152 nm, 154 nm, 156 nm, 158 nm, 160 nm, 162 nm, 164 nm, 166 nm, 168 nm, 170 nm, 172 nm, 174 nm, 176 nm, 178 nm, 180 nm, 182 nm, 184 nm, 186 nm, 188 nm, 190 nm, 192 nm, 194 nm, 196 nm, 198 nm, or 200 nm.

[0423] In some embodiments, the LNP particle may comprise a diameter from about 1 nm to about 100 nm, from about 1 nm to about 10 nm, about 1 nm to about 20 nm, from about 1 nm to about 30 nm, from about 1 nm to about 40 nm, from about 1 nm to about 50 nm, from about 1 nm to about 60 nm, from about 1 nm to about 70 nm, from about 1 nm to about 80 nm, from about 1 nm to about 90 nm, from about 5 nm to about from 100 nm, from about 5 nm to about 10 nm, about 5 nm to about 20 nm, from about 5 nm to about 30 nm, from about 5 nm to about 40 nm, from about 5 nm to about 50 nm, from about 5 nm to about 60 nm, from about 5 nm to about 70 nm, from about 5 nm to about 80 nm, from about 5 nm to about 90 nm, about 10 to about 50 nM, from about 20 to about 50 nm, from about 30 to about 50 nm, from about 40 to about 50 nm, from about 20 to about 60 nm, from about 30 to about 60 nm, from about 40 to about 60 nm, from about 20 to about 70 nm, from about 30 to about 70 nm, from about 40 to about 70 nm, from about 50 to about 70 nm, from about 60 to about 70 nm, from about 20 to about 80 nm, from about 30 to about 80 nm, from about 40 to about 80 nm, from about 50 to about 80 nm, from about 60 to about 80 nm, from about 20 to about 90 nm, from about 30 to about 90 nm, from about 40 to about 90 nm, from about 50 to about 90 nm, from about 60 to about 90 nm, or from about 70 to about 90 nm.

[0424] In some embodiments, the nucleic acid vaccines of the invention may be formulated in lipid nanoparticles having a diameter from about 10 to about 100 nm such as, but not limited to, about 10 to about 20 nm, about 10 to about 30 nm, about 10 to about 40 nm, about 10 to about 50 nm, about 10 to about 60 nm, about 10 to about 70 nm, about 10 to about 80 nm, about 10 to about 90 nm, about 20 to about 30 nm, about 20 to about 40 nm, about 20 to about 50 nm, about 20 to about 60 nm, about 20 to about 70 nm, about 20 to about 80 nm, about 20 to about 90 nm, about 20 to about 100 nm, about 30 to about 40 nm, about 30 to about 50 nm, about 30 to about 60 nm, about 30 to about 70 nm, about 30 to about 80 nm, about 30 to about 90 nm, about 30 to about 100 nm, about 40 to about 50 nm, about 40 to about 60 nm, about 40 to about 70 nm, about 40 to about 80 nm, about 40 to about 90 nm, about 40 to about 100 nm, about 50 to about 60 nm, about 50 to about 70 nm about 50 to about 80 nm, about 50 to about 90 nm, about 50 to about 100 nm, about 60 to about 70 nm, about 60 to about 80 nm, about 60 to about 90 nm, about 60 to about 100 nm, about 70 to about 80 nm, about 70 to about 90 nm, about 70 to about 100 nm, about 80 to about 90 nm, about 80 to about 100 nm and/or about 90 to about 100 nm.

[0425] In some embodiments, the lipid nanoparticles may have a diameter from about 10 to 500 nm. In some embodiments, the lipid nanoparticle may have a diameter greater than 100 nm, greater than 150 nm, greater than 200 nm, greater than 250 nm, greater than 300 nm, greater than 350 nm, greater than 400 nm, greater than 450 nm, greater than 500 nm, greater than 550 nm, greater than 600 nm, greater than 650 nm, greater than 700 nm, greater than 750 nm, greater than 800 nm, greater than 850 nm, greater than 900 nm, greater than 950 nm or greater than 1000 nm.

[0426] In some embodiments, the LNP particle may comprise a diameter from about 50 nm to about 200 nm. In some embodiments, the LNP particle may comprise a diameter from about 80 nm to about 100 nm.

### Peptides and Proteins

[0427] The nucleic acid vaccines of the invention can be formulated with peptides and/or proteins in order to increase transfection of cells by the polynucleotide.

[0428] In some embodiments, peptides such as, but not limited to, cell penetrating peptides and proteins and peptides that enable intracellular delivery may be used to deliver pharmaceutical formulations. A non-limiting example of a cell penetrating peptide which may be used with the pharmaceutical formulations of the present invention includes a cell-penetrating peptide sequence attached to polycations that facilitates delivery to the intracellular space, e.g., HIV-derived TAT peptide, penetratins, transportans, or hCT derived cell-penetrating peptides (see, e.g., Caron et al., Mol. Ther. 3(3):310-8 (2001); Langel, Cell-Penetrating Peptides: Processes and Applications (CRC Press, Boca Raton FL, 2002); El-Andaloussi et al., Curr. Pharm. Des. 11(28):3597-611 (2003); and Deshayes et al., Cell. Mol. Life Sci. 62(16): 1839-49 (2005), all of which are incorporated herein by reference in their entirety). The compositions can also be formulated to include a cell penetrating agent, e.g., liposomes, which enhance delivery of the compositions to the intracellular space. nucleic acid vaccines of the invention may be complexed to peptides and/or proteins such as, but not limited to, peptides and/or proteins from Aileron Therapeutics (Cambridge, MA) and Permeon Biologies (Cambridge, MA) in order to enable intracellular delivery (Cronican et al., ACS Chem. Biol. 2010 5:747-752; McNaughton et al., Proc. Natl. Acad. Sci. USA 2009 106:6111-6116; Sawyer, Chem Biol Drug Des. 2009 73:3-6; Verdine and Hilinski, Methods Enzymol. 2012; 503:3-33; all of which are herein incorporated by reference in its entirety).

[0429] Formulations of the including peptides or proteins may be used to increase cell transfection by the nucleic acid vaccine, alter the biodistribution of the polynucleotide (e.g., by targeting specific tissues or cell types), and/or increase the translation of encoded protein. (See e.g., International Pub. No. WO2012110636 and WO2013123298; the contents of which are herein incorporated by reference in its entirety).

### Hyaluronidase

[0430] The intramuscular or subcutaneous localized injection of nucleic acid vaccines of the invention can include hyaluronidase, which catalyzes the hydrolysis of hyaluronan. By catalyzing the hydrolysis of hyaluronan, a constituent of the interstitial barrier, hyaluronidase lowers the viscosity of hyaluronan, thereby increasing tissue permeability (Frost, Expert Opin. Drug Deliv. (2007) 4:427-440; herein incorporated by reference in its entirety). It is useful to speed their dispersion and systemic distribution of encoded proteins produced by transfected cells. Alternatively, the hyaluronidase can be used to increase the number of cells exposed to a polynucleotide of the invention administered intramuscularly or subcutaneously.

### Nanotubes

[0431] The nucleic acid vaccines of the present disclosure can be attached or otherwise bound to at least one nanotube such as, but not limited to, rosette nanotubes, rosette nanotubes having twin bases with a linker, carbon nanotubes and/or single-walled carbon nanotubes, The nucleic acid vaccines may be bound to the nanotubes through forces such as, but not limited to, steric, ionic, covalent and/or other forces.

[0432] In some embodiments, the nanotube can release one or more nucleic acid vaccines into cells. The size and/or the surface structure of at least one nanotube may be altered so as to govern the interaction of the nanotubes within the body and/or to attach or bind to the nucleic acid vaccines disclosed herein. In one embodiment, the building block and/or the functional groups attached to the building block of the at least one nanotube may be altered to adjust the dimensions and/or properties of the nanotube. As a non-limiting example, the length of the nanotubes may be altered to hinder the nanotubes from passing through the holes in the walls of normal blood vessels but still small enough to pass through the larger holes in the blood vessels of tumor tissue.

[0433] In some embodiments, at least one nanotube may also be coated with delivery enhancing compounds including polymers, such as, but not limited to, polyethylene glycol. In another embodiment, at least one nanotube and/or the nucleic acid vaccines may be mixed with pharmaceutically acceptable excipients and/or delivery vehicles.

[0434] In some embodiments, the nucleic acid vaccines are attached and/or otherwise bound to at least one rosette nanotube. The rosette nanotubes may be formed by a process known in the art and/or by the process described in International Publication No. WO2012094304, herein incorporated by reference in its entirety. At least one nucleic acid vaccine may be attached and/or otherwise bound to at least one rosette nanotube by a process as described in International Publication No. WO2012094304, herein incorporated by reference in its entirety, where rosette nanotubes or modules forming rosette nanotubes are mixed in aqueous media with at least one nucleic acid vaccine under conditions which may cause at least one nucleic acid vaccines to attach or otherwise bind to the rosette nanotubes.

[0435] In some embodiments, the nucleic acid vaccines may be attached to and/or otherwise bound to at least one carbon nanotube. As a non-limiting example, the nucleic acid vaccines may be bound to a linking agent and the linked agent may be bound to the carbon nanotube (See e.g., U.S. Pat. No. 8,246,995; herein incorporated by reference in its entirety). The carbon nanotube may be a single-walled nanotube (See e.g., U.S. Pat. No. 8,246,995; herein incorporated by reference in its entirety).

### Conjugates

[0436] The nucleic acid vaccines of the invention include conjugates, such as a polynucleotide covalently linked to a carrier or targeting group, or including two encoding regions that together produce a fusion protein (e.g., bearing a targeting group and therapeutic protein or peptide). The conjugates of the invention include a naturally occurring substance, such as a protein (e.g., human serum albumin (HSA), low-density lipoprotein (LDL), high-density lipoprotein (HDL), or globulin); an carbohydrate (e.g., a dextran, pullulan, chitin, chitosan, inulin, cyclodextrin or hyaluronic acid); or a lipid. The ligand may also be a recombinant or synthetic molecule, such as a synthetic polymer, e.g., a synthetic polyamino acid, an oligonucleotide (e.g. an aptamer). Examples of polyamino acids include polyamino acid is a polylysine (PLL), poly L-aspartic acid, poly L-glutamic acid, styrene-maleic acid anhydride copolymer, poly(L-lactide-co-glycolied) copolymer, divinyl ether-maleic anhydride copolymer, N-(2-hydroxypropyl)methacrylamide copolymer (HMPA), polyethylene glycol (PEG), polyvinyl alcohol (PVA), polyurethane, poly(2-ethylacryllic acid), N-isopropylacrylamide polymers, or polyphosphazine. Example of polyamines include: polyethylenimine, polylysine (PLL), spermine, spermidine, polyamine, pseudopeptide-polyamine, peptidomimetic polyamine, dendrimer polyamine, arginine, amidine, protamine, cationic lipid, cationic porphyrin, quaternary salt of a polyamine, or an alpha helical peptide.

[0437] Representative U.S. patents that teach the preparation of polynucleotide conjugates, particularly to RNA, include, but are not limited to, U.S. Pat. Nos. 4,828,979; 4,948,882; 5,218,105; 5,525,465; 5,541,313; 5,545,730; 5,552,538; 5,578,717, 5,580,731; 5,591,584; 5,109,124; 5,118,802; 5,138,045; 5,414,077; 5,486,603; 5,512,439; 5,578,718; 5,608,046; 4,587,044; 4,605,735; 4,667,025; 4,762,779; 4,789,737; 4,824,941; 4,835,263; 4,876,335; 4,904,582; 4,958,013; 5,082,830; 5,112,963; 5,214,136; 5,082,830; 5,112,963; 5,214,136; 5,245,022; 5,254,469; 5,258,506; 5,262,536; 5,272,250; 5,292,873; 5,317,098; 5,371,241, 5,391,723; 5,416,203, 5,451,463; 5,510,475; 5,512,667; 5,514,785; 5,565,552; 5,567,810; 5,574,142; 5,585,481; 5,587,371; 5,595,726; 5,597,696; 5,599,923; 5,599,928 and 5,688,941; 6,294,664; 6,320,017; 6,576,752; 6,783,931; 6,900,297; 7,037,646; each of which is herein incorporated by reference in their entireties.

[0438] In some embodiments, the conjugate of the present invention may function as a carrier for the nucleic acid vaccines of the present invention. The conjugate may comprise a cationic polymer such as, but not limited to, polyamine, polylysine, polyalkylenimine, and polyethylenimine which may be grafted to with poly(ethylene glycol). As a non-limiting example, the conjugate may be similar to the polymeric conjugate and the method of synthesizing the polymeric conjugate described in U.S. Pat. No. 6,586,524 herein incorporated by reference in its entirety.

[0439] A non-limiting example of a method for conjugation to a substrate is described in US Patent Publication No. US20130211249, the contents of which are herein incorporated by reference in its entirety. The method may be used to make a conjugated polymeric particle comprising a nucleic acid vaccine.

### Excipients

[0440] Vaccines, antibodies, milk, animal feed, agents (e.g., an agent that reduces methane production in a ruminant, a probiotic bacterial strain, etc.), or other compositions of the present disclosure may comprise at least one excipient and/or carrier described herein or those known in the art (e.g., a pharmaceutically acceptable excipient and/or carrier).

[0441] A pharmaceutically acceptable excipient, which, as used herein, includes, but is not limited to, any and all solvents, dispersion media, diluents, or other liquid vehicles, dispersion or suspension aids, surface active agents, isotonic agents, thickening or emulsifying agents, preservatives, solid binders, lubricants, flavoring agents, stabilizers, antioxidants, osmolality adjusting agents, pH adjusting agents and the like, as suited to the particular dosage form desired.

[0442] In some embodiments, one or more excipients or accessory ingredients may make up greater than 50% of the total mass or volume of a pharmaceutical composition. In some embodiments, the one or more excipients or accessory ingredients may make up at least about 50%, 60%, 70%, 80%, 90%, or more of a pharmaceutical convention.

[0443] Various excipients for formulating pharmaceutical compositions and techniques for preparing the composition are known in the art (see Remington: The Science and Practice of Pharmacy, 21^{st} Edition, A. R. Gennaro (Lippincott, Williams & Wilkins, Baltimore, M D, 2006; incorporated herein by reference in its entirety).

[0444] In some embodiments, a pharmaceutically acceptable excipient may be at least 95%, at least 96%, at least 97%, at least 98%, at least 99%, or 100% pure. In some embodiments, an excipient is approved for use for humans and for veterinary use. In some embodiments, an excipient may be approved by United States Food and Drug Administration. In some embodiments, an excipient may be of pharmaceutical grade. In some embodiments, an excipient may meet the standards of the United States Pharmacopoeia (USP), the European Pharmacopoeia (EP), the British Pharmacopoeia, and/or the International Pharmacopoeia.

[0445] Pharmaceutically acceptable excipients used in the manufacture of pharmaceutical compositions include, but are not limited to, inert diluents, dispersing and/or granulating agents, surface active agents and/or emulsifiers, disintegrating agents, binding agents, preservatives, buffering agents, lubricating agents, and/or oils. Such excipients may optionally be included in pharmaceutical compositions. The composition may also include excipients such as cocoa butter and suppository waxes, coloring agents, coating agents, sweetening, flavoring, and/or perfuming agents.

[0446] Exemplary diluents include, but are not limited to, calcium carbonate, sodium carbonate, calcium phosphate, dicalcium phosphate, calcium sulfate, calcium hydrogen phosphate, sodium phosphate lactose, sucrose, cellulose, microcrystalline cellulose, kaolin, mannitol, sorbitol, inositol, sodium chloride, dry starch, cornstarch, powdered sugar, etc., and/or combinations thereof.

[0447] Exemplary granulating and/or dispersing agents include, but are not limited to, potato starch, corn starch, tapioca starch, sodium starch glycolate, clays, alginic acid, guar gum, citrus pulp, agar, bentonite, cellulose and wood products, natural sponge, cation-exchange resins, calcium carbonate, silicates, sodium carbonate, cross-linked poly(vinyl-pyrrolidone) (crospovidone), sodium carboxymethyl starch (sodium starch glycolate), carboxymethyl cellulose, cross-linked sodium carboxymethyl cellulose (croscarmellose), methylcellulose, pregelatinized starch (starch 1500), microcrystalline starch, water insoluble starch, calcium carboxymethyl cellulose, magnesium aluminum silicate (VEEGUM®), sodium lauryl sulfate, quaternary ammonium compounds, etc., and/or combinations thereof.

[0448] Exemplary surface active agents and/or emulsifiers include, but are not limited to, natural emulsifiers (e.g. acacia, agar, alginic acid, sodium alginate, tragacanth, chondrux, cholesterol, xanthan, pectin, gelatin, egg yolk, casein, wool fat, cholesterol, wax, and lecithin), colloidal clays (e.g. bentonite [aluminum silicate] and VEEGUM® [magnesium aluminum silicate]), long chain amino acid derivatives, high molecular weight alcohols (e.g. stearyl alcohol, cetyl alcohol, oleyl alcohol, triacetin monostearate, ethylene glycol distearate, glyceryl monostearate, and propylene glycol monostearate, polyvinyl alcohol), carbomers (e.g. carboxy polymethylene, polyacrylic acid, acrylic acid polymer, and carboxyvinyl polymer), carrageenan, cellulosic derivatives (e.g. carboxymethylcellulose sodium, powdered cellulose, hydroxymethyl cellulose, hydroxypropyl cellulose, hydroxypropyl methylcellulose, methylcellulose), sorbitan fatty acid esters (e.g. polyoxyethylene sorbitan monolaurate [TWEEN®20], polyoxyethylene sorbitan [TWEEN®60], polyoxyethylene sorbitan monooleate [TWEEN®80], sorbitan monopalmitate [SPAN®40], sorbitan monostearate [SPAN®60], sorbitan tristearate [SPAN®65], glyceryl monooleate, sorbitan monooleate [SPAN®80]), polyoxyethylene esters (e.g. polyoxyethylene monostearate [MYRJ©45], polyoxyethylene hydrogenated castor oil, polyethoxylated castor oil, polyoxymethylene stearate, and SOLUTOL®), sucrose fatty acid esters, polyethylene glycol fatty acid esters (e.g. CREMOPHOR®), polyoxyethylene ethers, (e.g. polyoxyethylene lauryl ether [BRU®30]), poly(vinyl-pyrrolidone), diethylene glycol monolaurate, triethanolamine oleate, sodium oleate, potassium oleate, ethyl oleate, oleic acid, ethyl laurate, sodium lauryl sulfate, PLUORINC®F 68, POLOXAMER®188, cetrimonium bromide, cetylpyridinium chloride, benzalkonium chloride, docusate sodium, etc. and/or combinations thereof.

[0449] Exemplary binding agents include, but are not limited to, starch (e.g. cornstarch and starch paste); gelatin; sugars (e.g. sucrose, glucose, dextrose, dextrin, molasses, lactose, lactitol, mannitol); amino acids (e.g., glycine); natural and synthetic gums (e.g. acacia, sodium alginate, extract of Irish moss, panwar gum, ghatti gum, mucilage of isapol husks, carboxymethylcellulose, methylcellulose, ethylcellulose, hydroxyethylcellulose, hydroxypropyl cellulose, hydroxypropyl methylcellulose, microcrystalline cellulose, cellulose acetate, poly(vinyl-pyrrolidone), magnesium aluminum silicate (VEEGUM®), and larch arabogalactan); alginates; polyethylene oxide; polyethylene glycol; inorganic calcium salts; silicic acid; polymethacrylates; waxes; water; alcohol; etc.; and/or combinations thereof.

[0450] Exemplary preservatives may include, but are not limited to, antioxidants, chelating agents, antimicrobial preservatives, antifungal preservatives, alcohol preservatives, acidic preservatives, and/or other preservatives. Oxidation is a potential degradation pathway for mRNA, especially for liquid mRNA formulations. In order to prevent oxidation, antioxidants can be added to the formulation. Exemplary antioxidants include, but are not limited to, alpha tocopherol, ascorbic acid, acorbyl palmitate, benzyl alcohol, butylated hydroxyanisole, EDTA, m-cresol, methionine, butylated hydroxytoluene, monothioglycerol, potassium metabisulfite, propionic acid, propyl gallate, sodium ascorbate, sodium bisulfite, sodium metabisulfite, thioglycerol and/or sodium sulfite. Exemplary chelating agents include ethylenediaminetetraacetic acid (EDTA), citric acid monohydrate, disodium edetate, dipotassium edetate, edetic acid, fumaric acid, malic acid, phosphoric acid, sodium edetate, tartaric acid, and/or trisodium edetate. Exemplary antimicrobial preservatives include, but are not limited to, benzalkonium chloride, benzethonium chloride, benzyl alcohol, bronopol, cetrimide, cetylpyridinium chloride, chlorhexidine, chlorobutanol, chlorocresol, chloroxylenol, cresol, ethyl alcohol, glycerin, hexetidine, imidurea, phenol, phenoxyethanol, phenylethyl alcohol, phenylmercuric nitrate, propylene glycol, and/or thimerosal. Exemplary antifungal preservatives include, but are not limited to, butyl paraben, methyl paraben, ethyl paraben, propyl paraben, benzoic acid, hydroxybenzoic acid, potassium benzoate, potassium sorbate, sodium benzoate, sodium propionate, and/or sorbic acid. Exemplary alcohol preservatives include, but are not limited to, ethanol, polyethylene glycol, phenol, phenolic compounds, bisphenol, chlorobutanol, hydroxybenzoate, and/or phenylethyl alcohol. Exemplary acidic preservatives include, but are not limited to, vitamin A, vitamin C, vitamin E, beta-carotene, citric acid, acetic acid, dehydroacetic acid, ascorbic acid, sorbic acid, and/or phytic acid. Other preservatives include, but are not limited to, tocopherol, tocopherol acetate, deteroxime mesylate, cetrimide, butylated hydroxyanisol (BHA), butylated hydroxytoluened (BHT), ethylenediamine, sodium lauryl sulfate (SLS), sodium lauryl ether sulfate (SLES), sodium bisulfite, sodium metabisulfite, potassium sulfite, potassium metabisulfite, GLYDANT PLUS®, PHENONIP®, methylparaben, GERMALL®115, GERMABEN®!!, NEOLONE™, KATHON™, and/or EUXYL®.

[0451] In some embodiments, the pH of the nucleic acid vaccine solutions are maintained between pH 5 and pH 8 to improve stability. Exemplary buffers to control pH may include, but are not limited to sodium phosphate, sodium citrate, sodium succinate, histidine (or histidine-HCl), sodium carbonate, and/or sodium malate. In another embodiment, the exemplary buffers listed above may be used with additional monovalent counterions (including, but not limited to potassium). Divalent cations may also be used as buffer counterions; however, these are not preferred due to complex formation and/or mRNA degradation.

[0452] Exemplary buffering agents may also include, but are not limited to, citrate buffer solutions, acetate buffer solutions, phosphate buffer solutions, ammonium chloride, calcium carbonate, calcium chloride, calcium citrate, calcium glubionate, calcium gluceptate, calcium gluconate, D-gluconic acid, calcium glycerophosphate, calcium lactate, propanoic acid, calcium levulinate, pentanoic acid, dibasic calcium phosphate, phosphoric acid, tribasic calcium phosphate, calcium hydroxide phosphate, potassium acetate, potassium chloride, potassium gluconate, potassium mixtures, dibasic potassium phosphate, monobasic potassium phosphate, potassium phosphate mixtures, sodium acetate, sodium bicarbonate, sodium chloride, sodium citrate, sodium lactate, dibasic sodium phosphate, monobasic sodium phosphate, sodium phosphate mixtures, tromethamine, magnesium hydroxide, aluminum hydroxide, alginic acid, pyrogen-free water, isotonic saline, Ringer's solution, ethyl alcohol, etc., and/or combinations thereof.

[0453] Exemplary lubricating agents include, but are not limited to, magnesium stearate, calcium stearate, stearic acid, silica, talc, malt, glyceryl behanate, hydrogenated vegetable oils, polyethylene glycol, sodium benzoate, sodium acetate, sodium chloride, leucine, magnesium lauryl sulfate, sodium lauryl sulfate, etc., and/or combinations thereof.

[0454] Exemplary oils include, but are not limited to, almond, apricot kernel, avocado, babassu, bergamot, black current seed, borage, cade, camomile, canola, caraway, carnauba, castor, cinnamon, cocoa butter, coconut, cod liver, coffee, corn, cotton seed, emu, eucalyptus, evening primrose, fish, flaxseed, geraniol, gourd, grape seed, hazel nut, hyssop, isopropyl myristate, jojoba, kukui nut, lavandin, lavender, lemon, litsea cubeba, macademia nut, mallow, mango seed, meadowfoam seed, mink, nutmeg, olive, orange, orange roughy, palm, palm kernel, peach kernel, peanut, poppy seed, pumpkin seed, rapeseed, rice bran, rosemary, safflower, sandalwood, sasquana, savoury, sea buckthorn, sesame, shea butter, silicone, soybean, sunflower, tea tree, thistle, tsubaki, vetiver, walnut, and wheat germ oils. Exemplary oils include, but are not limited to, butyl stearate, caprylic triglyceride, capric triglyceride, cyclomethicone, diethyl sebacate, dimethicone 360, isopropyl myristate, mineral oil, octyldodecanol, oleyl alcohol, silicone oil, and/or combinations thereof.

[0455] Excipients such as cocoa butter and suppository waxes, coloring agents, coating agents, sweetening, flavoring, and/or perfuming agents can be present in the composition.

[0456] Exemplary additives include physiologically biocompatible buffers (e.g., trimethylamine hydrochloride), addition of chelants (such as, for example, DTPA or DTPA-bisamide) or calcium chelate complexes (as for example calcium DTPA, CaNaDTPA-bisamide), or, optionally, additions of calcium or sodium salts (for example, calcium chloride, calcium ascorbate, calcium gluconate or calcium lactate). In addition, antioxidants and suspending agents can be used.

### Cryoprotectants

[0457] In some embodiments, the lipid nanoparticles and/or pharmaceutical compositions of the disclosure are refrigerated or frozen for storage and/or shipment (e.g., being stored at a temperature of 4° C. or lower, such as a temperature between about −150° C. and about 0° C. or between about −80° C. and about −20° C. (e.g., about −5° C., −10° C., −15° C., −20° C., −25° C., −30° C., −40° C., −50° C., −60° C., −70° C., −80° C., −90° C., −130° C. or −150° C.). For example, the pharmaceutical composition comprising one or more lipid nanoparticles is a solution or solid (e.g., via lyophilization) that is refrigerated for storage and/or shipment at, for example, about ˜20° C., −30° C., −40° C., −50° C., −60° C., −70° C., or −80° C. In certain embodiments, the disclosure also relates to a method of increasing stability of the lipid nanoparticles and by storing the lipid nanoparticles and/or pharmaceutical compositions thereof at a temperature of 4° C. or lower, such as a temperature between about −150° C. and about 0° C. or between about −80° C. and about −20° C., e.g., about −5° C., −10° C., −15° C., −20° C., −25° C., −30° C., −40° C., −50° C., −60° C., −70° C., −80° C., −90° C., −130° C. or −150C).

[0458] In some embodiments, nucleic acid vaccine formulations may comprise cyroprotectants. As used herein, there term “cryoprotectant” refers to one or more agent that when combined with a given substance, helps to reduce or eliminate damage to that substance that occurs upon freezing. In some embodiments, cryoprotectants are combined with nucleic acid vaccines in order to stabilize them during freezing. Frozen storage of nucleic acid vaccines between −20° C. and −80° C. may be advantageous for long term (e.g. 36 months) stability of polynucleotide. In some embodiments, cryoprotectants are included in nucleic acid vaccine formulations to stabilize polynucleotide through freeze/thaw cycles and under frozen storage conditions. Cryoprotectants of the present invention may include, but are not limited to sucrose, trehalose, lactose, glycerol, dextrose, raffinose and/or mannitol. Trehalose is listed by the Food and Drug Administration as being generally regarded as safe (GRAS) and is commonly used in commercial pharmaceutical formulations.

### Bulking Agents

[0459] In some embodiments, nucleic acid vaccine formulations may comprise bulking agents. As used herein, the term “bulking agent” refers to one or more agents included in formulations to impart a desired consistency to the formulation and/or stabilization of formulation components.

[0460] In some embodiments, bulking agents are included in lyophilized nucleic acid vaccine formulations to yield a “pharmaceutically elegant” cake, stabilizing the lyophilized nucleic acid vaccines during long term (e.g. 36 month) storage. Bulking agents of the present invention may include, but are not limited to sucrose, trehalose, mannitol, glycine, lactose and/or raffinose. In some embodiments, combinations of cryoprotectants and bulking agents (for example, sucrose/glycine or trehalose/mannitol) may be included to both stabilize nucleic acid vaccines during freezing and provide a bulking agent for lyophilization.

[0461] Non-limiting examples of formulations and methods for formulating the nucleic acid vaccines of the present invention are also provided in International Publication No WO2013090648 filed Dec. 14, 2012, the contents of which are incorporated herein by reference in their entirety.

### Inactive Ingredients

[0462] In some embodiments, nucleic acid vaccine formulations may comprise at least one excipient which is an inactive ingredient. As used herein, the term “inactive ingredient” refers to one or more inactive agents included in formulations. Exemplary non-exhaustive lists of inactive ingredients and the routes of administration the inactive ingredients may be formulated in are described in Tables 6B and 7.

TABLE 6B
Exemplary Inactive Ingredients

| Inactive Ingredient | Route of Administration |
|---|---|
| Alpha-Terpineol | Topical |
| Alpha-Tocopherol | Intravenous; Topical |
| Alpha-Tocopherol Acetate, Dl- | Topical |
| Alpha-Tocopherol, Dl- | Intravenous; Topical |
| 1,2,6-Hexanetriol | Topical |
| 1,2-Dimyristoyl-Sn-Glycero-3-(Phospho-S- | Intravenous; Infusion (IV) |
| (1-Glycerol)) | |
| 1,2-Dimyristoyl-Sn-Glycero-3- | Intravenous; Infusion (IV) |
| Phosphocholine | |
| 1,2-Dioleoyl-Sn-Glycero-3-Phosphocholine | Epidural |
| 1,2-Dipalmitoyl-Sn-Glycero-3-(Phospho- | Epidural |
| Rac-(1-Glycerol)) | |
| 1,2-Distearoyl-Sn-Glycero-3-(Phospho-Rac- | Intravenous |
| (1-Glycerol)) | |
| 1,2-Distearoyl-Sn-Glycero-3-Phosphocholine | Intravenous |
| 1-O-Tolylbiguanide | Topical |

TABLE 7
Exemplary Inactive Ingredients

| Route of Administration | Inactive Ingredient |
|---|---|
| Intrathecal (AN, CNBLK) | Acetone Sodium Bisulfite; Citric Acid; Hydrochloric Acid; Sodium |
| | Chloride; Sodium Hydroxide; Sodium Metabisulfite |
| Infiltration (AN) | Acetic Acid; Acetone Sodium Bisulfite; Ascorbic Acid; Benzyl |
| | Alcohol; Calcium Chloride; Carbon Dioxide; Chlorobutanol; Citric |
| | Acid; Citric Acid Monohydrate; Edetate Calcium Disodium; Edetate |
| | Disodium; Hydrochloric Acid; Hydrochloric Acid, Diluted; Lactic Acid; |
| | Methylparaben; Monothioglycerol; Nitrogen; Potassium Chloride; |
| | Potassium Metabisulfite; Potassium Phosphate, Monobasic; |
| | Propylparaben; Sodium Bisulfite; Sodium Carbonate; Sodium Chlorate; |
| | Sodium Chloride; Sodium Citrate; Sodium Hydroxide; Sodium Lactate; |
| | Sodium Metabisulfite; Sodium Phosphate, Dibasic, Heptahydrate |
| Sympathetic NBLK (AN) | Hydrochloric Acid; Sodium Chloride; Sodium Hydroxide |
| Auricular (Otic) | Acetic Acid; Aluminum Acetate; Aluminum Sulfate Anhydrous; |
| | Benzalkonium Chloride; Benzethonium Chloride; Benzyl Alcohol; |
| | Boric Acid; Calcium Carbonate; Cetyl Alcohol; Chlorobutanol; |
| | Chloroxylenol; Citric Acid; Creatinine; Cupric Sulfate; Cupric Sulfate |
| | Anhydrous; Edetate Disodium; Edetic Acid; Glycerin; Glyceryl |
| | Stearate; Hydrochloric Acid; Hydrocortisone; Hydroxyethyl Cellulose; |
| | Isopropyl Myristate; Lactic Acid; Lecithin, Hydrogenated; |
| | Methylparaben; Mineral Oil; Petrolatum; Petrolatum, White; |
| | Phenylethyl Alcohol; Polyoxyl 40 Stearate; Polyoxyl Stearate; |
| | Polysorbate 20; Polysorbate 80; Polyvinyl Alcohol; Potassium |
| | Metabisulfite; Potassium Phosphate, Monobasic; Povidone K90f; |
| | Povidones; Propylene Glycol; Propylene Glycol Diacetate; |
| | Propylparaben; Sodium Acetate; Sodium Bisulfite; Sodium Borate; |
| | Sodium Chloride; Sodium Citrate; Sodium Hydroxide; Sodium |
| | Phosphate, Dibasic, Anhydrous; Sodium Phosphate, Dibasic, |
| | Heptahydrate; Sodium Phosphate, Monobasic, Anhydrous; Sodium |

[0463] In Table 7, “AN” means anesthetic, “CNBLK” means cervical nerve block, “NBLK” means nerve block, and “IV” means intravenous.

### Naked Delivery

[0464] The nucleic acid vaccines of the present invention may be delivered to a cell naked or in saline. As used herein in, “naked” refers to delivering nucleic acid vaccines free from agents which promote transfection. The naked nucleic acid vaccines may be delivered to the cell using routes of administration known in the art and described herein.

### Formulated Delivery

[0465] The nucleic acid vaccines of the present invention may be formulated, using the methods described herein. The formulations may comprise polynucleotides which may be modified and/or unmodified. The formulations may further comprise, but are not limited to, cell penetration agents, a pharmaceutically acceptable carrier, a delivery agent, a bioerodible or biocompatible polymer, a solvent, and a sustained-release delivery depot. The formulated nucleic acid vaccines may be delivered to the cell using routes of administration known in the art and described herein. The compositions may also be formulated for direct delivery to an organ or tissue in any of several ways in the art including, but not limited to, direct soaking, via a catheter, by gels, powder, ointments, creams, gels, lotions, and/or drops, by using substrates such as fabric or biodegradable materials coated or impregnated with the compositions, and the like.

### Administration

[0466] Vaccines, antibodies, milk, animal feed, agents (e.g., an agent that reduces methane production in a ruminant, a probiotic bacterial strain, a small molecule inhibitor, etc.), or other compositions of the present disclosure (e.g., those reducing methane production in a ruminant) may be administered to a ruminant by any route which results in a therapeutically effective outcome. These include, but are not limited to, enteral (into the intestine), gastroenteral, epidural (into the dura matter), oral (by way of the mouth), transdermal, peridural, intracerebral (into the cerebrum), intracerebroventricular (into the cerebral ventricles), epicutaneous (application onto the skin), intradermal, (into the skin itself), subcutaneous (under the skin), nasal administration (through the nose), intravenous (into a vein), intravenous bolus, intravenous drip, intraarterial (into an artery), intramuscular (into a muscle), intracardiac (into the heart), intraosseous infusion (into the bone marrow), intrathecal (into the spinal canal), intraperitoneal, (infusion or injection into the peritoneum), intravesical infusion, intravitreal, (through the eye), intracavernous injection (into a pathologic cavity) intracavitary (into the base of the penis), intravaginal administration, intrauterine, extra-amniotic administration, transdermal (diffusion through the intact skin for systemic distribution), transmucosal (diffusion through a mucous membrane), transvaginal, insufflation (snorting), sublingual, sublabial, enema, eye drops (onto the conjunctiva), in ear drops, auricular (in or by way of the ear), buccal (directed toward the cheek), conjunctival, cutaneous, dental (to a tooth or teeth), electro-osmosis, endocervical, endosinusial, endotracheal, extracorporeal, hemodialysis, infiltration, interstitial, intra-abdominal, intra-amniotic, intra-articular, intrabiliary, intrabronchial, intrabursal, intracartilaginous (within a cartilage), intracaudal (within the cauda equine), intracisternal (within the cisterna magna cerebellomedularis), intracorneal (within the cornea), dental intracornal, intracoronary (within the coronary arteries), intracorporus cavernosum (within the dilatable spaces of the corporus cavernosa of the penis), intradiscal (within a disc), intraductal (within a duct of a gland), intraduodenal (within the duodenum), intradural (within or beneath the dura), intraepidermal (to the epidermis), intraesophageal (to the esophagus), intragastric (within the stomach), intragingival (within the gingivae), intraileal (within the distal portion of the small intestine), intralesional (within or introduced directly to a localized lesion), intraluminal (within a lumen of a tube), intralymphatic (within the lymph), intramedullary (within the marrow cavity of a bone), intrameningeal (within the meninges), intraocular (within the eye), intraovarian (within the ovary), intrapericardial (within the pericardium), intrapleural (within the pleura), intrapro static (within the prostate gland), intrapulmonary (within the lungs or its bronchi), intrasinal (within the nasal or periorbital sinuses), intraspinal (within the vertebral column), intrasynovial (within the synovial cavity of a joint), intratendinous (within a tendon), intratesticular (within the testicle), intrathecal (within the cerebrospinal fluid at any level of the cerebrospinal axis), intrathoracic (within the thorax), intratubular (within the tubules of an organ), intratumor (within a tumor), intratympanic (within the auras media), intravascular (within a vessel or vessels), intraventricular (within a ventricle), iontophoresis (by means of electric current where ions of soluble salts migrate into the tissues of the body), irrigation (to bathe or flush open wounds or body cavities), laryngeal (directly upon the larynx), nasogastric (through the nose and into the stomach), occlusive dressing technique, ophthalmic (to the external eye), oropharyngeal (directly to the mouth and pharynx), parenteral, percutaneous, periarticular, peridural, perineural, periodontal, rectal, respiratory (within the respiratory tract by inhaling orally or nasally for local or systemic effect), retrobulbar (behind the pons or behind the eyeball), intramyocardial (entering the myocardium), soft tissue, subarachnoid, subconjunctival, submucosal, transplacental (through or across the placenta), transtracheal (through the wall of the trachea), transtympanic (across or through the tympanic cavity), ureteral (to the ureter), urethral (to the urethra), vaginal, caudal block, diagnostic, nerve block, biliary perfusion, cardiac perfusion, photopheresis or spinal. In specific embodiments, compositions may be administered in a way which allows them cross the blood-brain barrier, vascular barrier, or other epithelial barrier.

[0467] Non-limiting routes of administration for the nucleic acid vaccines of the present disclosure are described below.

### Parenteral and Injectable Administration

[0468] Liquid dosage forms for parenteral administration include, but are not limited to, pharmaceutically acceptable emulsions, microemulsions, solutions, suspensions, syrups, and/or elixirs. In addition to active ingredients, liquid dosage forms may comprise inert diluents commonly used in the art such as, for example, water or other solvents, solubilizing agents and emulsifiers such as ethyl alcohol, isopropyl alcohol, ethyl carbonate, ethyl acetate, benzyl alcohol, benzyl benzoate, propylene glycol, 1,3-butylene glycol, dimethylformamide, oils (in particular, cottonseed, groundnut, corn, germ, olive, castor, and sesame oils), glycerol, tetrahydrofurfuryl alcohol, polyethylene glycols and fatty acid esters of sorbitan, and mixtures thereof. Besides inert diluents, oral compositions can include adjuvants such as wetting agents, emulsifying and suspending agents, sweetening, flavoring, and/or perfuming agents. In certain embodiments for parenteral administration, compositions are mixed with solubilizing agents such as CREMOPHOR®, alcohols, oils, modified oils, glycols, polysorbates, cyclodextrins, polymers, and/or combinations thereof.

[0469] A pharmaceutical composition for parenteral administration may comprise at least one inactive ingredient. A non-exhaustive list of inactive ingredients for use in pharmaceutical compositions for parenteral administration includes hydrochloric acid, mannitol, nitrogen, sodium acetate, sodium chloride and sodium hydroxide. Injectable preparations, for example, sterile injectable aqueous or oleaginous suspensions may be formulated according to the known art using suitable dispersing agents, wetting agents, and/or suspending agents. Sterile injectable preparations may be sterile injectable solutions, suspensions, and/or emulsions in nontoxic parenterally acceptable diluents and/or solvents, for example, as a solution in 1,3-butanediol. Among the acceptable vehicles and solvents that may be employed are water, Ringer's solution, U.S. P., and isotonic sodium chloride solution. Sterile, fixed oils are conventionally employed as a solvent or suspending medium. For this purpose any bland fixed oil can be employed including synthetic mono- or diglycerides. Fatty acids such as oleic acid can be used in the preparation of injectables. The sterile formulation may also comprise adjuvants such as local anesthetics, preservatives and buffering agents.

[0470] Injectable formulations can be sterilized, for example, by filtration through a bacterial-retaining filter, and/or by incorporating sterilizing agents in the form of sterile solid compositions which can be dissolved or dispersed in sterile water or other sterile injectable medium prior to use.

[0471] Injectable formulations may be for direct injection into a region of a tissue, organ and/or subject. As a non-limiting example, a tissue, organ and/or subject may be directly injected a formulation by intramyocardial injection into the ischemic region. (See e.g., Zangi et al. Nature Biotechnology 2013; the contents of which are herein incorporated by reference in its entirety).

[0472] In order to prolong the effect of an active ingredient, it is often desirable to slow the absorption of the active ingredient from subcutaneous or intramuscular injection. This may be accomplished by the use of a liquid suspension of crystalline or amorphous material with poor water solubility. The rate of absorption of the drug then depends upon its rate of dissolution which, in turn, may depend upon crystal size and crystalline form. Alternatively, delayed absorption of a parenterally administered drug form is accomplished by dissolving or suspending the drug in an oil vehicle. Injectable depot forms are made by forming microencapsule matrices of the drug in biodegradable polymers such as polylactide-polyglycolide. Depending upon the ratio of drug to polymer and the nature of the particular polymer employed, the rate of drug release can be controlled. Examples of other biodegradable polymers include poly(orthoesters) and poly(anhydrides). Depot injectable formulations are prepared by entrapping the drug in liposomes or microemulsions which are compatible with body tissues.

### Rectal and Vaginal Administration

[0473] Compositions for rectal or vaginal (e.g., transvaginal) administration are typically suppositories which can be prepared by mixing compositions with suitable non-irritating excipients such as cocoa butter, polyethylene glycol or a suppository wax which are solid at ambient temperature but liquid at body temperature and therefore melt in the rectum or vaginal cavity and release the active ingredient.

[0474] As a non-limiting example, the formulations for rectal and/or vaginal administration may be prepared by mixing the drug with a suitable non-irritating excipient that is solid at ordinary temperatures but liquid at the rectal temperature and will therefore melt in the rectum and/or vagina to release the drug. Such materials include cocoa butter and polyethylene glycols. A pharmaceutical composition for rectal administration may comprise at least one inactive ingredient. A non-exhaustive list of inactive ingredients for use in pharmaceutical compositions for rectal administration includes alcohol, alcohol, dehydrated, aluminum subacetate, anhydrous citric acid, aniseed oil, ascorbic acid, ascorbyl palmitate, balsam peru, benzoic acid, benzyl alcohol, bismuth subgallate, butylated hydroxyanisole, butylated hydroxytoluene, butylparaben, caramel, carbomer 934, carbomer 934p, carboxypolymethylene, cerasynt-se, cetyl alcohol, cocoa butter, coconut oil, hydrogenated, coconut oil/palm kernel oil glycerides, hydrogenated, cola nitida seed extract, d&c yellow no. 10, dichlorodifluoromethane, dichlorotetrafluoroethane, dimethyldioctadecylammonium bentonite, edetate calcium disodium, edetate disodium, edetic acid, epilactose, ethylenediamine, fat, edible, fat, hard, fd&c blue no. 1, fd&c green no. 3, fd&c yellow no. 6, flavor FIG. 827118, flavor raspberry pfc-8407, fructose, galactose, glycerin, glyceryl palmitate, glyceryl stearate, glyceryl stearate/peg stearate, glyceryl stearate/peg-40 stearate, glycine, hydrocarbon, hydrochloric acid, hydrogenated palm oil, hypromelloses, lactose, lanolin, lecithin, light mineral oil, magnesium aluminum silicate, magnesium aluminum silicate hydrate, methylparaben, nitrogen, palm kernel oil, paraffin, petrolatum, white, polyethylene glycol 1000, polyethylene glycol 1540, polyethylene glycol 3350, polyethylene glycol 400, polyethylene glycol 4000, polyethylene glycol 6000, polyethylene glycol 8000, polysorbate 60, polysorbate 80, potassium acetate, potassium metabisulfite, propylene glycol, propylparaben, saccharin sodium, saccharin sodium anhydrous, silicon dioxide, colloidal, simethicone, sodium benzoate, sodium carbonate, sodium chloride, sodium citrate, sodium hydroxide, sodium metabisulfite, sorbitan monooleate, sorbitan sesquioleate, sorbitol, sorbitol solution, starch, steareth-10, steareth-40, sucrose, tagatose, d-, tartaric acid, dl-, trolamine, tromethamine, vegetable oil glyceride, hydrogenated, vegetable oil, hydrogenated, wax, emulsifying, white wax, xanthan gum and zinc oxide.

[0475] A pharmaceutical composition for vaginal administration may comprise at least one inactive ingredient. Any or none of the inactive ingredients used may have been approved by the US Food and Drug Administration (FDA). A non-exhaustive list of inactive ingredients for use in pharmaceutical compositions for vaginal administration includes adipic acid, alcohol, denatured, allantoin, anhydrous lactose, apricot kernel oil peg-6 esters, barium sulfate, beeswax, bentonite, benzoic acid, benzyl alcohol, butylated hydroxyanisole, butylated hydroxytoluene, calcium lactate, carbomer 934, carbomer 934p, cellulose, microcrystalline, ceteth-20, cetostearyl alcohol, cetyl alcohol, cetyl esters wax, cetyl palmitate, cholesterol, choleth, citric acid, citric acid monohydrate, coconut oil/palm kernel oil glycerides, hydrogenated, crospovidone, edetate disodium, ethylcelluloses, ethylene-vinyl acetate copolymer (28% vinyl acetate), ethylene-vinyl acetate copolymer (9% vinylacetate), fatty alcohols, fd&c yellow no. 5, gelatin, glutamic acid, dl-, glycerin, glyceryl isostearate, glyceryl monostearate, glyceryl stearate, guar gum, high density polyethylene, hydrogel polymer, hydrogenated palm oil, hypromellose 2208 (15000 mpa·s), hypromelloses, isopropyl myristate, lactic acid, lactic acid, dl-, lactose, lactose monohydrate, lactose, hydrous, lanolin, lanolin anhydrous, lecithin, lecithin, soybean, light mineral oil, magnesium aluminum silicate, magnesium aluminum silicate hydrate, magnesium stearate, methyl stearate, methylparaben, microcrystalline wax, mineral oil, nitric acid, octyldodecanol, peanut oil, peg 6-32 stearate/glycol stearate, peg-100 stearate, peg-120 glyceryl stearate, peg-2 stearate, peg-5 oleate, pegoxol 7 stearate, petrolatum, white, phenylmercuric acetate, phospholipon 90 g, phosphoric acid, piperazine hexahydrate, poly(dimethylsiloxane/methylvinylsiloxane/methylhydrogensiloxane) dimethylvinyl or dimethylhydroxy or trimethyl endblocked, polycarbophil, polyester, polyethylene glycol 1000, polyethylene glycol 3350, polyethylene glycol 400, polyethylene glycol 4000, polyethylene glycol 6000, polyethylene glycol 8000, polyglyceryl-3 oleate, polyglyceryl-4 oleate, polyoxyl palmitate, polysorbate 20, polysorbate 60, polysorbate 80, polyurethane, potassium alum, potassium hydroxide, povidone k29/32, povidones, promulgen d, propylene glycol, propylene glycol monopalmitostearate, propylparaben, quaternium-15 cis-form, silicon dioxide, silicon dioxide, colloidal, silicone, sodium bicarbonate, sodium citrate, sodium hydroxide, sodium lauryl sulfate, sodium metabisulfite, sodium phosphate, dibasic, anhydrous, sodium phosphate, monobasic, anhydrous, sorbic acid, sorbitan monostearate, sorbitol, sorbitol solution, spermaceti, stannous 2-ethylhexanoate, starch, starch 1500, pregelatinized, starch, corn, stearamidoethyl diethylamine, stearic acid, stearyl alcohol, tartaric acid, dl-, tert-butylhydroquinone, tetrapropyl orthosilicate, trolamine, urea, vegetable oil, hydrogenated, wecobee fs, white ceresin wax and white wax.

### Oral Administration

[0476] Liquid dosage forms for oral administration include, but are not limited to, pharmaceutically acceptable emulsions, microemulsions, solutions, suspensions, syrups, and/or elixirs. In addition to active ingredients, liquid dosage forms may comprise inert diluents and/or excipients commonly used in the art such as, for example, water or other solvents, solubilizing agents and emulsifiers such as ethyl alcohol, isopropyl alcohol, ethyl carbonate, ethyl acetate, benzyl alcohol, benzyl benzoate, propylene glycol, 1,3-butylene glycol, dimethylformamide, oils (in particular, cottonseed, groundnut, corn, germ, olive, castor, and sesame oils), glycerol, tetrahydrofurfuryl alcohol, polyethylene glycols and fatty acid esters of sorbitan, and mixtures thereof. Besides inert diluents, oral compositions can include adjuvants such as wetting agents, emulsifying and suspending agents, sweetening, flavoring, and/or perfuming agents. In certain embodiments for parenteral administration, compositions are mixed with solubilizing agents such as CREMOPHOR®, alcohols, oils, modified oils, glycols, polysorbates, cyclodextrins, polymers, and/or combinations thereof.

[0477] Syrups and elixirs can be formulated with sweetening agents, for example glycerol, propylene glycol, sorbitol, glucose or sucrose. Such formulations can also contain a demulcent, a preservative and flavoring and coloring agents. The pharmaceutical compositions can be in the form of a sterile injectable aqueous or oleaginous suspension. This suspension can be formulated according to the known art using those suitable dispersing or wetting agents and suspending agents that have been mentioned above. The sterile injectable preparation can also be a sterile injectable solution or suspension in a non-toxic parentally acceptable diluent or solvent, for example as a solution in 1,3-butanediol. Among the acceptable vehicles and solvents that can be employed are water, Ringer's solution and isotonic sodium chloride solution. In addition, sterile, fixed oils are conventionally employed as a solvent or suspending medium. For this purpose, any bland fixed oil can be employed including synthetic mono- or diglycerides. In addition, fatty acids such as oleic acid find use in the preparation of injectables.

[0478] Suspensions for oral dosage may contain the active materials in a mixture with excipients suitable for the manufacture of aqueous suspensions. Such excipients may be suspending agents, as a non-limiting example the suspending agents may be sodium carboxymethylcellulose, methylcellulose, hydropropyl-methylcellulose, sodium alginate, polyvinylpyrrolidone, gum tragacanth and gum acacia; dispersing or wetting agents can be a naturally-occurring phosphatide, for example, lecithin, or condensation products of an alkylene oxide with fatty acids, for example polyoxyethylene stearate; or condensation products of ethylene oxide with long chain aliphatic alcohols, for example heptadecaethyleneoxycetanol, or condensation products of ethylene oxide with partial esters derived from fatty acids and a hexitol such as polyoxyethylene sorbitol monooleate, or condensation products of ethylene oxide with partial esters derived from fatty acids and hexitol anhydrides, for example polyethylene sorbitan monooleate. The aqueous suspensions may also contain one or more preservatives, for example ethyl, or n-propyl p-hydroxybenzoate, one or more coloring agents, one or more flavoring agents, and one or more sweetening agents, such as sucrose or saccharin.

[0479] Oily suspensions for oral dosage can be formulated by suspending the active ingredients in a vegetable oil, for example arachis oil, olive oil, sesame oil or coconut oil, or in a mineral oil such as liquid paraffin. The oily suspensions can contain a thickening agent, for example beeswax, hard paraffin or cetyl alcohol. Sweetening agents and flavoring agents can be added to provide palatable oral preparations. These compositions can be preserved by the addition of an anti-oxidant such as ascorbic acid.

[0480] The oral dosage may also be in the form of oil-in-water emulsions. The oily phase can be a vegetable oil or a mineral oil or mixtures of these. Suitable emulsifying agents can be naturally-occurring gums, for example gum acacia or gum tragacanth, naturally-occurring phosphatides, for example soy bean, lecithin, and esters or partial esters derived from fatty acids and hexitol, anhydrides, for example sorbitan monooleate, and condensation products of the said partial esters with ethylene oxide, for example polyoxyethylene sorbitan monooleate. The emulsions may also contain sweetening and flavoring agents.

[0481] Solid dosage forms for oral administration include capsules, tablets, pills, powders, and granules. In such solid dosage forms, an active ingredient is mixed with at least one inert, pharmaceutically acceptable excipient such as sodium citrate or dicalcium phosphate and/or fillers or extenders (e.g. starches, lactose, sucrose, glucose, mannitol, and silicic acid), binders (e.g. carboxymethylcellulose, alginates, gelatin, polyvinylpyrrolidinone, sucrose, and acacia), humectants (e.g. glycerol), disintegrating agents (e.g. agar, calcium carbonate, potato or tapioca starch, alginic acid, certain silicates, and sodium carbonate), solution retarding agents (e.g. paraffin), absorption accelerators (e.g. quaternary ammonium compounds), wetting agents (e.g. cetyl alcohol and glycerol monostearate), absorbents (e.g. kaolin and bentonite clay), and lubricants (e.g. talc, calcium stearate, magnesium stearate, solid polyethylene glycols, sodium lauryl sulfate), and mixtures thereof. In the case of capsules, tablets and pills, the dosage form may comprise buffering agents. The solid dosage forms may also dissolve once they come in contact with liquid such as, but not limited to, salvia and bile.

[0482] Compositions intended for oral use can be prepared according to any method known to the art for the manufacture of pharmaceutical compositions and such compositions can contain one or more such sweetening agents, flavoring agents, coloring agents or preservative agents in order to provide pharmaceutically elegant and palatable preparations.

[0483] Solid dosage forms may be uncoated or they can be coated by known techniques. In some cases such coatings can be prepared by known techniques to delay disintegration and absorption in the gastrointestinal tract and thereby provide a sustained action over a longer period. For example, a time delay material such as glyceryl monosterate or glyceryl distearate can be employed.

[0484] Formulations for oral use can also be presented as hard gelatin capsules wherein the active ingredient is mixed with an inert solid diluent, for example, calcium carbonate, calcium phosphate or kaolin, or as soft gelatin capsules wherein the active ingredient is mixed with water or an oil medium, for example peanut oil, liquid paraffin or olive oil.

[0485] Dosage forms for oral delivery may also be chewable. The chewable dosages forms may be sustained release formulations such as, but not limited to, the sustained release compositions described in International Publication No WO2013082470 and US Publication No US20130142876, each of which is herein incorporated by reference in its entirety. The chewable dosage forms may comprise amphipathic lipids such as, but not limited to, those described in International Publication No WO2013082470 and US Publication No US20130142876, each of which is herein incorporated by reference in its entirety.

### Topical or Transdermal Administration

[0486] As described herein, compositions of the present disclosure may be formulated for administration transdermally. The skin may be an ideal target site for delivery as it is readily accessible. Gene expression may be restricted not only to the skin, potentially avoiding nonspecific toxicity, but also to specific layers and cell types within the skin.

[0487] The site of cutaneous expression of the delivered compositions will depend on the route of nucleic acid delivery. Two routes are commonly considered to deliver nucleic acid vaccines to the skin: (ii) intradermal injection; and (iii) systemic delivery (e.g. for treatment of dermatologic diseases that affect both cutaneous and extracutaneous regions). Nucleic acid vaccines can be delivered to the skin by several different approaches known in the art. After delivery of the nucleic acid, gene products have been detected in a number of different skin cell types, including, but not limited to, basal keratinocytes, sebaceous gland cells, dermal fibroblasts and dermal macrophages.

[0488] In some embodiments, the invention provides for the nucleic acid vaccine compositions to be delivered in more than one injection.

[0489] In some embodiments, before transdermal administration at least one area of tissue, such as skin, may be subjected to a device and/or solution which may increase permeability. In one embodiment, the tissue may be subjected to an abrasion device to increase the permeability of the skin (see U.S. Patent Publication No. 20080275468, herein incorporated by reference in its entirety). In another embodiment, the tissue may be subjected to an ultrasound enhancement device. An ultrasound enhancement device may include, but is not limited to, the devices described in U.S. Publication No. 20040236268 and U.S. Pat. Nos. 6,491,657 and 6,234,990; each of which are herein incorporated by reference in their entireties. Methods of enhancing the permeability of tissue are described in U.S. Publication Nos. 20040171980 and 20040236268 and U.S. Pat. No. 6,190,315; each of which are herein incorporated by reference in their entireties.

[0490] In some embodiments, a device may be used to increase permeability of tissue before delivering formulations of modified mRNA described herein. The permeability of skin may be measured by methods known in the art and/or described in U.S. Pat. No. 6,190,315, herein incorporated by reference in its entirety. As a non-limiting example, a modified mRNA formulation may be delivered by the drug delivery methods described in U.S. Pat. No. 6,190,315, herein incorporated by reference in its entirety.

[0491] In another non-limiting example tissue may be treated with a eutectic mixture of local anesthetics (EMLA) cream before, during and/or after the tissue may be subjected to a device which may increase permeability. Katz et al. (Anesth Analg (2004); 98:371-76; herein incorporated by reference in its entirety) showed that using the EMLA cream in combination with a low energy, an onset of superficial cutaneous analgesia was seen as fast as 5 minutes after a pretreatment with a low energy ultrasound.

[0492] In some embodiments, enhancers may be applied to the tissue before, during, and/or after the tissue has been treated to increase permeability. Enhancers include, but are not limited to, transport enhancers, physical enhancers, and cavitation enhancers. Non-limiting examples of enhancers are described in U.S. Pat. No. 6,190,315, herein incorporated by reference in its entirety.

[0493] In some embodiments, a device may be used to increase permeability of tissue before delivering formulations of nucleic acid vaccines described herein, which may further contain a substance that invokes an immune response. In another non-limiting example, a formulation containing a substance to invoke an immune response may be delivered by the methods described in U.S. Publication Nos. 20040171980 and 20040236268; each of which are herein incorporated by reference in their entireties.

[0494] Dosage forms for transdermal administration of a composition may include ointments, pastes, creams, lotions, gels, powders, solutions, sprays, inhalants and/or patches. Generally, an active ingredient is admixed under sterile conditions with a pharmaceutically acceptable excipient and/or any needed preservatives and/or buffers as may be required.

[0495] Additionally, the compositions of the present disclosure contemplates the use of transdermal patches, which often have the added advantage of providing controlled delivery of a compound to the body. Such dosage forms may be prepared, for example, by dissolving and/or dispensing the compound in the proper medium. Alternatively or additionally, rate may be controlled by either providing a rate controlling membrane and/or by dispersing the compound in a polymer matrix and/or gel.

[0496] A pharmaceutical nucleic acid vaccine composition for transdermal administration may comprise at least one inactive ingredient. A non-exhaustive list of inactive ingredients for use in pharmaceutical compositions for transdermal administration includes acrylates copolymer, acrylic acid-isooctyl acrylate copolymer, acrylic adhesive 788, adcote 72a103, aerotex resin 3730, alcohol, alcohol, dehydrated, aluminum polyester, bentonite, butylated hydroxytoluene, butylene glycol, butyric acid, caprylic/capric triglyceride, carbomer 1342, carbomer 940, carbomer 980, carrageenan, cetylpyridinium chloride, citric acid, crospovidone, daubert 1-5 pestr (matte) 164z, diethylene glycol monoethyl ether, diethylhexyl phthalate, dimethicone copolyol, dimethicone mdx4-4210, dimethicone medical fluid 360, dimethylaminoethyl methacrylate-butyl methacrylate-methyl methacrylate copolymer, dipropylene glycol, duro-tak 280-2516, duro-tak 387-2516, duro-tak 80-1196, duro-tak 87-2070, duro-tak 87-2194, duro-tak 87-2287, duro-tak 87-2296, duro-tak 87-2888, duro-tak 87-2979, edetate disodium, ethyl acetate, ethyl oleate, ethylcelluloses, ethylene vinyl acetate copolymer, ethylene-propylene copolymer, fatty acid esters, gelva 737, glycerin, glyceryl laurate, glyceryl oleate, heptane, high density polyethylene, hydrochloric acid, hydrogenated polybutene 635-690, hydroxyethyl cellulose, hydroxypropyl cellulose, isopropyl myristate, isopropyl palmitate, lactose, lanolin anhydrous, lauryl lactate, lecithin, levulinic acid, light mineral oil, medical adhesive modified s-15, methyl alcohol, methyl laurate, mineral oil, nitrogen, octisalate, octyldodecanol, oleic acid, oleyl alcohol, oleyl oleate, pentadecalactone, petrolatum, white, polacrilin, polyacrylic acid (250000 mw), polybutene (1400 mw), polyester, polyester polyamine copolymer, polyester rayon, polyethylene terephthalates, polyisobutylene, polyisobutylene (1100000 mw), polyisobutylene (35000 mw), polyisobutylene 178-236, polyisobutylene 241-294, polyisobutylene 35-39, polyisobutylene low molecular weight, polyisobutylene medium molecular weight, polyisobutylene/polybutene adhesive, polypropylene, polyvinyl acetate, polyvinyl alcohol, polyvinyl chloride, polyvinyl chloride-polyvinyl acetate copolymer, polyvinylpyridine, povidone k29/32, povidones, propylene glycol, propylene glycol monolaurate, ra-2397, ra-3011, silicon, silicon dioxide, colloidal, silicone, silicone adhesive 4102, silicone adhesive 4502, silicone adhesive bio-psa q7-4201, silicone adhesive bio-psa q7-4301, silicone/polyester film strip, sodium chloride, sodium citrate, sodium hydroxide, sorbitan monooleate, stearalkonium hectorite/propylene carbonate, titanium dioxide, triacetin, trolamine, tromethamine, union 76 amsco-res 6038 and viscose/cotton.

[0497] A pharmaceutical nucleic acid vaccine composition for intradermal administration may comprise at least one inactive ingredient. A non-exhaustive list of inactive ingredients for use in pharmaceutical compositions for intradermal administration includes benzalkonium chloride, benzyl alcohol, carboxymethylcellulose sodium, creatinine, edetate disodium, glycerin, hydrochloric acid, metacresol, methylparaben, phenol, polysorbate 80, protamine sulfate, sodium acetate, sodium bisulfite, sodium chloride, sodium hydroxide, sodium phosphate, sodium phosphate, dibasic, sodium phosphate, dibasic, heptahydrate, sodium phosphate, monobasic, anhydrous and zinc chloride.

### Depot Administration

[0498] As described herein, in some embodiments, the composition is formulated in depots for extended release. Generally, a specific organ or tissue (a “target tissue”) is targeted for administration.

[0499] In some aspects, the nucleic acid vaccines are spatially retained within or proximal to a target tissue. Provided are method of providing a composition to a target tissue of a mammalian subject by contacting the target tissue (which contains one or more target cells) with the composition under conditions such that the composition, in particular the nucleic acid component(s) of the composition, is substantially retained in the target tissue, meaning that at least 10, 20, 30, 40, 50, 60, 70, 80, 85, 90, 95, 96, 97, 98, 99, 99.9, 99.99 or greater than 99.99% of the composition is retained in the target tissue. Advantageously, retention is determined by measuring the amount of the nucleic acid present in the composition that enters one or more target cells. For example, at least 1, 5, 10, 20, 30, 40, 50, 60, 70, 80, 85, 90, 95, 96, 97, 98, 99, 99.9, 99.99 or greater than 99.99% of the nucleic acids administered to the subject are present intracellularly at a period of time following administration. For example, intramuscular injection to a ruminant subject is performed using an aqueous composition containing a ribonucleic acid and a transfection reagent, and retention of the composition is determined by measuring the amount of the ribonucleic acid present in the muscle cells.

[0500] Aspects of the invention are directed to methods of providing a composition to a target tissue of a ruminant subject, by contacting the target tissue (comprising one or more target cells) with the composition under conditions such that the composition is substantially retained in the target tissue. The composition contains an effective amount of a polynucleotides such that the polypeptide of interest is produced in at least one target cell. The compositions generally contain a cell penetration agent, although “naked” nucleic acid vaccine (such as nucleic acids without a cell penetration agent or other agent) is also contemplated, and a pharmaceutically acceptable carrier.

[0501] In some circumstances, the amount of a protein produced by cells in a tissue is desirably increased. Preferably, this increase in protein production is spatially restricted to cells within the target tissue. Thus, provided herein are methods of increasing production of a protein of interest in a tissue of a ruminant subject. A composition is provided that contains polynucleotides characterized in that a unit quantity of composition has been determined to produce the polypeptide of interest in a substantial percentage of cells contained within a predetermined volume of the target tissue.

[0502] In some embodiments, the nucleic acid vaccine composition includes a plurality of different polynucleotides, where one or more than one of the polynucleotides encodes a polypeptide of interest. Optionally, the composition also comprises a cell penetration agent to assist in the intracellular delivery of the composition. A determination is made of the dose of the composition required to produce the polypeptide of interest in a substantial percentage of cells contained within the predetermined volume of the target tissue (generally, without inducing significant production of the polypeptide of interest in tissue adjacent to the predetermined volume, or distally to the target tissue). Subsequent to this determination, the determined dose is introduced directly into the tissue of the mammalian subject. In one embodiment, the invention provides for the nucleic acid vaccines to be delivered in more than one injection or by split dose injections.

[0503] In some embodiments, the compositions may be retained near target tissue using a small disposable drug reservoir, patch pump or osmotic pump. Non-limiting examples of patch pumps include those manufactured and/or sold by BD® (Franklin Lakes, NJ), Insulet Corporation (Bedford, MA), SteadyMed Therapeutics (San Francisco, CA), Medtronic (Minneapolis, MN) (e.g., MiniMed), UniLife (York, PA), Valeritas (Bridgewater, NJ), and SpringLeaf Therapeutics (Boston, MA). A non-limiting example of an osmotic pump include those manufactured by DURECT® (Cupertino, CA) (e.g., DUROS® and ALZET®).

### Pulmonary Administration

[0504] A pharmaceutical composition may be prepared, packaged, and/or sold in a formulation suitable for pulmonary administration via the buccal cavity. Such a formulation may comprise dry particles which comprise the active ingredient and which have a diameter in the range from about 0.5 nm to about 7 nm or from about 1 nm to about 6 nm. Such compositions are suitably in the form of dry powders for administration using a device comprising a dry powder reservoir to which a stream of propellant may be directed to disperse the powder and/or using a self propelling solvent/powder dispensing container such as a device comprising the active ingredient dissolved and/or suspended in a low-boiling propellant in a sealed container. Such powders comprise particles wherein at least 98% of the particles by weight have a diameter greater than 0.5 nm and at least 95% of the particles by number have a diameter less than 7 nm. Alternatively, at least 95% of the particles by weight have a diameter greater than 1 nm and at least 90% of the particles by number have a diameter less than 6 nm. Dry powder compositions may include a solid fine powder diluent such as sugar and are conveniently provided in a unit dose form.

[0505] Low boiling propellants generally include liquid propellants having a boiling point of below 65° F. at atmospheric pressure. Generally the propellant may constitute 50% to 99.9% (w/w) of the composition, and active ingredient may constitute 0.1% to 20% (w/w) of the composition. A propellant may further comprise additional ingredients such as a liquid non-ionic and/or solid anionic surfactant and/or a solid diluent (which may have a particle size of the same order as particles comprising the active ingredient). As a non-limiting example, the nucleic acid vaccines described herein may be formulated for pulmonary delivery by the methods described in U.S. Pat. No. 8,257,685; herein incorporated by reference in its entirety.

[0506] Pharmaceutical nucleic acid vaccine compositions formulated for pulmonary delivery may provide an active ingredient in the form of droplets of a solution and/or suspension. Such formulations may be prepared, packaged, and/or sold as aqueous and/or dilute alcoholic solutions and/or suspensions, optionally sterile, comprising active ingredient, and may conveniently be administered using any nebulization and/or atomization device. Such formulations may further comprise one or more additional ingredients including, but not limited to, a flavoring agent such as saccharin sodium, a volatile oil, a buffering agent, a surface active agent, and/or a preservative such as methylhydroxybenzoate. Droplets provided by this route of administration may have an average diameter in the range from about 0.1 nm to about 200 nm.

[0507] The compositions and formulations provided herein which may be used for pulmonary delivery may further comprise one or more surfactants. Suitable surfactants or surfactant components for enhancing the uptake of the compositions of the invention include synthetic and natural as well as full and truncated forms of surfactant protein A, surfactant protein B, surfactant protein C, surfactant protein D and surfactant Protein E, di-saturated phosphatidylcholine (other than dipalmitoyl), dipalmitoylphosphatidylcholine, phosphatidylcholine, phosphatidylglycerol, phosphatidylinositol, phosphatidylethanolamine, phosphatidylserine; phosphatidic acid, ubiquinones, lysophosphatidylethanolamine, lysophosphatidylcholine, palmitoyl-lysophosphatidylcholine, dehydroepiandrosterone, dolichols, sulfatidic acid, glycerol-3-phosphate, dihydroxyacetone phosphate, glycerol, glycero-3-phosphocholine, dihydroxyacetone, palmitate, cytidine diphosphate (CDP) diacylglycerol, CDP choline, choline, choline phosphate; as well as natural and artificial lamellar bodies which are the natural carrier vehicles for the components of surfactant, omega-3 fatty acids, polyenic acid, polyenoic acid, lecithin, palmitinic acid, non-ionic block copolymers of ethylene or propylene oxides, polyoxypropylene, monomeric and polymeric, polyoxyethylene, monomelic and polymeric, poly(vinyl amine) with dextran and/or alkanoyl side chains, Brij 35, Triton X-100 and synthetic surfactants ALEC, Exosurf, Survan and Atovaquone, among others. These surfactants can be used either as single or part of a multiple component surfactant in a formulation, or as covalently bound additions to the 5′ and/or 3′ ends of the nucleic acid component of a pharmaceutical composition herein.

### Intranasal, Nasal and Buccal Administration

[0508] Formulations described herein as being useful for pulmonary delivery are useful for intranasal delivery of a nucleic acid vaccine pharmaceutical composition. Another formulation suitable for intranasal administration is a coarse powder comprising the active ingredient and having an average particle from about 0.2 μm to 500 μm. Such a formulation is administered in the manner in which snuff is taken, i.e. by rapid inhalation through the nasal passage from a container of the powder held close to the nose.

[0509] Formulations suitable for nasal administration may, for example, comprise from about as little as 0.1% (w/w) and as much as 100% (w/w) of active ingredient, and may comprise one or more of the additional ingredients described herein. A pharmaceutical composition may be prepared, packaged, and/or sold in a formulation suitable for buccal administration. Such formulations may, for example, be in the form of tablets and/or lozenges made using conventional methods and may, for example, 0.1% to 20% (w/w) active ingredient, the balance comprising an orally dissolvable and/or degradable composition and, optionally, one or more of the additional ingredients described herein. Alternately, formulations suitable for buccal administration may comprise a powder and/or an aerosolized and/or atomized solution and/or suspension comprising active ingredient. Such powdered, aerosolized, and/or aerosolized formulations, when dispersed, may have an average particle and/or droplet size in the range from about 0.1 nm to about 200 nm, and may further comprise one or more of any additional ingredients described herein.

[0510] A pharmaceutical nucleic acid vaccine composition for inhalation (respiratory) administration may comprise at least one inactive ingredient. A non-exhaustive list of inactive ingredients for use in pharmaceutical compositions for inhalation (respiratory) administration includes acetone sodium bisulfite, acetylcysteine, alcohol, alcohol, dehydrated, ammonia, apaflurane, ascorbic acid, benzalkonium chloride, calcium carbonate, carbon dioxide, cetylpyridinium chloride, chlorobutanol, citric acid, d&c yellow no. 10, dichlorodifluoromethane, dichlorotetrafluoroethane, edetate disodium, edetate sodium, fd&c yellow no. 6, fluorochlorohydrocarbons, gelatin, glycerin, glycine, hydrochloric acid, hydrochloric acid, diluted, lactose, lactose monohydrate, lecithin, lecithin, hydrogenated soy, lecithin, soybean, lysine monohydrate, mannitol, menthol, methylparaben, nitric acid, nitrogen, norflurane, oleic acid, polyethylene glycol 1000, povidone k25, propylene glycol, propylparaben, saccharin, saccharin sodium, silicon dioxide, colloidal, sodium bisulfate, sodium bisulfite, sodium chloride, sodium citrate, sodium hydroxide, sodium lauryl sulfate, sodium metabisulfite, sodium sulfate anhydrous, sodium sulfite, sorbitan trioleate, sulfuric acid, thymol, titanium dioxide, trichloromonofluoromethane, tromethamine and zinc oxide.

[0511] A pharmaceutical nucleic acid vaccine composition for nasal administration may comprise at least one inactive ingredient. Any or none of the inactive ingredients used may have been approved by the US Food and Drug Administration (FDA). A non-exhaustive list of inactive ingredients for use in pharmaceutical compositions for nasal administration includes acetic acid, alcohol, dehydrated, allyl.alpha.-ionone, anhydrous dextrose, anhydrous trisodium citrate, benzalkonium chloride, benzethonium chloride, benzyl alcohol, butylated hydroxyanisole, butylated hydroxytoluene, caffeine, carbon dioxide, carboxymethylcellulose sodium, cellulose, microcrystalline, chlorobutanol, citric acid, citric acid monohydrate, dextrose, dichlorodifluoromethane, dichlorotetrafluoroethane, edetate disodium, glycerin, glycerol ester of hydrogenated rosin, hydrochloric acid, hypromellose 2910 (15000 mpa·s), methylcelluloses, methylparaben, nitrogen, norflurane, oleic acid, petrolatum, white, phenylethyl alcohol, polyethylene glycol 3350, polyethylene glycol 400, polyoxyl 400 stearate, polysorbate 20, polysorbate 80, potassium phosphate, monobasic, potassium sorbate, propylene glycol, propylparaben, sodium acetate, sodium chloride, sodium citrate, sodium hydroxide, sodium phosphate, sodium phosphate, dibasic, sodium phosphate, dibasic, anhydrous, sodium phosphate, dibasic, dihydrate, sodium phosphate, dibasic, dodecahydrate, sodium phosphate, dibasic, heptahydrate, sodium phosphate, monobasic, anhydrous, sodium phosphate, monobasic, dihydrate, sorbitan trioleate, sorbitol, sorbitol solution, sucralose, sulfuric acid, trichloromonofluoromethane and trisodium citrate dihydrate.

### Ophthalmic and Auricular (Otic) Administration

[0512] A pharmaceutical nucleic acid vaccine composition may be prepared, packaged, and/or sold in a formulation suitable for delivery to and/or around the eye and/or delivery to the ear (e.g., auricular (otic) administration). Non-limiting examples of route of administration for delivery to and/or around the eye include retrobulbar, conjuctival, intracorneal, intraocular, intravitreal, ophthlamic and subconjuctiva. Such formulations may, for example, be in the form of eye drops or ear drops including, for example, a 0.1/1.0% (w/w) solution and/or suspension of the active ingredient in an aqueous or oily liquid excipient. Such drops may further comprise buffering agents, salts, and/or one or more other of any additional ingredients described herein. Other ophthalmically-administrable formulations which are useful include those which comprise the active ingredient in microcrystalline form and/or in a liposomal preparation. Ear drops and/or eye drops are contemplated as being within the scope of this invention. A multilayer thin film device may be prepared to contain a pharmaceutical composition for delivery to the eye and/or surrounding tissue.

[0513] A pharmaceutical nucleic acid vaccine composition for ophthalmic administration may comprise at least one inactive ingredient. Any or none of the inactive ingredients used may have been approved by the US Food and Drug Administration (FDA). A non-exhaustive list of inactive ingredients for use in pharmaceutical compositions for ophthalmic administration includes acetic acid, alcohol, alcohol, dehydrated, alginic acid, amerchol-cab, ammonium hydroxide, anhydrous trisodium citrate, antipyrine, benzalkonium chloride, benzethonium chloride, benzododecinium bromide, boric acid, caffeine, calcium chloride, carbomer 1342, carbomer 934p, carbomer 940, carbomer homopolymer type b (allyl pentaerythritol crosslinked), carboxymethylcellulose sodium, castor oil, cetyl alcohol, chlorobutanol, chlorobutanol, anhydrous, cholesterol, citric acid, citric acid monohydrate, creatinine, diethanolamine, diethylhexyl phthalate, divinylbenzene styrene copolymer, edetate disodium, edetate disodium anhydrous, edetate sodium, ethylene vinyl acetate copolymer, gellan gum (low acyl), glycerin, glyceryl stearate, high density polyethylene, hydrocarbon gel, plasticized, hydrochloric acid, hydrochloric acid, diluted, hydroxyethyl cellulose, hydroxypropyl methylcellulose 2906, hypromellose 2910 (15000 mpa·s), hypromelloses, jelene, lanolin, lanolin alcohols, lanolin anhydrous, lanolin nonionic derivatives, lauralkonium chloride, lauroyl sarcosine, light mineral oil, magnesium chloride, mannitol, methylcellulose (4000 mpa·s), methylcelluloses, methylparaben, mineral oil, nitric acid, nitrogen, nonoxynol-9, octoxynol-40, octylphenol polymethylene, petrolatum, petrolatum, white, phenylethyl alcohol, phenylmercuric acetate, phenylmercuric nitrate, phosphoric acid, polidronium chloride, poloxamer 188, poloxamer 407, polycarbophil, polyethylene glycol 300, polyethylene glycol 400, polyethylene glycol 8000, polyoxyethylene-polyoxypropylene 1800, polyoxyl 35 castor oil, polyoxyl 40 hydrogenated castor oil, polyoxyl 40 stearate, polypropylene glycol, polysorbate 20, polysorbate 60, polysorbate 80, polyvinyl alcohol, potassium acetate, potassium chloride, potassium phosphate, monobasic, potassium sorbate, povidone k29/32, povidone k30, povidone k90, povidones, propylene glycol, propylparaben, soda ash, sodium acetate, sodium bisulfate, sodium bisulfite, sodium borate, sodium borate decahydrate, sodium carbonate, sodium carbonate monohydrate, sodium chloride, sodium citrate, sodium hydroxide, sodium metabisulfite, sodium nitrate, sodium phosphate, sodium phosphate dihydrate, sodium phosphate, dibasic, sodium phosphate, dibasic, anhydrous, sodium phosphate, dibasic, dihydrate, sodium phosphate, dibasic, heptahydrate, sodium phosphate, monobasic, sodium phosphate, monobasic, anhydrous, sodium phosphate, monobasic, dihydrate, sodium phosphate, monobasic, monohydrate, sodium sulfate, sodium sulfate anhydrous, sodium sulfate decahydrate, sodium sulfite, sodium thiosulfate, sorbic acid, sorbitan monolaurate, sorbitol, sorbitol solution, stabilized oxychloro complex, sulfuric acid, thimerosal, titanium dioxide, tocophersolan, trisodium citrate dihydrate, triton 720, tromethamine, tyloxapol and zinc chloride.

[0514] A pharmaceutical nucleic acid vaccine composition for retrobulbar administration may comprise at least one inactive ingredient. A non-exhaustive list of inactive ingredients for use in pharmaceutical compositions for retrobulbar administration includes hydrochloric acid and sodium hydroxide.

[0515] A pharmaceutical nucleic acid vaccine composition for intraocular administration may comprise at least one inactive ingredient. A non-exhaustive list of inactive ingredients for use in pharmaceutical compositions for intraocular administration includes benzalkonium chloride, calcium chloride, citric acid monohydrate, hydrochloric acid, magnesium chloride, polyvinyl alcohol, potassium chloride, sodium acetate, sodium chloride, sodium citrate and sodium hydroxide.

[0516] A pharmaceutical nucleic acid vaccine composition for intravitreal administration may comprise at least one inactive ingredient. A non-exhaustive list of inactive ingredients for use in pharmaceutical compositions for intravitreal administration includes calcium chloride, carboxymethylcellulose sodium, cellulose, microcrystalline, hyaluronate sodium, hydrochloric acid, magnesium chloride, magnesium stearate, polysorbate 80, polyvinyl alcohol, potassium chloride, sodium acetate, sodium bicarbonate, sodium carbonate, sodium chloride, sodium hydroxide, sodium phosphate dibasic heptahydrate, sodium phosphate monobasic monohydrate and trisodium citrate dehydrate.

[0517] A pharmaceutical nucleic acid vaccine composition for subconjunctival administration may comprise at least one inactive ingredient. A non-exhaustive list of inactive ingredients for use in pharmaceutical compositions for subconjunctival administration includes benzyl alcohol, hydrochloric acid and sodium hydroxide.

[0518] A pharmaceutical nucleic acid vaccine composition for auricular administration may comprise at least one inactive ingredient. A non-exhaustive list of inactive ingredients for use in pharmaceutical compositions for auricular administration includes acetic acid, aluminum acetate, aluminum sulfate anhydrous, benzalkonium chloride, benzethonium chloride, benzyl alcohol, boric acid, calcium carbonate, cetyl alcohol, chlorobutanol, chloroxylenol, citric acid, creatinine, cupric sulfate, cupric sulfate anhydrous, edetate disodium, edetic acid, glycerin, glyceryl stearate, hydrochloric acid, hydrocortisone, hydroxyethyl cellulose, isopropyl myristate, lactic acid, lecithin, hydrogenated, methylparaben, mineral oil, petrolatum, petrolatum, white, phenylethyl alcohol, polyoxyl 40 stearate, polyoxyl stearate, polysorbate 20, polysorbate 80, polyvinyl alcohol, potassium metabisulfite, potassium phosphate, monobasic, povidone k90f, povidones, propylene glycol, propylene glycol diacetate, propylparaben, sodium acetate, sodium bisulfite, sodium borate, sodium chloride, sodium citrate, sodium hydroxide, sodium phosphate, dibasic, anhydrous, sodium phosphate, dibasic, heptahydrate, sodium phosphate, monobasic, anhydrous, sodium sulfite, sulfuric acid and thimerosal.

### Dosing

[0519] Provided herein are methods comprising administering nucleic acid vaccines to a ruminant subject. The specific dose level for any particular ruminant will depend upon a variety of factors including the species, the activity of the specific compound employed; the specific composition employed; the age, body weight, general health, sex, and diet of the ruminant; the time of administration, route of administration, and rate of excretion of the specific compound employed; drugs used in combination or coincidental with the specific compound employed; and like factors well known in the arts. Compositions in accordance with the present disclosure are typically formulated in dosage unit form for ease of administration and uniformity of dosage. It will be understood, however, that the total daily usage of the compositions of the present disclosure may be decided by the attending administrator within the scope of sound judgment.

[0520] In certain embodiments, compositions in accordance with the present disclosure may be administered at dosage levels sufficient to deliver from about 0.0001 mg/kg to about 100 mg/kg, from about 0.001 mg/kg to about 0.05 mg/kg, from about 0.005 mg/kg to about 0.05 mg/kg, from about 0.001 mg/kg to about 0.005 mg/kg, from about 0.05 mg/kg to about 0.5 mg/kg, from about 0.01 mg/kg to about 50 mg/kg, from about 0.1 mg/kg to about 40 mg/kg, from about 0.5 mg/kg to about 30 mg/kg, from about 0.01 mg/kg to about 10 mg/kg, from about 0.1 mg/kg to about 10 mg/kg, or from about 1 mg/kg to about 25 mg/kg, of subject body weight per day, one or more times a day, to obtain the desired therapeutic, diagnostic, prophylactic, or imaging effect (see e.g., the range of unit doses described in International Publication No WO2013078199, herein incorporated by reference in its entirety). The desired dosage may be delivered three times a day, two times a day, once a day, every other day, every third day, every week, every two weeks, every three weeks, or every four weeks. In certain embodiments, the desired dosage may be delivered using multiple administrations (e.g., two, three, four, five, six, seven, eight, nine, ten, eleven, twelve, thirteen, fourteen, twenty, thirty, forty, or more administrations). When multiple administrations are employed, split dosing regimens such as those described herein may be used.

[0521] According to the present disclosure, nucleic acid vaccines may be administered in split-dose regimens. As used herein, a “split dose” is the division of single unit dose or total daily dose into two or more doses, e.g, two or more administrations of the single unit dose. As used herein, a “single unit dose” is a dose of any therapeutic administered in one dose/at one time/single route/single point of contact, i.e., single administration event. As used herein, a “total daily dose” is an amount given or prescribed in 24 hr period. It may be administered as a single unit dose. In some embodiments, the nucleic acid vaccines of the present disclosure are administered to a ruminant subject in split doses. The nucleic acid vaccines may be formulated in buffer only or in a formulation described herein.

### Dosage Forms

[0522] Vaccines, antibodies, milk, animal feed, agents (e.g., an agent that reduces methane production in a ruminant, a probiotic bacterial strain, etc.), or other compositions of the present disclosure may be formulated into a dosage form described herein, such as an intranasal, intratracheal, or injectable (e.g., intravenous, intraocular, intravitreal, intramuscular, intracardiac, intraperitoneal, subcutaneous).

### Liquid Dosage Forms

[0523] Liquid dosage forms for parenteral administration include, but are not limited to, pharmaceutically acceptable emulsions, microemulsions, solutions, suspensions, syrups, and/or elixirs. In addition to active ingredients, liquid dosage forms may comprise inert diluents commonly used in the art including, but not limited to, water or other solvents, solubilizing agents and emulsifiers such as ethyl alcohol, isopropyl alcohol, ethyl carbonate, ethyl acetate, benzyl alcohol, benzyl benzoate, propylene glycol, 1,3-butylene glycol, dimethylformamide, oils (in particular, cottonseed, groundnut, corn, germ, olive, castor, and sesame oils), glycerol, tetrahydrofurfuryl alcohol, polyethylene glycols and fatty acid esters of sorbitan, and mixtures thereof. In certain embodiments for parenteral administration, compositions may be mixed with solubilizing agents such as CREMOPHOR®, alcohols, oils, modified oils, glycols, polysorbates, cyclodextrins, polymers, and/or combinations thereof.

### Injectable

[0524] Injectable preparations, for example, sterile injectable aqueous or oleaginous suspensions may be formulated according to the known art and may include suitable dispersing agents, wetting agents, and/or suspending agents. Sterile injectable preparations may be sterile injectable solutions, suspensions, and/or emulsions in nontoxic parenterally acceptable diluents and/or solvents, for example, a solution in 1,3-butanediol. Among the acceptable vehicles and solvents that may be employed include, but are not limited to, water, Ringer's solution, U.S. P., and isotonic sodium chloride solution. Sterile, fixed oils are conventionally employed as a solvent or suspending medium. For this purpose any bland fixed oil can be employed including synthetic mono- or diglycerides. Fatty acids such as oleic acid can be used in the preparation of injectables. Injectable formulations can be sterilized, for example, by filtration through a bacterial-retaining filter, and/or by incorporating sterilizing agents in the form of sterile solid compositions which can be dissolved or dispersed in sterile water or other sterile injectable medium prior to use.

[0525] In order to prolong the effect of an active ingredient, it may be desirable to slow the absorption of the active ingredient from subcutaneous or intramuscular injection. This may be accomplished by the use of a liquid suspension of crystalline or amorphous material with poor water solubility. The rate of absorption of the nucleic acid vaccines then depends upon its rate of dissolution which, in turn, may depend upon crystal size and crystalline form. Alternatively, delayed absorption of a parenterally administered nucleic acid vaccine may be accomplished by dissolving or suspending the nucleic acid vaccines in an oil vehicle. Injectable depot forms are made by forming microencapsule matrices of the nucleic acid vaccines in biodegradable polymers such as polylactide-polyglycolide. Depending upon the ratio of nucleic acid vaccines to polymer and the nature of the particular polymer employed, the rate of polynucleotides release can be controlled. Examples of other biodegradable polymers include, but are not limited to, poly(orthoesters) and poly(anhydrides). Depot injectable formulations may be prepared by entrapping the nucleic acid vaccines in liposomes or microemulsions which are compatible with body tissues.

### Pulmonary Formulation

[0526] Formulations described herein as being useful for pulmonary delivery may also be used for intranasal delivery of a pharmaceutical composition. Another formulation suitable for intranasal administration may be a coarse powder comprising the active ingredient and having an average particle from about 0.2 μm to 500 μm. Such a formulation may be administered in the manner in which snuff is taken, i.e. by rapid inhalation through the nasal passage from a container of the powder held close to the nose.

[0527] Formulations suitable for nasal administration may, for example, comprise from about as little as 0.1% (w/w) and as much as 100% (w/w) of active ingredient, and may comprise one or more of the additional ingredients described herein. A pharmaceutical composition may be prepared, packaged, and/or sold in a formulation suitable for buccal administration. Such formulations may, for example, be in the form of tablets and/or lozenges made using conventional methods, and may, for example, contain about 0.1% to 20% (w/w) active ingredient, where the balance may comprise an orally dissolvable and/or degradable composition and, optionally, one or more of the additional ingredients described herein. Alternately, formulations suitable for buccal administration may comprise a powder and/or an aerosolized and/or atomized solution and/or suspension comprising active ingredient. Such powdered, aerosolized, and/or aerosolized formulations, when dispersed, may have an average particle and/or droplet size in the range from about 0.1 nm to about 200 nm, and may further comprise one or more of any additional ingredients described herein.

[0528] General considerations in the formulation and/or manufacture of pharmaceutical agents may be found, for example, in Remington: The Science and Practice of Pharmacy 21^{st} ed., Lippincott Williams & Wilkins, 2005 (incorporated herein by reference in its entirety).

### Coatings or Shells

[0529] Solid dosage forms of tablets, dragees, capsules, pills, and granules can be prepared with coatings and shells such as enteric coatings and other coatings well known in the pharmaceutical formulating art. They may optionally comprise opacifying agents and can be of a composition that they release the active ingredient(s) only, or preferentially, in a certain part of the intestinal tract, optionally, in a delayed manner. Examples of embedding compositions which can be used include polymeric substances and waxes. Solid compositions of a similar type may be employed as fillers in soft and hard-filled gelatin capsules using such excipients as lactose or milk sugar as well as high molecular weight polyethylene glycols and the like.

### Multi-Dose and Repeat-Dose Administration

[0530] In some embodiments, vaccines, antibodies, milk, animal feed, agents (e.g., an agent that reduces methane production in a ruminant, a probiotic bacterial strain, a small molecule inhibitor, etc.), or other compositions of the present disclosure may be administered in two or more doses (referred to herein as “multi-dose administration”). Such doses may comprise the same components or may comprise components not included in a previous dose. Such doses may comprise the same mass and/or volume of components or an altered mass and/or volume of components in comparison to a previous dose. In some embodiments, multi-dose administration may comprise repeat-dose administration. As used herein, the term “repeat-dose administration” refers to two or more doses administered consecutively or within a regimen of repeat doses comprising same or different components. In some embodiments, the repeat dose may comprise substantially the same components provided at substantially the same mass and/or volume. In some embodiments, subjects may display a repeat-dose response. As used herein, the term “repeat-dose response” refers to a response in a subject to a repeat-dose that differs from that of another dose administered within a repeat-dose administration regimen. In some embodiments, such a response may be the expression of a protein in response to a repeat-dose comprising a nucleic acid vaccine composition. In such embodiments, protein expression may be elevated in comparison to another dose administered within a repeat-dose administration regimen or protein expression may be reduced in comparison to another dose administered within a repeat-dose administration regimen. Alteration of protein expression may be from about 1% to about 20%, from about 5% to about 50% from about 10% to about 60%, from about 25% to about 75%, from about 40% to about 100% and/or at least 100%. A reduction in expression of mRNA administered as part of a repeat-dose regimen, wherein the level of protein translated from the administered RNA is reduced by more than 40% in comparison to another dose within the repeat-dose regimen is referred to herein as “repeat-dose resistance.”

### Adjuvant

[0531] Adjuvants or immune potentiators, may also be administered with or in combination with one or more vaccines (e.g., protein vaccine, nucleic acid vaccine).

[0532] The term “adjuvant” refers to an agent that when administered in conjunction with or as part of a composition described herein augments, enhances, and/or boosts the immune response to the protein encoded by the nucleic acid vaccine (e.g., at least one cell surface protein or fragment thereof of at least one methanogen), but when the agent is administered alone does not generate an immune response. In some embodiments, the adjuvant generates an immune response to the protein encoded by the nucleic acid vaccine and does not produce an allergy or other adverse reaction. Adjuvants can enhance an immune response by several mechanisms including, e.g., lymphocyte recruitment, stimulation of B and/or T cells, and stimulation of macrophages.

[0533] In some embodiments, an adjuvant acts as a co-signal to prime T-cells and/or B-cells and/or NK cells as to the existence of the protein encoded by the nucleci acid vaccine.

[0534] Advantages of adjuvants include the enhancement of the immunogenicity of antigens, modification of the nature of the immune response, the reduction of the antigen amount needed for a successful immunization, the reduction of the frequency of booster immunizations needed and an improved immune response in elderly and immunocompromised vaccines. These may be co-administered by any route, e.g., intramusculary, subcutaneous, IV or intradermal injections. Adjuvants useful in the present invention may include, but are not limited to, natural or synthetic. They may be organic or inorganic.

[0535] When a vaccine or immunogenic composition of the invention comprises adjuvants or is administered together with one or more adjuvants, the adjuvants that can be used include, but are not limited to, mineral salt adjuvants or mineral salt gel adjuvants, particulate adjuvants, microparticulate adjuvants, mucosal adjuvants, and immunostimulatory adjuvants. Examples of adjuvants include, but are not limited to, aluminum salts (alum) (such as aluminum hydroxide, aluminum phosphate, and aluminum sulfate), 3 De-O-acylated monophosphoryl lipid A (MPL) (see GB 2220211), MF59 (Novartis), AS03 (Glaxo SmithKline), AS04 (Glaxo SmithKline), polysorbate 80 (Tween 80; ICL Americas, Inc.), imidazopyridine compounds (see International Application No. PCT/US2007/064857, published as International Publication No. WO2007/109812), imidazoquinoxaline compounds (see International Application No. PCT/US2007/064858, published as International Publication No. WO2007/109813) and saponins, such as QS21 (see Kensil et al, in Vaccine Design: The Subunit and Adjuvant Approach (eds. Powell & Newman, Plenum Press, N Y, 1995); U.S. Pat. No. 5,057,540). In some embodiments, the adjuvant is Freund's adjuvant (complete or incomplete). Other adjuvants are oil in water emulsions (such as squalene or peanut oil), optionally in combination with immune stimulants, such as monophosphoryl lipid A (see Stoute et al, N. Engl. J. Med. 336, 86-91 (1997)).

[0536] Aduvants may be selected from any of the classes (1) mineral salts, e.g., aluminium hydroxide and aluminium or calcium phosphate gels; (2) emulsions including: oil emulsions and surfactant based formulations, e.g., microfluidised detergent stabilised oil-in-water emulsion, purified saponin, oil-in-water emulsion, stabilised water-in-oil emulsion; (3) particulate adjuvants, e.g., virosomes (unilamellar liposomal vehicles incorporating influenza haemagglutinin), structured complex of saponins and lipids, polylactide co-glycolide (PLG); (4) microbial derivatives; (5) endogenous human immunomodulators; and/or (6) inert vehicles, such as gold particles; (7) microorganism derived adjuvants; (8) tensoactive compounds; (9) carbohydrates; or combinations thereof. Adjuvants for DNA nucleic acid vaccines (DNA) have been disclosed in, for example, Kobiyama, et al Vaccines, 2013, 1(3), 278-292, the contents of which are incorporated herein by reference in their entirety. Any of the adjuvants disclosed by Kobiyama may be used in the vaccines of the present disclosure.

[0537] Other adjuvants which may be utilized in the vaccines of the present disclosure include any of those listed on the web-based vaccine adjuvant database, Vaxjo; World Wide Web at violinet.org/vaxjo/ and described in for example Sayers, et al., J. Biomedicine and Biotechnology, volume 2012 (2012), Article ID 831486, 13 pages, the content of which is incorporated herein by reference in its entirety.

[0538] Selection of appropriate adjuvants will be evident to one of ordinary skill in the art. Specific adjuvants may include, without limitation, cationic liposome-DNA complex JVRS-100, aluminum hydroxide vaccine adjuvant, aluminum phosphate vaccine adjuvant, aluminum potassium sulfate adjuvant, alhydrogel, ISCOM(s)™, Freund's Complete Adjuvant, Freund's Incomplete Adjuvant, CpG DNA Vaccine Adjuvant, Cholera toxin, Cholera toxin B subunit, Liposomes, Saponin Vaccine Adjuvant, DDA Adjuvant, Squalene-based Adjuvants, Etx B subunit Adjuvant, IL-12 Vaccine Adjuvant, LTK63 Vaccine Mutant Adjuvant, TiterMax Gold Adjuvant, Ribi Vaccine Adjuvant, Montanide ISA 720 Adjuvant, Corynebacterium-derb/ed P40 Vaccine Adjuvant, MPL™ Adjuvant, AS04, AS02, Lipopolysaccharide Vaccine Adjuvant, Muramyl Dipeptide Adjuvant, CRL1005, Killed Corynebacterium parvum Vaccine Adjuvant, Montanide ISA 51, Bordetella pertussis component Vaccine Adjuvant, Cationic Liposomal Vaccine Adjuvant, Adamantylamide Dipeptide Vaccine Adjuvant, Arlacel A, VSA-3 Adjuvant, Aluminum vaccine adjuvant, Polygen Vaccine Adjuvant, Adjumer™, Algal Glucan, Bay R1005, Theramide®, Stearyl Tyrosine, Specol, Algammulin, Avridine®, Calcium Phosphate Gel, CTA1-DD gene fusion protein, DOC/Alum Complex, Gamma Inulin, Gerbu Adjuvant, GM-CSF, GMDP, Recombinant hlFN-gamma/Interferon-g, Interleukin-4p, Interleukin-2, Interleukin-7, Sclavo peptide, Rehydragel LV, Rehydragel HPA, Loxoribine, MF59, MTP-PE Liposomes, Murametide, Murapalmitine, D-Murapalmitine, NAGO, Non-Ionic Surfactant Vesicles, PMMA, Protein Cochleates, QS-21, SPT (Antigen Formulation), nanoemulsion vaccine adjuvant, AS03, Quil-A vaccine adjuvant, RC529 vaccine adjuvant, LTR192G Vaccine Adjuvant, E. coli heat-labile toxin, LT, amorphous aluminum hydroxyphosphate sulfate adjuvant, Calcium phosphate vaccine adjuvant, Montanide Incomplete Seppic Adjuvant, Imiquimod, Resiquimod, AF03, Flagellin, Poly(LC), ISCOMATRIX®, Abisco-100 vaccine adjuvant, Albumin-heparin microparticles vaccine adjuvant, AS-2 vaccine adjuvant, B7-2 vaccine adjuvant, DHEA vaccine adjuvant, Immunoliposomes Containing Antibodies to Costimulatory Molecules, SAF-1, Sendai Proteoliposomes, Sendai-containing Lipid Matrices, Threonyl muramyl dipeptide (TMDP), Ty Particles vaccine adjuvant, Bupivacaine vaccine adjuvant, DL-PGL (Polyester poly (DL-lactide-co-glycolide)) vaccine adjuvant, IL-15 vaccine adjuvant, LTK72 vaccine adjuvant, MPL-SE vaccine adjuvant, non-toxic mutant El 12K of Cholera Toxin mCT-El 12K, and/or Matrix-S. Other adjuvants which may be co-administered with the nucleic acid vaccines of the invention include, but are not limited to interferons, TNF-alpha, TNF-beta, chemokines such as CCL21, eotaxin, HMGB1, SA100-8alpha, GCSF, GMCSF, granulysin, lactoferrin, ovalbumin, CD-40L, CD28 agonists, PD-1, soluble PD1, LI or L2, or interleukins such as IL-1, IL-2, IL-4, IL-6, IL-7, IL-10, IL-12, IL-13, IL-21, IL-23, IL-15, IL-17, and IL-18. These may be administered with the nucleic acid vaccine on the same encoded polynucleotide, e.g., polycistronic, or as separate mRNA encoding the adjuvant and antigen.

[0539] In some embodiments, the adjuvant comprises Glucopyranosyl Lipid Adjuvant (GLA), CpG oligodeoxynucleotides (e.g., Class A or B), poly(LC), aluminum hydroxide, or Pam3CSK4.

[0540] In some embodiments, the adjuvant comprises: (a) (±)-N-(3-aminopropyl)-N,N-dimethyl-2,3-bis(syn-9-tetradeceneyloxy)-1-propanaminium bromide (GAP-DMORIE) and a neutral lipid; (b) a cytokine; (c) mono-phosphoryl lipid A and trehalosedicorynomycolateAF (MPL+TDM); (d) a solubilized mono-phosphoryl lipid A formulation; and/or (e) CRL1005/BAK.

[0541] In some embodiments, the neutral lipid in (a) comprises (a) 1,2-dioleoyl-sn-glycero-3-phosphoethanolamine (DOPE); (b) 1,2-diphytanoyl-sn-glycero-3-phosphoethanolamine (DPyPE); and/or (c) 1,2-dimyristoyl-glycer-3-phosphoethanolamine (DMPE).

[0542] In some embodiments, the adjuvant comprises saponin, Montanide ISA61, a chitosan thermogel, a lipid nanoparticle/cationic liposome adjuvant, or any combination thereof. In preferred embodiments, the adjuvant comprises Montanide ISA61.

[0543] In some embodiments, the pharmaceutical composition of the present disclosure comprises a transfection facilitating compound. In some embodiments, the pharmaceutical composition of the present disclosure comprises an adjuvant and a transfection facilitating compound. In some embodiments, the transfection facilitating compound comprises (±)-N-(2-hydroxyethyl)-N,N-dimethyl-2,3-bis(tetradecyloxy)-1-propanaminium bromide) (DMRIE).

### Antibody

[0544] Unless otherwise specified here within, the terms “antibody” and “antibodies” broadly encompass naturally-occurring forms of antibodies (e.g. IgG, IgA, IgM, IgE); and recombinant antibodies, such as single-chain antibodies, chimeric antibodies, and multi-specific antibodies, as well as fragments and derivatives of all of the foregoing, which fragments and derivatives have at least an antigenic binding site. Antibody derivatives may comprise a protein or chemical moiety conjugated to an antibody.

[0545] The term “antibody” as used herein also includes an “antigen-binding portion” of an antibody (or simply “antibody portion”). The term “antigen-binding portion”, as used herein, refers to one or more fragments of an antibody that retain the ability to specifically bind to an antigen (e.g., at least one cell surface protein or fragment thereof of at least one methanogen). It has been shown that the antigen-binding function of an antibody can be performed by fragments of a full-length antibody. Examples of binding fragments encompassed within the term “antigen-binding portion” of an antibody include (i) a Fab fragment, a monovalent fragment consisting of the VL, VH, CL and CH1 domains; (ii) a F(ab′)₂ fragment, a bivalent fragment comprising two Fab fragments linked by a disulfide bridge at the hinge region; (iii) a Fd fragment consisting of the VH and CHi domains; (iv) a Fv fragment consisting of the VL and VH domains of a single arm of an antibody, (v) a dAb fragment (Ward et al., (1989) Nature 341:544-546), which consists of a VH domain; and (vi) an isolated complementarity determining region (CDR). Furthermore, although the two domains of the Fv fragment, VL and VH, are coded for by separate genes, they can be joined, using recombinant methods, by a synthetic linker that enables them to be made as a single protein chain in which the VL and VH regions pair to form monovalent polypeptides (known as single chain Fv (scFv); see e.g., Bird et al. (1988) Science 242:423-426; and Huston et al. (1988) Proc. Natl. Acad. Sci. USA 85:5879-5883; and Osbourn et al. 1998, Nature Biotechnology 16: 778). Such single chain antibodies are also intended to be encompassed within the term “antigen-binding portion” of an antibody. Any VH and VL sequences of specific scFv can be linked to ruminant immunoglobulin constant region cDNA or genomic sequences, in order to generate expression vectors encoding complete IgG polypeptides or other isotypes (e.g., IgGA). VH and VL can also be used in the generation of Fab, Fv or other fragments of immunoglobulins using either protein chemistry or recombinant DNA technology. Other forms of single chain antibodies, such as diabodies are also encompassed. Diabodies are bivalent, bispecific antibodies in which VH and VL domains are expressed on a single polypeptide chain, but using a linker that is too short to allow for pairing between the two domains on the same chain, thereby forcing the domains to pair with complementary domains of another chain and creating two antigen binding sites (see e.g., Holliger et al. (1993) Proc. Natl. Acad. Sci. U.S.A. 90:6444-6448; Poljak et al. (1994) Structure 2:1121-1123).

[0546] Still further, an antibody or antigen-binding portion thereof may be part of larger immunoadhesion polypeptides, formed by covalent or noncovalent association of the antibody or antibody portion with one or more other proteins or peptides. Examples of such immunoadhesion polypeptides include use of the streptavidin core region to make a tetrameric scFv polypeptide (Kipriyanov et al. (1995) Human Antibodies and Hybridomas 6:93-101) and use of a cysteine residue, biomarker peptide and a C-terminal polyhistidine tag to make bivalent and biotinylated scFv polypeptides (Kipriyanov et al. (1994) Mol. Immunol. 31:1047-1058). Antibody portions, such as Fab and F(ab′)₂ fragments, can be prepared from whole antibodies using conventional techniques, such as papain or pepsin digestion, respectively, of whole antibodies. Moreover, antibodies, antibody portions and immunoadhesion polypeptides can be obtained using standard recombinant DNA techniques, as described herein.

[0547] Antibodies may be polyclonal or monoclonal; xenogeneic, allogeneic, or syngeneic; or modified forms thereof (e.g. chimeric, etc.). Antibodies may also be fully ruminant. The terms “monoclonal antibodies” and “monoclonal antibody composition,” as used herein, refer to a population of antibody polypeptides that contain only one species of an antigen binding site capable of immunoreacting with a particular epitope of an antigen, whereas the term “polyclonal antibodies” and “polyclonal antibody composition” refer to a population of antibody polypeptides that contain multiple species of antigen binding sites capable of interacting with a particular antigen. A monoclonal antibody composition typically displays a single binding affinity for a particular antigen with which it immunoreacts.

[0548] The present disclosure includes a monoclonal antibody that works particularly well in binding and neutralizing at least one methanogen. Upon immunizing a ruminant population (e.g., of milk-producing ruminant), the milk comprising the antibody can be screened for antibodies with superior activity (e.g., specific binding, neutralizing at least one methanogen, etc.). The amino acid sequence of such antibodies can be determined (e.g., mass spec-based sequencing, Next Gen Sequencing, or other methods known in the art), their expressing DNA vectors can be synthesized, and monoclonal antibodies can be produced. One or a combination of at least two or more antibodies can be added to the drinking water and/or animal feed, and be given to a ruminant population.

[0549] Alternatively, such monoclonal antibodies can be generated by immunizing a vehicle animal (e.g., mouse, rabbit, etc.), and hybridomas expressing the animals can be recovered. Standard hybridoma methods for producing antibodies are described in, e.g., Harlow and Lane (eds.), Antibodies: A Laboratory Manual, CSH Press (1988), and CA. Janeway et al. (eds.), Immunobiology, 5^{th} Ed., Garland Publishing, New York, NY (2001)). Antibodies produced by hybridomas can be screened and utilized according to the methods described above and herein.

[0550] In some embodiments, the antibody is a polyclonal antibody. In some embodiments, the antibody is a monoclonal antibody. In some embodiments, the antibody is an IgG or IgA. In some embodiments, the antibody is IgA. The IgA isoform, at least in cattle, may be more stable in the rumen. For example, IgA levels in cattle saliva were reduced by only 40% after 8 h exposure to rumen contents while IgG levels were reduced by 80%.

[0551] In some embodiments, the antibody is lyophilized. In some embodiments, the antibody is in a pharmaceutical composition of the present disclosure or those known in the art. In some embodiments, a composition comprising an antibody further comprises at least one excipient and/or carrier. In some embodiments, the antibody is in the animal feed. In some embodiments, the antibody is in the solid animal feed. In other embodiments, the antibody is in the liquid animal feed. In some embodiments, the antibody is in the drinking water or milk. In preferred embodiments, the antibody is orally consumed by a ruminant such that the antibody comes in contact with at least one methanogen present in the gut of the ruminant. In preferred embodiments, oral administration of the antibody reduces the number and/or type of at least one methanogen.

### Methods for Detection of Antibody

[0552] In certain embodiments, an efficacious vaccine produces an antibody titer of greater than 1:40, greater that 1:100, greater than 1:400, greater than 1:1000, greater than 1:2000, greater than 1:3000, greater than 1:4000, greater than 1:500, greater than 1:6000, greater than 1:7500, greater than 1:10000. In some embodiments, the antibody titer is produced or reached by 10 days following vaccination, by 20 days following vaccination, by 30 days following vaccination, by 40 days following vaccination, or by 50 or more days following vaccination. In some embodiments, the titer is produced or reached following a single dose of vaccine administered to the subject. In other embodiments, the titer is produced or reached following multiple doses, e.g., following a first and a second dose (e.g., a repeat dose.)

[0553] In certain aspects, antigen-specific antibodies are measured in units of pg/ml or are measured in units of IU/L (International Units per liter) or mIU/ml (milli International Units per ml). In some embodiments of the invention, an efficacious vaccine produces >0.5 pg/ml, >0.1 pg/ml, >0.2 pg/ml, >0.35 pg/ml, >0.5 pg/ml, >1 pg/ml, >2 pg/ml, >5 pg/ml or >10 pg/ml. In some embodiments, an efficacious vaccine produces >10 mIU/ml, >20 mIU/ml, >50 mIU/ml, >100 mIU/ml, >200 mIU/ml, >500 mIU/ml or >1000 mIU/ml.

[0554] Methods of detecting the presence of antibodies are well known in the art.

[0555] In some embodiments, antibody level or concentration is determined or measured by neutralization assay, e.g., neutralization of at least one methanogen.

[0556] Other exemplary methods include, but are not limited to, immunodiffusion, immunoelectrophoresis, radioimmunoassay (RIA), enzyme-linked immunosorbent assays (ELISAs; including variants such as competitive ELISA, sandwich ELISA, etc.), immunofluorescent assays, Western blotting, immunohistochemical techniques, agglutination, complement assays, high performance liquid chromatography (HPLC), thin layer chromatography (TLC), hyperdiffusion chromatography, and the like (e.g., Basic and Clinical Immunology, Sites and Terr, eds., Appleton and Lange, Norwalk, Conn. pp 217-262, 1991 which is incorporated by reference).

[0557] For example, ELISA and RIA procedures may be conducted such that a desired protein standard (e.g., an extracellular domain of at least one cell surface protein or a fragment thereof of at least one methanogen) is labeled (with a radioisotope such as ¹²⁵I or 3sS, or an assayable enzyme, such as horseradish peroxidase or alkaline phosphatase), and is brought into contact with a sample comprising the antibody, whereon the amount of the labeled protein standard bound to the antibody is measured.

[0558] Enzymatic and radiolabeling of a protein and/or the antibodies may be effected by conventional means. Such means will generally include covalent linking of the enzyme to the antigen or the antibody in question, such as by glutaraldehyde, specifically so as not to adversely affect the activity of the enzyme, by which is meant that the enzyme must still be capable of interacting with its substrate, although it is not necessary for all of the enzyme to be active, provided that enough remains active to permit the assay to be effected. Indeed, some techniques for binding enzymes are non-specific (such as using formaldehyde), and will only yield a proportion of active enzyme.

[0559] It may be desirable to immobilize one component of the assay system on a support, thereby allowing other components of the system to be brought into contact with the component and readily removed without laborious and time-consuming labor. It is possible for a second phase to be immobilized away from the first, but one phase is usually sufficient.

[0560] It is possible to immobilize the enzyme itself on a support, but if solid-phase enzyme is required, then this is generally best achieved by binding to antibody and affixing the antibody to a support, models and systems for which are well-known in the art. Simple polyethylene may provide a suitable support.

[0561] Enzymes employable for labeling are not particularly limited, but may be selected from the members of the oxidase group, for example. These catalyze production of hydrogen peroxide by reaction with their substrates, and glucose oxidase is often used for its good stability, ease of availability and cheapness, as well as the ready availability of its substrate (glucose). Activity of the oxidase may be assayed by measuring the concentration of hydrogen peroxide formed after reaction of the enzyme-labeled antibody with the substrate under controlled conditions well-known in the art.

### Milk

[0562] In certain aspects, provided herein are milk and derivatives thereof. Milk produced by vaccinated female ruminants (e.g., dairy cows) comprises antibodies that bind at least one cell surface protein or a fragment thereof of at least one methanogen. Such milk can be orally consumed by ruminants such that the antibodies therein can come in contact with at least one methanogen present in the gut of the ruminants. Upon contact, the antibodies in the milk can neutralize the at least one methanogen and contribute to reducing methane production by the ruminants.

[0563] In some embodiments, the milk is pasteurized and/or homogenized. In some embodiments, the milk is lyophilized, filtered, concentrated, evaporated, or processed to form dry milk powder (e.g., boiling at low pressure at low temperature). In some embodiments, said processing may allow longer shelf life of the milk/milk product and the antibodies present therein. In some embodiments, the fat content is removed/reduced from the milk. Processing of milk and/or preparation of derivatives of milk are well known in the art.

[0564] Appropriate care is taken to preserve the structural and functional (e.g., binding a methanogen) aspects of the antibodies. For example, in some embodiments, high pressure (˜200 MPa) and low temperature (−4° C.) are used throughout the process as described at least by Kim et al. (2008) Journal of Dairy Science, 91:4176-4182. In other embodiments, milk may be pasteurized at low-temperature of 60° C. for 10 minutes at standard pressure. These conditions may pasteurize milk without significantly altering the antibody function.

[0565] Alternatively, milk can be filtered to remove microorganisms instead of pasteurizing. Microfiltration is a process that replaces pasteurization and produces milk with fewer microorganisms and longer shelf life without a change in the quality of the milk. In this process, cream is separated from the skimmed milk and the skimmed milk is forced through ceramic microfilters that trap 99.9% of microorganisms in the milk (as compared to 99.999% killing of microorganisms in standard high temperature short time pasteurization).

[0566] Ultrafiltration uses finer filters than microfiltration, which allow lactose and water to pass through while retaining fats, calcium and protein. As with microfiltration, the fat may be removed before filtration and added back in afterwards. Ultrafiltered milk is used widely in the industry in cheesemaking.

### Animal Feed

[0567] Provided herein are animal feeds that are useful in reducing methane production by a ruminant. Such animal feed may be used in combination with any one of vaccines, antibodies, milk, agents (e.g., an agent that reduces methane production in a ruminant, a probiotic bacterial strain, a small molecule inhibitor, etc.), or other compositions of the present disclosure (e.g., those reducing methane production in a ruminant). Animal feed comprises at least one feed additive, which reduces the methane production in a ruminant.

[0568] In some embodiments, the animal feed comprises an antibody that binds at least one cell surface antigen or a fragment thereof of at least one methanogen.

[0569] In some embodiments, the animal feed comprises a composition comprising an antibody that binds at least one cell surface antigen or a fragment thereof of at least one methanogen. For example, the animal feed may comprise milk or derivatives thereof comprising said antibody.

[0570] In some embodiments, the animal feed is liquid (e.g., drinking water, milk). An antibody that binds at least one cell surface antigen or a fragment thereof of at least one methanogen or a composition comprising same may be added to the liquid animal feed (e.g., drinking water) before being given to the ruminant. In some embodiments, said antibody or a composition comprising same may be added to the drinking water. In other embodiments, the milk or derivatives thereof comprising said antibody may be given directly to the ruminant, or added to other liquid animal feed (e.g., drinking water).

[0571] In other embodiments, the animal feed is solid. In some such embodiments, the animal feed may comprise hay, straw, silage, compressed and pelleted feeds, oils and mixed rations, and sprouted grains and legumes. An antibody that binds at least one cell surface antigen or a fragment thereof of at least one methanogen or a composition comprising same may be added to the solid animal feed before being given to the ruminant.

[0572] In some embodiments, an animal feed may comprise fats and fatty acids that further aid in reducing methane production in ruminants. Based on a meta-analysis, fat supplementation reduced CH₄ by 3.77% in cattle and 4.30% in sheep per 1% dietary fats. Fat decreases CH₄ production (expressed as g/kg digestible dry matter (DM)) more from sheep than from cattle, which was attributed to the comparatively lower depression of DM digestion together with numerically larger depression of CH₄ production (g/kg DM) by fat in sheep. Among fatty acids, C12:0, C18:3 and other polyunsaturated fatty acids (PUFA) are more potent than saturated fatty acids. The CH4-suppressing efficacy of fats generally persists, with persistent suppression being noted for 72 days and longer in cattle.

[0573] Fats supplemented up to 6% of the diet (DM) can also improve milk production while appreciably decreasing CH₄ emissions (15%) in cattle, but higher concentrations decreased production efficiency due to a reduction of feed digestion and fermentation. Medium-chain fatty acids (MCFA) and PUFA can lower abundance and metabolic activities of rumen methanogens and change their species composition. PUFA can also directly inhibit protozoa and serve as hydrogen sink through biohydrogenation. Both MCFA and PUFA appear to damage the cell membrane, thereby abolishing the selective permeability of cell membrane, which is required for survival and growth of methanogens and other microbes. The inhibitory effect of fat on methanogenesis is more pronounced in cattle fed concentrate-based diets than in cattle fed forage-based diets. Because C12: and C14:0 is more inhibitory to M. ruminantium at pH 5 than at pH 7, the concentrate level-dependent anti-methanogenic efficacy of MCFA and PUFA is probably attributed to the lower pH associated with high-concentrate diets.

[0574] In some embodiments, the animal feed comprises fat and/or fatty acid. In some embodiments, the animal feed comprises fat and/or fatty acid that is at least about 1%, 2%, 3%, 4%, 5%, or 6% of the diet (e.g., diet based on dry matter).

[0575] Numerous animal feed and feed additives are known in the art. Any agent that reduce methane production in a ruminant (e.g., small molecule inhibitors, e.g., Table 8B, probiotic bacterial strain, etc.; see below) described herein or those known in the art may be used as a feed additive. Certain exemplary feed additives include: berberine, nitrate, eucalyptus oil, alliin, diallyl disulfide (DADS), flavanone glycoside (e.g., neohesperidin, isonaringin, poncirin, hesperidin), 3-nitrooxypropanol, rac-4-Phenylbutane-1,2-diyl dinitrate, 2-(hydroxymethyl)-2-(nitrooxymethyl)-1,3-propanediol, N-ethyl-3-nitro-oxy-propionic sulfonyl amide, 5-nitrooxy-pentanenitrile, 5-nitrooxy-pentane, 3-nitro-oxy-propyl propionate, 1,3-bis-nitrooxypropane, 1,4-bis-nitrooxybutane, 1,5-bis-nitrooxypentane, 3-nitro-oxy-propyl benzoate, 3-nitro-oxy-propyl hexanoate, 3-nitro-oxy-propyl 5-nitro-oxy-hexanoate, benzylnitrate, isosorbid-dinitrate, N-[2-(nitrooxy)ethyl]-3-pyridinecarboxamide, 3-nitrooxy propionic acid, methyl-3-nitrooxy propionate, ethyl-3-nitrooxy propionate, ethyl-4-nitrooxy butanoate, ethyl-3-nitrooxy butanoate, 5-nitrooxy pentanoic acid, ethyl-5-nitrooxy pentanoate, 6-nitrooxy hexanoic acid, ethyl-6-nitrooxy hexanoate, ethyl-4-nitrooxy-cyclohexylcarboxylate, 8-nitrooxy octanoic acid, ethyl-8-nitrooxy octanoate, 11-nitrooxy undecanoic acid, ethyl-11-nitrooxy undecanoate, 5-nitrooxy-pentanoic amide, 5-nitrooxy-N-methyl-pentanoic amide, lauric acid, and haloform (e.g., bromoform, chloroform, iodoform).

Agents that Reduce Methane Production in Ruminants

### Combination Treatment

[0576] Vaccines, antibodies, milk, animal feed, and agents (e.g., an agent that reduces methane production in a ruminant, a probiotic bacterial strain, etc.) may be administered to a ruminant in any combination. By “in combination with,” it is not intended to imply that the agents must be administered at the same time and/or formulated for delivery together, although these methods of delivery are within the scope of the present disclosure. Compositions can be administered concurrently with, prior to, or subsequent to, one or more other desired therapeutics or medical procedures. In general, each agent (vaccines, antibodies, milk, animal feed, agents that reduce methane production in a ruminant) will be administered at a dose and/or on a time schedule determined for that agent. In some embodiments, the present disclosure encompasses the delivery of combinations that may improve immune response against at least one methanogen, and/or reduce methane production by a ruminant.

[0577] The combinations can conveniently be presented for use in the form of a pharmaceutical formulation and thus pharmaceutical compositions comprising a combination as defined above together with a pharmaceutically acceptable diluent or carrier represent a further aspect of the invention.

[0578] The individual compounds of such combinations can be administered either sequentially or simultaneously in separate or combined pharmaceutical formulations.

[0579] It will further be appreciated that (vaccines, antibodies, milk, animal feed, agents that reduce methane production in a ruminant) in combination may be administered together in a single composition or administered separately in different compositions. In general, it is expected that agents utilized in combination with be utilized at levels that do not exceed the levels at which they are utilized individually. In some embodiments, the levels utilized in combination will be lower than those utilized individually. In some embodiments, the combinations, each or together may be administered according to the split dosing regimens described herein.

[0580] The term “conjoint” or “combination” administration, as used herein, refers to the administration of two or more agents that aid in reducing methane production in a ruminant. The different agents comprising the combination may be administered concomitant with, prior to, or following the administration of one or more agents.

[0581] In certain embodiments, combination administration can demonstrate synergisms between the two or more agents resulting in a greater methane reduction in ruminant than either agent alone.

[0582] Synergistic effects, also known as synergy, refer to the phenomenon where the combined effect of two or more factors or components is greater than the sum of their individual effects. In other words, when these factors or components interact, they create an amplified or enhanced effect that is greater than what would be expected based on their individual contributions.

[0583] In certain cases, the agents may have different modes of action or mechanisms by which they exert their effects, for example targeting different methanogens or different methanogen enzymes. When these agents are combined, their actions can complement each other, targeting different aspects of a problem or working on multiple pathways simultaneously. This complementary action enhances their overall effectiveness, resulting in a better outcome than either agent could achieve alone.

[0584] In certain cases, synergism can significantly enhance the efficacy of the agents involved. For example, the agents may interact in a way that enhances their absorption, distribution, or bioavailability, increasing their effectiveness in treating a particular condition.

[0585] In certain cases, one agent may enhance the effects of the other without contributing much individually. This is known as potentiation. The presence of one agent can increase the uptake, binding affinity, or sensitivity of the other, making it more potent and effective. The combined effect is greater than what would be achieved by either agent on its own.

[0586] In certain cases, one or more agents may have inherent weaknesses or face resistance from target organisms or systems. By combining them with another agent, the synergistic interaction can bypass or counteract these obstacles, leading to a more effective outcome. For example, antibodies generated via vaccination of a first vaccine may face resistance to ruminal proteases, thus, combining with protease inhibitors or one or more additional vaccine towards certain ruminal proteases may reduce the resistance of the first vaccine.

[0587] In certain cases, combining two agents can amplify the positive effects or benefits they provide individually. For example, combining a vaccine for a methanogen with a vaccine towards a separate microorganism that is syntropic with the methanogen can amplify the positive effects or benefits of the vaccine by further reducing the fitness of the methanogen.

[0588] The level of synergism achieved when combining agents depends on numerous factors and is typically assessed through experimental studies or empirical observations specific to the agents and desired outcomes. Generally, combination of agents can lead to different degrees of synergisms ranging from No synergism to Supra-additive synergism.

[0589] No Synergism: In some cases, the combined effect of two or more agents may simply be additive or even less than additive. This means that the combined effect is equal to the sum of their individual effects or even lower. In such instances, no synergism is observed, and the agents may not interact in a way that amplifies their effects.

[0590] Mild to Moderate Synergism: A common outcome when combining agents is a mild to moderate level of synergism. This implies that the combined effect is greater than the sum of their individual effects, but not dramatically so. The degree of synergism may vary depending on the specific agents and the conditions of their interaction.

[0591] Strong Synergism: In some cases, the combination of agents can lead to a strong synergistic effect. This means that the combined effect is significantly greater than the sum of their individual effects. Strong synergism often results in an amplified and more potent effect, exceeding what would be expected based on the additive effects of the individual agents.

[0592] Supra-additive Synergism: In rare instances, the combined effect of two or more agents can be supra-additive, meaning it surpasses even strong synergism. Supra-additive synergism results in an exceptionally powerful effect that far exceeds the sum of the individual effects. Such cases are usually considered highly beneficial, as they can provide remarkable outcomes in terms of efficacy, efficiency, or other desired parameters.

[0593] Any suitable degree of synergism (%_{Synergism}) can be demonstrated with a combination therapy comprising a nucleic acid vaccine and another agent, such as an improvement of at least 5, 10, 20, 30, 40, 50, 60, 70, 80, 90, 100, 200, 300, or 400% and/or not more than 10, 20, 30, 40, 50, 60, 70, 80, 90, 100, 200, 300, 400, 500, or 1000%, for example 5-1000%, preferably 10-500%, more preferably 30-300%. In certain embodiments, the improvement is measured in the amount of methane reduced when administered a combination therapy as compared to either agent alone, for example % _{Synergism}=Methane_{combo}*(Methane_{vaccine})⁻¹. In certain embodiments, the % _{Synergism} is measured in a herd of at least 10, 20, 30, 40, 50, 60, 70, 80, 90, 100, 500, or 1000 animals and/or not more than 20, 30, 40, 50, 60, 70, 80, 90, 100, 500, 1000, or 2000 animals and the statistical significance, e.g., coefficient of variation of % _{Synergism} within the herd is at least 50, 60, 70, 75, 80, 85, 90, 95, 99, 99.5, or 100%.

[0594] In certain embodiments, the synergism resulting from the combinatorial therapy results in a prolonged efficacy of the treatment as compared to either alone. In certain embodiments, the combinatorial therapy is effective for at least 1, 2, 3, 4, 5, 6, 7, 8, 9, 10, 11, 12, 16, or 20 months and/or not more than 2, 3, 4, 5, 6, 7, 8, 9, 10, 11, 12, 16, 20, or 24 months, for example 1-24 months. In certain embodiments, the length of efficacy of the treatment is at least 5, 10, 20, 30, 40, 50, 60, 70, 80, 90, 100, 200, 300, or 400% and/or not more than 10, 20, 30, 40, 50, 60, 70, 80, 90, 100, 200, 300, 400, 500, or 1000% greater than either agent alone, for example 5-1000%, preferably 10-500%, more preferably 30-300%.

[0595] An exemplary combinatorial therapy includes vaccination with a first vaccine encoding one or more methanogen surface proteins in combination with at least one additional vaccine encoding one or more of different methanogen surface proteins.

[0596] Another exemplary combinatorial therapy includes vaccination with a vaccine encoding one or more methanogen surface proteins in combination with administration of a small molecule inhibitor of methanogenesis. Without wishing to be bound to theory, it is hypothesized that the small molecule inhibitor of methanogenesis may remove the plurality of ruminal methanogens, and antibodies generated from the vaccination prevent new methanogens for colonizing the methanogen-deficient rumen.

[0597] Accordingly, in certain aspects, a vaccine of the present disclosure is administered to a ruminant conjointly or in a combination with at least one inhibitor of methane production described herein or those known in the art. In some embodiments, the at least one inhibitor is selected from Table 8B.

[0598] In some embodiments, the at least one inhibitor is administered to a ruminant at least 1, 2, 3, 4, 5, 6, 7, 8, 9, 10, 11, 12, 13, 14, 15, 16, 17, 18, 19, 20, 21, 22, 23, 24, 25, 26, 27, 28, 29, 30, 31, 32, 33, 34, 35, 36, 37, 38, 39, 40, 41, 42, 43, 44, 45, 46, 47, 48, 49, or 50 times. In some embodiments, the at least one inhibitor is administered to a ruminant daily, semiweekly, weekly, biweekly (every 2 weeks), monthly, semiannually, or annually. In some embodiments, the at least one inhibitor is administered to a ruminant every 1, 2, 3, 4, 5, 6, 7, 8, 9, 10, 11, 12, 13, 14, 15, 16, 17, 18, 19, 20, 21, 22, 23, 24, 25, 26, 27, 28, 29, 30, 31, 32, 33, 34, 35, 36, 37, 38, 39, 40, 41, 42, 43, 44, 45, 46, 47, 48, 49, 50, 51, 52, 53, 54, 55, 56, 57, 58, 59, 60, 61, 62, 63, 64, 65, 66, 67, 68, 69, 70, 71, 72, 73, 74, 75, 76, 77, 78, 79, 80, 81, 82, 83, 84, 85, 86, 87, 88, 89, or 90 days. In some embodiments, the at least one inhibitor is administered to a ruminant for a duration of at least, about, or no more than 1, 2, 3, 4, 5, 6, 7, 8, 9, 10, 11, 12, 13, 14, 15, 16, 17, 18, 19, 20, 21, 22, 23, 24, 25, 26, 27, 28, 29, 30, 31, 32, 33, 34, 35, 36, 37, 38, 39, 40, 41, 42, 43, 44, 45, 46, 47, 48, 49, or 50 weeks. In some embodiments, the at least one inhibitor is administered to a ruminant for at least 1 week but no more than 1 month. In some embodiments, the at least one inhibitor is administered to a ruminant orally, intravenously, intramuscularly, or subcutaneously. In preferred embodiments, the at least one inhibitor is administered to a ruminant orally. In some embodiments, the at least one inhibitor is administered to a ruminant as a feed additive.

[0599] In some embodiments, the at least one inhibitor is administered to a ruminant concomitant with, prior to, or following the vaccination with a vaccine of the present disclosure. In some embodiments, the at least one inhibitor is administered to a ruminant on the same day as the ruminant is vaccinated. In some embodiments, a ruminant is administered with the at least one inhibitor one or more times to reduce the methane production by the ruminant, and said ruminant is vaccinated as a maintenance regimen.

[0600] In some embodiments, the at least one inhibitor comprises 3-NOP. In some embodiments, a ruminant is administered at least about or no more than 0.1, 0.2, 0.3, 0.4, 0.5, 0.6, 0.7, 0.8, 0.9, 1,2, 3, 4, 5, 6, 7, 8, 9, 10, 11, 12, 13, 14, 15, 16, 17, 18, 19, 20, 21, 22, 23, 24, 25, 26, 27, 28, 29, 30, 31, 32, 33, 34, 35, 36, 37, 38, 39, 40, 41, 42, 43, 44, 45, 46, 47, 48, 49, or 50 grams (g) of 3-NOP per dose. In some embodiments, 3-NOP is administered to a ruminant every 1, 2, 3, 4, 5, 6, 7, 8, 9, 10, 11, 12, 13, 14, 15, 16, 17, 18, 19, 20, 21, 22, 23, 24, 25, 26, 27, 28, 29, 30, 31, 32, 33, 34, 35, 36, 37, 38, 39, 40, 41, 42, 43, 44, 45, 46, 47, 48, 49, 50, 51, 52, 53, 54, 55, 56, 57, 58, 59, 60, 61, 62, 63, 64, 65, 66, 67, 68, 69, 70, 71, 72, 73, 74, 75, 76, 77, 78, 79, 80, 81, 82, 83, 84, 85, 86, 87, 88, 89, or 90 days.

[0601] In some embodiments, at least about 0.5 g but no more than 25 g of 3-NOP is administered to a ruminant in a given day. In preferred embodiments, about 2.5 g of 3-NOP is administered to a ruminant in a given day. In some embodiments, about 2.5 g of 3-NOP is administered to a ruminant per day for at least 1, 2, 3, 4, 5, 6, 7, 8, 9, 10, 11, 12, 13, 14, 15, 16, 17, 18, 19, 20, 21, 22, 23, 24, 25, 26, 27, 28, 29, or 30 days.

TABLE 8B
Exemplary methanogenesis inhibitor

| Chemical | Reference |
|---|---|
| 1,3-bis-nitrooxypropane | US10154981B2 |
| 1,3-bis-nitrooxypropane | US9266814B2 |
| 1,4-bis-nitrooxybutane | US10806706B2 |
| 1,4-bis-nitrooxybutane | US10154981B2 |
| 1,4-bis-nitrooxybutane | US9266814B2 |
| 1,5-bis-nitrooxypentane | US10806706B2 |
| 1,5-bis-nitrooxypentane | US10154981B2 |
| 1,5-bis-nitrooxypentane | US9266814B2 |
| 11-nitrooxy undecanoic acid | US9365489B2 |
| 11-nitrooxy undecanoic acid | US10154981B2 |
| 2 mercaptoethanesulfonate | EP2747181A1 |
| 2-bromoethane sulfonic acid (2-BESA) | EP2747181A1 |
| 2-bromoethane sulphonate | US6251879B1 |
| 2-chloroethanesulfonate | EP2747181A1 |
| 2-nitropropanol | EP2747181A1 |
| 3-nitro-oxy-propyl 5-nitro-oxy-hexanoate | US10154981B2 |
| 3-nitro-oxy-propyl benzoate | US10154981B2 |
| 3-nitro-oxy-propyl hexanoate | US10154981B2 |
| 3-nitro-oxy-propyl propionate | US10154981B2 |
| 3-nitrooxy propionic acid | US9365489B2 |
| 3-nitrooxy propionic acid | US10154981B2 |
| 3-nitrooxy-propyl 5-nitrooxy-hexanoate | US9266814B2 |
| 3-nitrooxy-propyl benzoate | US9266814B2 |
| 3-nitrooxy-propyl hexanoate | US9266814B2 |
| 3-nitrooxy-propyl propionate | US9266814B2 |
| 3-nitrooxypropanol | US10806706B2 |
| 3-nitrooxypropanol | US10154981B2 |
| 3-nitrooxypropanol | US9266814B2 |
| 5-nitrooxy hexanoic acid | US10806706B2 |
| 5-nitrooxy pentanoic acid | US10806706B2 |
| 5-nitrooxy pentanoic acid | US9365489B2 |
| 5-nitrooxy pentanoic acid | US10154981B2 |
| 5-nitrooxy-N-methyl-pentanoic amide | US9365489B2 |
| 5-nitrooxy-N-methyl-pentanoic amide | US10154981B2 |
| 5-nitrooxy-N-pentanoic amide | US9365489B2 |
| 5-nitrooxy-pentane | US10154981B2 |
| 5-nitrooxy-pentane | US9266814B2 |
| 5-nitrooxy-pentanenitrile | US10154981B2 |
| 5-nitrooxy-pentanenitrile | US9266814B2 |
| 5-nitrooxy-pentanoic amide | US10154981B2 |
| 6-nitrooxy hexanoic acid | US9365489B2 |
| 6-nitrooxy hexanoic acid | US10154981B2 |
| 8-nitrooxy octanoic acid | US9365489B2 |
| 8-nitrooxy octanoic acid | US10154981B2 |
| 9-nitrooxynonanol | US10806706B2 |
| abietic acid | US10799544B2 |
| acetylene | EP2747181A1 |
| ajoene | US20220256890A1 |
| Alcaligenes faecalis | US20140072535A1 |
| allicin | US20220256890A1 |
| alliin | US20220256890A1 |
| allylpropyl disulfide | US20220256890A1 |
| Asparagopsis armata | US10881697B2 |
| Bacillus amyloliquefaciens | WO2021211548A1 |
| Bacillus strain 300 (NRRL No. B-50943) | US20210360945A1 |
| Bacillus strain 86 (NRRL No. B-50944) | US20210360945A1 |
| Bacillus, Lactobacillus, Strptococcus, Candida and Pichia | WO2007072935A1 |
| bambermycin | AU2018229465A1 |
| benzylnitrate | US10154981B2 |
| berberine, nitrate, and eucalyptus oil | US10440975B2 |
| bis-(2-nitrooxyethyl) ether | US9266814B2 |
| bis(2-hydroxyethyl)amine dinitrate | US10806706B2 |
| bromochloromethane | US6251879B1 |
| Bromoforms | US20220175670A1 |
| chloroform | EP2747181A1 |
| Chloroforms | US20220175670A1 |
| Cysteine | US5843498A |
| dehydoabietic acid | US10799544B2 |
| diallyl disulfide | US20180093308A1 |
| diallyl disulphide | US20220256890A1 |
| diallyl trisulfide | US20180093308A1 |
| diallyl trisulfide | US20220256890A1 |
| egg powder from immunizing hens with methane-producing M. | US7820171B2 |
| stadtmaniae methanogens | |
| Eggs laid by hens innoculated with methanogen antigens | US20200121730A1 |
| essential oil | US20180001358A1 |
| ethyl 2 butynoate | EP2747181A1 |
| ethyl propionate | US20180093308A1 |
| ethyl-11-nitrooxy undecanoate | US9365489B2 |
| ethyl-11-nitrooxy undecanoate | US10154981B2 |
| ethyl-3-nitrooxy butanoate | US10154981B2 |
| ethyl-3-nitrooxy propionate | US9365489B2 |
| ethyl-3-nitrooxy propionate | US10154981B2 |
| ethyl-3-nitrooxy-butanoate | US9365489B2 |
| ethyl-4-nitrooxy butanoate | US10154981B2 |
| ethyl-4-nitrooxy-butanoate | US9365489B2 |
| ethyl-4-nitrooxy-cyclohexylcarboxylate | US9365489B2 |
| ethyl-4-nitrooxy-cyclohexylcarboxylate | US10154981B2 |
| ethyl-5-nitrooxy pentanoate | US9365489B2 |
| ethyl-5-nitrooxy pentanoate | US10154981B2 |
| ethyl-6-nitrooxy hexanoate | US9365489B2 |
| ethyl-6-nitrooxy hexanoate | US10154981B2 |
| ethyl-8-nitrooxy octanoate | US9365489B2 |
| ethyl-8-nitrooxy octanoate | US10154981B2 |
| ethylene | EP2747181A1 |
| eugenol | US7763273B2 |
| fluoroacetate | EP2747181A1 |
| fluvastatin | EP2747181A1 |
| halothane | US6251879B1 |
| hesperidin | EP2838376B1 |
| hop acid | US8197863B2 |
| hydrogen peroxide | WO2010071222A1 |
| hydroxycinnamic acid | WO2021038832A1 |
| Impatiens balsamina | NZ562783A |
| Iodoforms | US20220175670A1 |
| isonaringin | EP2838376B1 |
| isopimaric acid | US10799544B2 |
| isosorbid-dinitrate | US10154981B2 |
| isosorbid-dinitrate | US9266814B2 |
| laidlomycin | AU2018229465A1 |
| lasalocid | AU2018229465A1 |
| limonene | US7763273B2 |
| lovastatin | EP2747181A1 |
| lumazine | EP2747181A1 |
| medium and long chain fatty acids | EP2747181A1 |
| Megasphaera sp. & Coprococcus catus | US10961559B2 |
| methyl chloride | EP2747181A1 |
| methyl fluoride | EP2747181A1 |
| methyl-3-nitrooxy propionate | US9365489B2 |
| methyl-3-nitrooxy propionate | US10154981B2 |
| mevastatin | EP2747181A1 |
| Monascus sp. | US20130011384A1 |
| monensin | AU2018229465A1 |
| N-[2-(nitrooxy)ethyl]-3-pyridinecarboxamide | US10154981B2 |
| N-[2-(nitrooxy)ethyl]-3-pyridinecarboxamide | US9266814B2 |
| N-ethyl-3-nitro-oxy-propionic sulfonyl amide | US10154981B2 |
| neoabietic acid | US10799544B2 |
| neohesperidin | EP2838376B1 |
| nitrate | EP2747181A1 |
| nitrite | EP2747181A1 |
| nitroethane | EP2747181A1 |
| palustric acid | US10799544B2 |
| Peroxide source, peroxidase | US20210227850A1 |
| phosphate | EP2747181A1 |
| pimaric acid | US10799544B2 |
| poncirin | EP2838376B1 |
| Propionibacterium | US20120276058A1 |
| propynoic acid | EP2747181A1 |
| protease-resistant bacteriocin | EP1673983A1 |
| R(OC2H4)n(OH); R = C12-15; n = 7 | AU2013288441B2 |
| R1(CH2)nONO2; n = 1-15; R1 = H, C1-C6alkyl, phenyl, —OH, | US10806706B2 |
| —NH2, —CN, —COOH, —O(C═O)R8, —NHC(═O)R8, | |
| SO2NHR8, or —ONO2; R8 = C1-C6alkyl, phenyl, pyridyl; when | |
| n is >3 the hydrocarbon chain may be interrupted by —O— or | |
| —NH— | |
| rac-4-Phenylbutane-1,2-diyl dinitrate, 2-(hydroxymethyl)-2- | US10154981B2 |
| (nitrooxymethyl)-1,3-propanediol | |
| red yeast rice | US20140322798A1 |
| s-allyleysteine | US20220256890A1 |
| saponin | US20180001358A1 |
| Saponin & medium chain fatty acid | US10695393B2 |
| sodium bromoethenesulfonate (BES) | EP2747181A1 |
| vinyldithiines | US20220256890A1 |
| ω-nitrooxyC3-10alkane-1-ol | US20210392922A1 |
| [chemical structure] | US9365489B2 |
| [chemical structure] | WO2022103280A1 |
| [chemical structure] | US20160183564A1 |
| [chemical structure] | EP3628169A1 |
| [chemical structure] | US20210163397A1 |
| [chemical structure] | WO2020221805A1 |
| [chemical structure] | AU2018383221A1 |
| [chemical structure] | US20030219467A1 |
| Asparagopsis taxiformis | USPP34607P3 |
| Lauric acid | |

*Each of the references in Table 8B is incorporated herein by reference.

Other exemplary inhibitors of methane production are discussed below.
Probiotics that Reduce Methane Production in Ruminants

[0602] Probiotics are a class of beneficial active microorganisms or their cultures. Probiotics are useful in reducing CH4 emissions in ruminants (Table 8C). There are many types of probiotics, and different strains have different inhibitory effects on CH4 emissions. For example, the GA03 strain of Acetobacter is more effective at inhibiting CH4 production than other isolated strains. Most probiotics reduce CH4 production by influencing the activities of ruminal microorganisms, with no adverse effects on animals. In addition, probiotics enhance ruminal fermentation.

[0603] Lactic acid bacteria, which have been used as feed additives for a long time, not only reduce CH4 emissions per unit volatile fatty acid (VFA) output, but also improve the fermentation quality and fiber digestibility of silage. In addition, the denitrifying bacterium Bacillus 79R4 could prevent NO-2-N poisoning and microbial ecosystems from impairing fermentation efficiency. Furthermore, Bacillus licheniformis reduces CH4 production and increases feed energy and protein utilization.

TABLE 8C
Exemplary probiotic bacteria that reduce methane production in ruminants

| | | Addition amount; maximum | |
|---|---|---|---|
| Types of probiotics | Inhibitory effect | suppression methane amount | Inhibition machanism |
| Propionic acid bacillus | * (Most propionic bacteria) | 100 μL of the propionic acid | Unknown |
| | *** (P. jensenii LMGT282 and | bacteria culture (2 × 10⁸ to 4 × 10⁸ | |
| | P. thoenii LMGT2827 or T159) | colony forming units), | |
| | | Propionibacterium thoenii T159; 20% | |
| Lactic acid bacteria | *** | 5.3 lg cfu/g fresh weight, | Hydrogen consumption |
| | | Lactobacillus plantarum, 8.8 ml/g(72 h) | |
| Acetic acid bacteria | *** | 1% Proteiniphilum acetatigenes | Reduced the number of |
| | | GA03; — | methanogens |
| Enterococcus faecium | *** | 0.19%; 2.08 mM/mL | Alters microbial flora |
| SROD | | | |
| Probiotic products | *** | 2 g probiotic products in | Reduce the number of |
| of Ruminococcus | | powder; 1.2 ml/g of dry matter | rumen protozoa |
| flavefaciens | | 10 ml probiotic products in liquid; | |
| | | 1.2 ml/g of dry matter | |
| Bacillus licheniformis | *** | 2.5 × 10⁹; 2.7 L/d | Unknown |
| Saccharomyces | ** (Pedraza-Hernandez et al., 2019) | — | Affects rumen microbes |
| cerevisiae | * (Darobigone et al., 2019) | | |

Prebiotics that Reduce Methane Production in Ruminants

[0604] Prebiotics are substances that are not easily digested or absorbed by the host. They selectively stimulate the growth and activity of one or several ruminal microorganisms with a positive effect on ruminal fermentation. Prebiotics suppress ruminal CH4 production in ruminants. Prebiotics mainly reduce rumen CH4 production by altering the bacterial community structure, influencing the permeability of the cell walls of methanogenic archaea, and stimulating other bacteria to compete with methanogens for H2 (Table 9).

[0605] The prebiotic chitosan can influence bacterial community structures by altering microbial population compositions, for example, by replacing fibrinolytic enzyme-producing microbes (Firmicutes and Fibrobacteres) with amylolytic enzyme-producing microbes (Bacteroides and Proteus); in turn, reducing CH4 production. Chitosan could influence the ruminal fennentation process by altering VFA distributions and increasing propionic acid concentrations, which reduces CH4 production in turn. However, the reduction in CH4 is associated with the degree of chitosan deacetylation, which could alter the penneability of the methanogen cell wall. In addition, various yeast products could reduce CH4 emissions by stimulating acetic acid-producing bacteria to compete with methanogens or metabolize hydrogen.

TABLE 9
Exemplary prebiotic bacteria that reduce methane production in ruminants

| | | Addition amount; maximum | |
|---|---|---|---|
| Types of prebiotics | Inhibitory effects | methane suppression amount | Inhibition machanism |
| Chitosan | *** | 3000 (molecular weights) | (1) Alters microbial |
| | | dry matter; 22.9% | community structure |
| | | ml/day (Tong et al., 2020) | (Tong et al., 2020) |
| | | 2% Chitosan + 21% of crude | (2) Alters fermentation |
| | | glycerin; 53.67% (Seankamsorn, | pathway (Seankamsorn, |
| | | Cherdthong & Wanapat, 2020) | Cherdthong & |
| | | | Wanapat, 2020) |
| | | | (3) Influences |
| | | | methanogenic bacteria |
| | | | cell wall permeability |
| | | | (Zanferari et al., 2018) |
| Yeast products | *** | 4 mg/l g dry matter; — | Indirect consumption of |
| | | | hydrogen |

Other Agents that Reduce Methane in Ruminants

[0606] Among the CH4 mitigation options, inhibiting the growth or the metabolic activity of methanogens is the most effective approach. Another strategy is to modulate rumen microbiome so that fermentation is shifted toward decreased H₂ production and increased production of reduced VFA (e.g., propionate). Provided herein are exemplary and non-exhaustive descriptions of anti-methanogenic compounds evaluated with a focus on their impact rumen methanogens.

### Coenzyme M Analogs

[0607] Methyl-CoM reductase (Mcr) mediates the final step of all the methanogenesis pathways and CoM (2-mercaptoethanesulfonic acid) is an essential cofactor serving as the methyl group carrier. Mcr reduces methyl-CoM to CH₄. CoM is found in all known methanogens but not in other archaea or bacteria. Several halogenated sulfonated compounds, including 2-bromoethanesulfonate (BES), 2-chloroethanesulfonate (CES), and 3-bromopropanesulfonate (BPS), are structural analogs of CoM, and they can competitively and specifically inhibit Mcr activity, lowering CH₄ production at relatively low concentrations. Different species of methanogens vary in sensitivity to these inhibitors. Of three species tested on BES, Mbb. Ruminantium was the most sensitive, while Methanosarcina mazei was the least sensitive, with Methanomicrobium mobile being intermediate. All three species appeared to be resistant to BPS up to 250 μmol/L in pure cultures. The different sensitivity to these CoM analogs has been attributed to varying ability to uptake these inhibitors into the cells. Methanogens able to synthesize their own CoM are less dependent on external CoM and are thus less sensitive. Mbb. Ruminantium is the only ruminal methanogen that requires CoM synthesized by other methanogens.

Halogenated Aliphatic C₁-C₂ Hydrocarbon

[0608] Halogenated aliphatic compounds with 1 or 2 carbons, such as chloroform, bromochloromethane (BCM), bromoform, bromodichloromethane, dibromochloromethane, carbon tetrachloride, trichloroacetamide, and trichloroethyladipate, can lower ruminal CH₄ production. These halogenated compounds block the function of corrinoid enzymes and inhibit cobamide-dependent methyl group transfer in methanogenesis. These halogenated compounds also competitively inhibit CH₄ production by serving as terminal electron (e) acceptors. Drenching chloroform to cattle inhibited methanogenesis substantially for up to 32 days without affecting feed digestion or basic rumen function. The addition of BCM depressed CH₄ production both in vitro and in vivo. In steers fed grain-based diets, BCM decreased CH₄ production by 50 to 60% with no signs of toxicity or residues in meat. It was also reported that the abundance of total bacteria and protozoa was not changed, but methanogenesis and growth of methanogens were drastically inhibited by BCM in both batch cultures and continuous fermenters. While the commercial use of chloroform, a recognized carcinogen, is not practical, it provides validation for the class of BCM compounds in reducing methane production.

[0609] Some marine plants such as red seaweed, and algae, lichen, and fungi can contain high concentrations of organobromine compounds such as bromomethane and bromoform. A recent in vitro study showed that red seaweed Asparagopsis taxiformis lowered CH₄ production by 99% at a dose of 2% of organic matter substrate. No adverse effect on feed digestion or fermentation was noted at <5% (of dry matter) inclusion. Thus, red seaweed, and probably other organobromine-rich plants, may offer a potentially practical natural approach to mitigate CH₄ emission.

### Nitrooxy Compounds

[0610] 3-Nitrooxypropanol (3NOP) and ethyl-3NOP, two new synthetic compounds, have been shown to have specific anti-methanogenic properties. 3NOP appears to inactive Mcr by competitively binding to the Mcr active site and then oxidizing the Ni¹⁺ that is required for Mcr activity. Feeding of 3NOP at a dose rate of 2.5 g/day/cow mixed in diets decreased CH₄ emission by 60% per kg of DM intake. In a study using beef cattle, 3NOP fed at 2.0 g/day/cow decreased CH₄ yield by 59%, and the inhibition persisted for up to 112 days without much effect on feed intake, nutrient digestibility or total VFA concentrations. In one recent study, 3NOP fed at 40-80 mg/kg feed DM in dairy cows decreased CH₄ production by about 30% persistently for up to 84 days. Similarly, 3NOP fed at 2.5 g/day/cow decreased CH₄ yield by 37% in dairy cows. In sheep, 3NOP at 0.5 g/day also decreased CH₄ production by 29% without adverse effect on digestion or rumen fermentation. However, when 3NOP was directly added to the rumen through rumen cannula at a daily dose of 0.50 or 2.5 g per cow (equivalent to 25 to 125 mg/kg feed dry matter), the degree of CH₄ suppression declined to 7-10%. The later study suggests that 3NOP needs to be fed together with the diet to achieve higher efficacy. Thus, 3NOP could be used to lower CH₄ emission from cows and sheep without adverse effects on nutrient utilization or animal performance. It has been demonstrated that 3NOP indeed decreased methanogen abundance while increasing the abundance of protozoa.

TABLE 10
Exemplary nitrogen-containing compounds that reduce methane production in ruminants

| Types of | Inhibitory | Addition amount; maximum | |
|---|---|---|---|
| nitrogenous compounds | effect | methane suppression amount | Inhibition mechanism |
| Nitrate | *** | 20 mg/g dry matter; 21% | (1) Hydrogen consumption; |
| | | (Alvarez-Hess et al., 2019) | (2) Inhibits the proliferation |
| | | 5 mmol/L; 32.92% | of mathanogens; reduces their |
| | | (Wu et al., 2019) | activity and abundance |
| | | 5 mM; 43.26% Liu et al., 2017) | |
| Encapsulated nitrate (EN) | ** | 70 g/100 kg of body | Reduces methane reducing |
| | | weight; 18.5% CH₄/kg of | bacteria |
| | | forage dry matter intake | |
| | | (Granja-Salcedo et al., 2019) | |
| | | 2.5%; 9.37 mM/d | |
| | | (Capelari et al., 2018) | |
| | | 2.5%; 2.8 g/kg Dry matter intake | |
| | | (Alemu et al., 2019) | |
| Urea and nitrate mixture | ** | 34 g/kg straw dry matter + 6 g/kg | Indirect consumption of hydrogen |
| | | dry matter of ammonium | |
| | | nitrate; 10.2% (Zhang et al., 2019) | |
| | | Urea + ammonium nitrate (34 + | |
| | | 6 g/kg of dry matter, respectively); | |
| | | 3.1 mL/g dry matter (Zhang et al., | |
| | | 2018) | |
| Nitrocthane (NE), 2-Nitroethanol | *** | 10 mmol/L; 96.7% (NE), 96.7% | (1) Inhibits the activity |
| (NEOH), 2-Nitro-1-Propanol | | (NEOH), 41.7% (NPOH) | of methanogens; |
| (NPOH) | | | (2) Inhibits methyl- |
| | | | coenzyme M gene expression; |
| | | | (3) Reduces the content of |
| | | | coenzyme F420 and F430 |
| 3-Nitrooxypropanol (NOP) | *** | 0.08 mg/g dry matter; 44% | Inhibits methyl-Coenzyme M |
| | | (Alvarez-Hess et al., 2019) | activity |
| | | 2.5 g/animal/day; 38%/kg | |
| | | dry matter intake (Martinez- | |
| | | Fernandez et al., 2018) | |
| | | 60 mg/kg of feed dry matter; | |
| | | 26%/day (Melgar et al., 2020) | |
| | | 1.6 g; 28%(roughage), 23% | |
| | | (concentrate pellet) (Van | |
| | | Wesemael et al., 2019) | |

### Pterin Compounds

[0611] Pterin is a group of structural analogs of deazaflavin (F₄₂₀), which is a coenzyme involved in two steps of the hydrogenotrophic methanogenesis pathway. Therefore, pterin compounds can competitively inhibit CH₄ production. In one study, CH₄ production by Mbb. Ruminantium, Ms. Mazei, and Mm. mobile was significantly decreased by lumazin (2,4-pteridinedione) in a dose-dependent manner from 0.06 to 0.24 mmol/L. As expected, pterin is much less efficacious in mixed rumen cultures than in pure methanogen cultures. It was suggested that lumazine could be degraded or transformed by some microbes in mixed cultures or adsorbed to solid particles where it becomes unavailable to methanogens. Some N-substituted derivatives of p-aminobenzoic acid, which are inhibitors of methanopterin synthesis in methanogens, decreased methanogenesis in ruminal cultures without inhibiting VFA production.

### Hydroxymethylglutaryl-CoA (HMG-S-CoA) Reductase Inhibitors

[0612] All archaea contain long-chain isoprenoid alcohols as the major component of their cell membrane. Isoprenoid alcohols are unique to archaea. They are synthesized from mevalonate that is formed by reduction of 3-hydroxy-3-methylglutaryl coenzyme A (HMG-S-CoA) catalyzed by HMG-S-CoA reductase. This enzyme is also used for the synthesis of the same precursor ultimately used in cholesterol synthesis in humans. As an inhibitor of HMG-S-CoA reductase, statins (e.g., lovastatin and mevastatin) can inhibit the growth of methanogens by inhibiting the synthesis of mevalonate. Lovastatin and mevastatin may also act as a potential inhibitor of F₄₂₀-dependent NADP oxidoreductase as shown in the model structure of that enzyme. In the earliest reported study, mevastatin at 5.6 μmol/L inhibited the growth of all three strains of rumen Methanobrevibacter, but not rumen bacteria in vitro. In studies using a rumen simulation technique (Rusitec), lovastatin (150 mg/L) reduced CH₄ production by approximately 42% without altering bacterial counts or nutrient fermentation.

[0613] The high cost of pure statins promoted a search for natural sources of statins as agents to mitigate CH₄ production. Lovastatin is a secondary metabolite of idiophase of several fungal species (e.g., Penicillium spp., Aspergillus terreus, Monascus purpureus, and Pleurotus ostreatus), and it can reach a concentration up to 2.8% of the dry weight of P. ostreatus (oyster mushrooms) and 261 mg/kg fermented rice straw. Lovastatin extracted from fermented rice straw significantly reduced total CH₄ production by rumen methanogens by nearly 28% after 48 h in vitro incubation. Extract from A. terreus-fermented rice straw containing lovastatin (97 mg/g dry mass) also significantly reduced CH₄ production and abundance of methanogens, especially Methanobacteriales, and aerobic fungi, but increased several fiber-degrading bacteria. Lovastatin also altered the morphology of M. smithii significantly, resulting in abnormal membrane formation and asymmetric cell divisions and increased HMG-S-CoA reductase gene expression. Fermented rice straw extract also modulated expression of several genes associated with methanogenesis, increasing expression of mtr, mta, and mcr while decreasing expression of hmd and fno. Supernatant fractions containing statins produced by Mortierella wolfii also appeared promising to inhibit methanogenesis without reducing overall fermentation. In another study using sheep, fermented rice straw containing metabolites (possibly pravastatin and mevastatin) produced by Monascus spp. Decreased CH₄ emission (by 30%), the abundance of methanogens, and ruminal acetate: propionate ratio compared with the unfermented rice straw.

[0614] Diallyl disulfide, the main ingredient of garlic oil, is known to inhibit HMG-S-CoA reductase. Garlic oil (300 mg/L) was more effective than lovastatin as an inhibitor of CH₄ production (by up to 91% reduction); however, garlic oil also inhibited bacterial growth, which likely reduces the availability of methanogenesis substrates. Garlic oil lowered CH₄ production in vitro and growth of methanogens, altered community structure of methanogens after 24 h incubation. Moreover, interestingly, the anti-methanogenic efficacy increased over time up to 18 days of incubation.

### Plant Secondary Metabolites

[0615] Plants secondary metabolites (PSM), such as saponins, tannins, flavonoids, organosulphur compounds, and essential oils, have anti-microbial activities against several types of microorganisms. Numerous PSM extracts have been recognized as potential inhibitors of rumen methanogens and CH₄ production. Some forage plants rich in tannins and saponins have also shown promise at mitigating CH₄ emission from ruminants.

TABLE 11
Exemplary plant extracts that reduce methane production in ruminants

| | | Inhibitory | Addition amount; maximum | |
|---|---|---|---|---|
| Types of probiotics | | effects | suppression methane amount | Inhibition mechanisms |
| Plant extracts | Corymbia citriodora leaf | *** | 10 ml/calf/day; — | (1) Protozoa number |
| | extract | | | reduced (1.84 × 10⁵/ml) |
| | | | | (2) Ratios of volatile fatty |
| | | | | acids altered |
| | Aloe vera, Carica | *** | 25 mg/L and 50 mg/L Azadirachta | Unknown |
| | papaya, Azadirachta | | indica, Carica papaya, Tithonia | |
| | indica, Moringa oleifera, | | diversifolia; 15%, Jatropha | |
| | Tithonia diversifolia, | | curcas and Moringa oleifera pods; | |
| | Jatropha curcas, and | | 30% (Akanema & Hassen, 2018) | |
| | Moringa oleifera pod | | Eragrostis substrate, 4 ml plant | |
| | extracts | | extracts; 50% reduction in methane/ | |
| | | | Total gas production (Akanema, | |
| | | | Hassen & Adejoro, 2020) | |
| | Pomegranate peel | *** | 2% of dry matter intake, | Unknown |
| | extract and Desert teak | | Punica granatum; 46% | |
| | extract | | Tecomella undulata; 42% | |
| | Rhus succedanea extract | *** | 50 mg/L; lowest | Unknown |
| | Areca catechu and Acacia | ** | 2% dry matter basis, Areca | Unknown |
| | nilotica extract | | Catechu; 21%; Acacia nilotica; | |
| | | | 23% | |
| | Asparagopsis armata | *** | 1.0%; 67.2% (Roque et al., 2019) | Unknown |
| | Garlic extract | *** | 0.5%; —(Kim et al., 2018b) | Decreased abundance of |
| | | | 1 g the experimental mixture; 6.9 ± | methanogenic archaea |
| | | | 10.7 ml/d (Eger et al., 2018) | |
| | Plant extracts reservatrol | *** | 25 mg, high-forage diets; 60%; | Decreased abundance of |
| | | | high-concentrate diets; 41% | Methanobacter |
| | Plant extracts caffeic | *** | 12 mM, Caffeic acid; 37.58%; | Unknown |
| | acid and p-coumaric | | p-coumaric acid; 28.33% | |
| | acid | | | |

### 1. Tannins

[0616] Tannins decrease CH₄ production by directly inhibiting methanogens and indirectly decreasing H₂ production as a result of decreased fiber digestion and protozoal population in the rumen. The inhibitory activity of tannins extracted from Lotus pedunculatus was demonstrated on pure cultures of methanogens. The inhibition of methanogen populations was also shown by tannins in the rumen of goats fed diets containing tannins. Studies on structure-activity relationships have shown that types and molecular weights of tannins are important in determining their potency in lowering CH₄ production and abundance and diversity of rumen methanogens, with high molecular weight condensed tannins (CT) being more potent. Such structure-activity relationships have been demonstrated using members of Methanobacteriales including Methanobrevibacter.

### 2. Flavonoids

[0617] Flavonoids have not been extensively evaluated with respect to rumen methanogenesis. It was reported that inclusion of flavone, myricetin, naringin, rutin, quercetin, or kaempferol decreased in-vitro CH₄ production by 5 to 9 mL/g DM. Their potency ranked as follows: myricetin≥kaempferol≥flavone≥quercetin≥naringin≥rutin≥catechin. Catechin decreased CH₄ production both in vitro and in vivo. All the flavonoids, when fed at 0.2 g/kg DM, noticeably decreased relative abundances of hydrogenotrophic methanogens, and citrus (Citrus aurantium) extract rich in mixed flavonoids and its pure flavonoid components, neohesperidin and naringin, appeared to result in the greatest inhibition. Methanosarcina spp. Were also inhibited by poncirin, neohesperidin, naringin and their mixture. Flavonoids directly inhibit methanogens and also likely acts as H₂ sinks via cleavage of ring structures (e.g., catechin) and reductive dihydroxylation.

### 3. Saponins

[0618] The effects of saponins on rumen fermentation, rumen microbial populations, and ruminant productivity have been examined extensively. Quillaja saponin at 1.2 g/L, but not at 0.6 g/L, lowered CH₄ production in vitro and the abundance of methanogens (by 0.2-0.3 log) and altered their composition. Ivy fruit saponin decreased CH₄ production by 40%, modified the structure of the methanogen community, and decreased its diversity. Saponins from Saponaria officinalis decreased CH₄ and abundance of both methanogens and protozoa in vitro. It is hypothesized that saponins lower H2 production, thereby reduce CH4 production.

### 4. Essential Oils

[0619] The effects, mostly beneficial, of essential oils (EO) on rumen fermentation, microbial populations, and ruminant productivity have frequently been reviewed. Several EO compounds, either in pure form or in mixtures, are anti-methanogenic. The effects of EO on CH₄ production and methanogens are variable depending on dose, types, and diet. Five EO (clove, eucalyptus, peppermint, origanum, and garlic oil) that have different chemical structures in vitro at three different doses (0.25, 0.50 and 1.0 g/L) were tested for their effect on CH₄ production and archaeal abundance and diversity. Overall, all these EO suppressed CH₄ production and abundance of archaea and protozoa in a dose-dependent manner, but they differed in potency. Thyme oil or cinnamon oil fed to Holstein steers at 0.5 g/day decreased the relative abundance of total protozoa and methanogens. However, feeding beef cattle a blend of EO (CRINA®) did not affect CH₄ production, methanogen abundance or its diversity. Overall, methanogens may be directly inhibited or indirectly inhibited by Eos via inhibition of protozoa and H₂-producing bacteria in the rumen.

### Alternative Hydrogen Sinks

[0620] Compounds with a redox potential higher than CO₂ can thermodynamically outcompete CO₂ for reducing equivalents produced during rumen fermentation. These compounds, thus, can be used as alternative e acceptors to redirect e flux away from methanogenesis. The commonly evaluated alternative e acceptors are discussed below.

### 1. Nitrate and Sulfate

[0621] Nitrate (NO₃¹⁻) decreased CH₄ production both in vitro and in vivo. Mechanistically, nitrate decreases CH₄ production by outcompeting CO₂ as an e⁻ acceptor, and its reduction intermediates, nitrite (NO₂¹⁻) and nitrous oxide (N₂O), also directly inhibit methanogens as well as some H₂ producers. Sulfate also lowers CH₄ production, but much less effectively than nitrate. Archaeal abundance declined in goats receiving nitrate. While nitrate is not toxic to methanogens, it is toxic to protozoa, fungi and to a lesser extent to select bacterial species, suggesting a more general toxicity of nitrate. Nitrate can replace a portion of the dietary nitrogen as it is reduced to ammonia.

### 2. Nitrocompounds

[0622] A few organic nitrocompounds have been evaluated for their efficacy to decrease methanogens and CH₄ production. These compounds can serve as e acceptors by some bacteria competing with methanogens for reducing equivalents. This is demonstrated by nitroethane that can be used as a terminal e acceptor by Dentitrobacterium detoxificans, thereby indirectly decreasing CH₄ production. Nitrocompounds may also inhibit methanogenesis by directly inhibiting the activity of formate dehydrogenase/formate hydrogen lyase and hydrogenase, all of which are involved in the early step(s) of the hydrogenotrophic methanogenesis pathway, or inhibiting e transfer between ferredoxin and hydrogenase.

[0623] Nitrocompounds generally are quite effective in lowering CH₄ production, with 3-nitro-propionate, 2-nitropropanol, 2-nitroethanol and nitroethane being able to decrease CH₄ production by 57 to 98% in vitro. Using sheep, it was shown that nitroethane decreased CH₄ production by up to 45% and 69%, respectively, when orally administrated at 24 and 72 mg/kg body weight daily for 5 days. Although less effective than nitroethane, 2-nitropropanol also significantly lowered CH₄ production (by 37%) in steers.

### 3. Propionate and Butyrate Enhancers

[0624] Malate, acrylate, oxaloacetate, and fumarate are intermediates of carbohydrate fermentation. They can be converted to propionate or used in anabolism for the synthesis of amino acids or other molecules. They can accept reducing equivalents and thus stoichiometrically lower H₂ available for CH₄ production. When added at a concentration of 3.5 g/L, fumarate decreased CH₄ production by 38% in continuous fermenters with forages as a substrate. Types of forages and their combinations appeared to affect the anti-methanogenic efficacy of fumarate, ranging from 6 to 27% inhibition at 10 mmol/L. Acrylate also depresses CH₄ production in the rumen, but to a lesser extent than an equimolar level of fumarate. Malate was found to decrease CH₄ production by beef cattle in a dose-dependent manner, with a 16% decrease being noted when fed at 7.5% of DM intake, which corresponds to a 9% reduction per unit of DM intake. Different studies reported different anti-methanogenic potencies of this type of e-acceptors. Fumarate fed to goats at 10 g/day/goat was found to decrease the abundance of methanogens and CH₄ production only by 11.9% while increasing concentrations of total VFA, acetate and propionate. Some of the intermediates of pyruvate conversion to butyrate can act as e acceptors, which could also decrease CH₄ production.

### 4. Unsaturated Organic Acids

[0625] Unsaturated fatty acids can act as hydrogen sinks during their biohydrogenation and thereby lower CH₄ production. Propynoic acid (an unsaturated analog of propionic acid), 3-butenoic acid and 2-butynoic acid (both unsaturated analogs of butyric acid), and ethyl 2-butynoate each at 6 to 18 mmol/L have been evaluated as alternative e sinks to lower methanogenesis in vitro. Only propynoic acid and ethyl 2-butynoate markedly lowered CH₄ production, by 65 to 76% and 24 to 79%, respectively. In another study, propynoic acid lowered CH₄ production by 67% and 78% at 6 and 12 mmol/L, respectively and decreased methanogen abundance. Propynoic acid and ethyl 2-butynoate are directly toxic to methanogens, and species of methanogens vary in their sensitivity to these two inhibitors, with Mbb. Ruminantium being most sensitive, Ms. Mazei least sensitive, and Mm. mobile intermediate.

### Inhibitors to Hydrogen-Producing Bacteria

### 1. Ionophores

[0626] Ionophores, such as monensin and lasalocid, are commonly used to improve rumen microbial metabolism. Being highly lipophilic ion carriers, they pass through the cell wall of Gram-positive bacteria and penetrate into the cell membrane. Therein, they serve as H⁺/Na⁺ and H⁺/K⁺ antiporters, dissipating ion gradients that are needed for ATP synthesis, nutrient transport, and other essential cellular activities and ultimately resulting in delayed cell division and even cell death. Ionophores preferentially inhibit Gram-positive bacteria, including members of class Clostridia, including Ruminococcus species that produce acetate and H₂. Ionophores can also inhibit some Gram-negative rumen bacteria, including bacteria that produce formate and H₂. Therefore, ionophores may lower CH₄ emission by decreasing H₂ production. For examples, monensin fed at 24-35 mg/kg diet lowered CH₄ production by up to 10% (g/kg DM intake), though no CH₄ suppression was observed at 10-15 ppm. In a recent in vivo study, however, monensin at 60 mg/day/cow did not lower CH₄ production by tropical cattle, though it decreased CH₄ production by about 30% when fed at 250 mg/day/cow. As repeatedly noted, at such high supplementation level, DM intake was lowered, which explains most of the observed decrease in CH₄ emission. Ionophores are not known to directly inhibit methanogens, but they can change the population dynamics of methanogen species. For example, monensin decreased the population of Methanomicrobium spp. While increasing that of Methanobrevibacter spp. Total methanogens were also decreased in cattle fed monensin. These can be explained by reduced availability of H₂ and differences in affinity for H₂ and growth kinetics among methanogen species.

### 2. Bacteriocins

[0627] Bacteriocins are proteins or peptides produced by bacteria and inhibit select microbial species in the rumen and other habitats. There are only a few studies investigating the effect of bacteriocins on CH₄ emission. Bovicin HC5, a bacteriocin produced by Streptococcus spp. From the rumen, was reported to suppress CH₄ by 50% in vitro. Nisin, a bacteriocin produced by Lactobacillus lactis subsp. Lactis, has also been shown to decrease CH₄ production in vitro by up to 40% depending upon its concentration. Similar to monensin, bacteriocins probably modulate rumen fermentation leading towards increased propionate, thereby decreasing CH₄ production.

Additional Agents that Reduce Methane in Ruminants

### Introduction

[0628] Climate change is a global problem requiring innovative solutions to reduce production of and/or increase the sequestration of deleterious atmospheric gases and/or precursors thereof. The present invention relates to compositions, methods, and/or kits that reduce global deleterious atmospheric gases and/or precursors thereof. In preferred embodiments, provided herein are compositions, methods, and/or kits that reduce the production of deleterious atmospheric gases and/or precursors thereof. The deleterious atmospheric gases and/or precursors thereof to be reduced can be generated from any suitable production source, such as flooded ecosystems and/or agriculturally relevant ecosystems, for example, farming sites. In certain embodiments, provided herein are compositions, methods, and/or kits comprising one or more small molecules that affect the production of one or more deleterious atmospheric gases and/or precursors thereof. The one or more small molecules can be formulated in any suitable manner, for example, as a solid or liquid. In certain embodiments, the solid and/or liquid formulations are delivered to the site of use by human and/or by machine. In preferred embodiments, the one or more small molecules that affect the production of one or more deleterious atmospheric gases and/or precursors thereof target microorganisms.

### Ecosystems

[0629] A. Flooded Ecosystems

[0630] In certain embodiments, provided herein are compositions, methods, and/or kits for use in flooded ecosystems. As used herein, the term “flooded ecosystem” includes an area where water is present at or near the surface of the soil for varying periods of time during the year. In certain cases, a flooded ecosystem comprises water at or near the surface of the soil for at least a portion of the growing season. The flooded ecosystem can be any suitable flood ecosystem, such as a wetland, for example a lagoon, wet meadow, marsh, swamp, peatland, mire, bog, fen, mangrove forest, carr, pocosin, floodplain, vernal pool, paddy field, an agricultural field, or a combination thereof. In certain embodiments, the wetland is tidal or non-tidal. In certain embodiments, the wetland comprises freshwater, brackish water, or salt water. In a preferred embodiment, the flooded ecosystem comprises a paddy field, more preferably a rice paddy.

[0631] Typically, the flooded ecosystem comprises hydric soil, i.e., soil formed under conditions of saturation, flooding or ponding for a period of time during the growing season. One of many characteristics of hydric soil includes the presence of hypoxic and/or anaerobic conditions in the soil, wherein an environment with little to no oxygen provides favorable conditions for anaerobic organisms. For example, the anaerobic environment generated from rice farming, e.g., a rice paddy, promotes the growth of methanogenic microorganisms whose activity results in the generation of one or more deleterious atmospheric gases and/or precursors thereof, including methane. It is estimated that methane from rice production contributes to 1.5% of the total global deleterious atmospheric gas emissions. Provided herein, are compositions, methods, and/or kits for reducing the production of one or more deleterious atmospheric gases and/or precursors thereof from flooded ecosystems.

[0632] B. Agriculturally Relevant Ecosystems

[0633] In certain embodiments, provided herein are compositions, methods, and/or kits for use in suitable agriculturally relevant ecosystems. In certain embodiments, the agriculturally relevant ecosystem comprises arable land and/or pastureland, such crop land, meadows, pastures, and/or forests. Provided herein, are compositions, methods, and/or kits for reducing the production of one or more deleterious atmospheric gases and/or precursors thereof from an agriculturally relevant ecosystem.

Microbial Sources of Deleterious Atmospheric Gases and/or Precursors Thereof

[0634] A. Methanogens

[0635] In certain embodiments, wherein the one or more deleterious atmospheric gases and/or precursors thereof are microbially derived, the microorganism can be any suitable microorganism, such as a methanogen, for example a Methanopyrales, Methanococcales, Methanobacteriales, Methanosarcinales, Methanomicrobiales, Methanocellales, Methanomassiliicoccales, Halobacteriales, Thermoplasmataltes, or a combination thereof. In certain embodiments, the methanogen comprises an archaea. In preferred embodiments, the microorganism comprises a methanogen.

[0636] B. Biochemical Pathways

[0637] In certain embodiments, the one or more deleterious atmospheric gases and/or precursors thereof are microbially derived through one or more biosynthetic pathway. The deleterious atmospheric gas can be any suitable deleterious atmosphere gas, such as carbon dioxide, methane, nitrous oxide, or a combination thereof. The deleterious atmospheric gas precursor can be any suitable precursor, such as acetate, hydrogen, carbon, methanol, monomethylamine, dimethylamine, trimethylamine, nitric oxide, or a combination thereof. In preferred embodiments, the deleterious atmosphere gas comprises carbon dioxide, hydrogen, or methane more preferably methane. In certain embodiments, wherein the resultant deleterious atmospheric gas comprises methane, the one or more biosynthetic pathways include the acetoclastic, hydrogenotrophic, and methylotrophic pathways, which differ based on the starting substrates, i.e., precursor, (FIG. 1), more preferably the acetoclastic or hydrogenotrophic pathways, even more preferably the acetoclastic pathway.

[0638] The acetoclastic pathway comprises a series of enzymes that convert the precursor acetate through a series of enzymatic conversions to methane. Starting from acetate, (1) acetate is converted to acetyl phosphate by acetate kinase (ack); (2) acetyl phosphate is converted to acetyl-CoA by phosphotransacetylase (pta); (3) the acetyl group from acetyla-CoA is transferred to a protein intermediate by acetyl-CoA decarbonylase; (4) the acetyl group is then transferred to tetrhydrosarcinapterin to form 5-methyl-tetrahydrosarcinapterin by methyltetrahydrosarcinapterin methyltransferase; (5) 5-methyl-tetrahydrosarcinapterin is converted to methyl-CoM by methyl-H₄SPT:CoM methyltransferase (Mtr); and (6) methyl-CoM is reduced to methane by methyl-CoM reductase (Mcr) (FIG. 24 and FIG. 25).

[0639] The hydrogenotrophic pathway comprises a series of enzymes that convert the precursors hydrogen and carbon dioxide to methane. Starting from carbon dioxide and hydrogen, (1) a formylmethanofuran dehydrogenase (Fwd/Fmd) produces a formylmethanofuran, (2) which is further converted into 5-formyl-tetrahydromethanopterin by a formylmethanofuran:H₄MPT formylatransfer (Ftr); (3) 5-formyl-tetrahydromethanopterin is further converted into 5,10-methenyltetrahydromethanopterin by methyl-H₄MPT cyclohydrolase (Mch); (4) 5,10-methenyltetrahydromethanopterin is converted to N6-methyltetrahydromethanopterin by F₄₂₀-dependent methylene-H₄MPT reductase (Mer); (5) N6-methyltetrahydromethanopterin is converted to methyl-CoM by methyl-H₄MPT:coenzyme M methyltransferase (Mtr); and (6) methyl-CoM is reduced to methane by methyl-CoM reductase (Mcr) (FIG. 24 and FIG. 25).

[0640] The methylotrophic pathway comprises a series of enzymes that convert one or more of dimethylamine, methanethiol, methanol, methylamine, methylthiopropanoate, tetramethylammonium, and/or trimethylamine into methyl-CoM, wherein methyl-CoM is reduced to methane by methyl-CoM reductase (Mcr) (FIG. 24 and FIG. 25).

[0641] In certain embodiments, provided herein are compositions, methods, and/or kits comprising one or more small molecules that reduce the activity of one or more enzymes in one or more methane biosynthetic pathways. The enzyme can be any suitable enzyme, such as 3-(methylthio)propanoate:coenzyme M methyltransferase, acetate kinase, acetyl-CoA decarbonylase, acetyl-CoA decarbonylase/synthase complex α₂ε₂, acetyl-CoA decarbonylase/synthase complex J, acetyl-CoA decarbonylase/synthase complex γδ, acetyl-CoA synthase, carbon monoxide dehydrogenase, carbonic anhydrase, Co-methyltransferase, coenzyme M reductase, cyclohydrolase, dehydrogenase, dimethylamine-[corrinoid protein] Co-methyltransferase, F₄₂₀-dependent methylene-H₄MPT reductase, F₄₂₀-dependent methylene-H₄SPT dehydrogenase, formylmethanofuran dehydrogenase, formylmethanofuran:H₄MPT formyltransferase, formylmethanofuran:H₄SPT formyltransferase, formyltransferase, H₂-forming methylene-H₄MPT dehydrogenase, methanol-5-hydroxybenzimidazolylcobamide Co-methyltransferase, methenyl-H₄MPT cyclohydrolase, methyl-coenzyme M reductase, methyl-H₄SPT:CoM methyltransferase, methylated [methylamine-specific corrinoid protein]:coenzyme M methyltransferase, methylcobamide:CoM methyltransferase, methylthiol:coenzyme M methyltransferase, methyltransferase, MtaC protein:coenzyme M methyltransferase, phosphotransacetylase, tetrahydromethanopterin S-methyltransferase, tetramethylammonium methyltransferase, trimethylamine-corrinoid protein Co-methyltransferase, or a combination thereof. In a preferred embodiment, the enzyme comprises methyl-CoM reductase (Mcr) (FIG. 26).

Compositions for Reducing Production of Deleterious Atmospheric Gases and/or Precursors Thereof

[0642] In certain embodiments provided herein are compositions. In certain embodiments, provided herein are compositions comprising one or more small molecules. In preferred embodiments, provided herein are compositions comprising one or more small molecules that reduce the production of one or more deleterious atmospheric gases and/or precursors thereof. The small molecule can be any suitable small molecule for reducing the production of one or more greenhouse gases and/or precursors thereof, for example a small molecule that interferes with the uptake and/or conversion of acetate, hydrogen, carbon dioxide, methanol, monomethylamine, dimethylamine, trimethylamine, nitric oxide, or a combination thereof, and/or a small molecule that interfere with the production of carbon dioxide, hydrogen nitrous oxide, or a combination thereof. In preferred embodiments, the small molecule interferes with the uptake and/or conversion of acetate, hydrogen and/or carbon dioxide and/or the production of carbon dioxide or methane, more preferably with the production of methane.

[0643] A. Small Molecules that Affect Production of Deleterious Atmospheric Gases and/or Precursors Thereof

[0644] In certain embodiments, provided herein is a composition for reducing emissions of deleterious atmospheric gasses and/or precursors thereof from a flooded ecosystem comprising: one or more small molecules that reduce the production of one or more deleterious atmospheric gasses and/or precursors thereof. The one or more small molecules that reduce the production of one or more deleterious atmospheric gasses and/or precursors can be any suitable molecule.

[0645] In certain embodiments, the one or more small molecules that reduce the production of one or more deleterious atmospheric gasses and/or precursors comprises a compound with the formula the formula

R¹—[CH₂]n-ONO₂
[0646] wherein
[0647] n is an integer from 1 to 15;
[0648] R¹ is selected from the group consisting of H, C₁-C₆alkyl, phenyl, —OH, —NH₂, —CN, —COOH, —O(C═O)R³, —NHC(═O)R³, SO₂NHR³, or —ONO₂, —SH and R³ is C₁-C₆alkyl, phenyl, pyridyl;
[0649] with the proviso that when n is >3 the hydrocarbon chain may be interrupted by —O— or —NH—.

[0650] In some embodiments, the one or more small molecules that reduce the production of one or more deleterious atmospheric gases and/or precursors comprises 3-nitrooxypropanol, 9-nitrooxynonanol, 5-nitrooxy pentanoic acid, 6-nitrooxy hexanoic acid, bis(2-hydroxyethyl)amine dinitrate, 1,4-bis-nitrooxybutane, 1,5-bis-nitrooxypentane, or any combination thereof. Preferably, the one or more small molecules is 3-nitrooxypropanol (3-NOP).

[0651] In some embodiments, the composition comprises about 1 to about 25% by weight of the small molecule, about 5 to about 20% by weight of the small molecule, or about 5 to about 15% by weight of the small molecule.

### Solid Carriers

[0652] In certain embodiments, the composition further comprises one or more solid carriers. As used herein, the term “solid carrier” includes additives commonly used in the preparation of powderous formulations such as thickeners, for example gums or cellulose derivatives such as xanthan gum, karaya gum and/or ethylcellulose. The one or more solid carriers can be any agriculturally suitable carrier, such as attapulgite, kaolinite, fuller's earth, calcium carbonate, perlite, diatomaceous earth, calcium silicate, fly ash, a polysaccharide, a disaccharide, a monosaccharide, a gum, a natural or synthetic derivative thereof, or a combination thereof.

[0653] In certain embodiments, the one or more solid carriers comprises any carrier suitable for ingestion, such as a saccharide comprising cellulose, xantham gum, karaya gum, ethylcellulose, inositol, galactose, arabinose, lactose, lactulose, mannitol, mannose, sorbose, turanose, platinose, or a combination thereof.

[0654] In some embodiments, the carrier comprises attapulgite, kaolinite, fuller's earth, calcium carbonate, perlite, diatomaceous earth, calcium silicate, fly ash, a polysaccharide, a disaccharide, a monosaccharide, a gum, a natural or synthetic derivative thereof, or a combination thereof.

[0655] In other embodiments, the carrier comprises attapulgite, kaolinite, fuller's earth, calcium carbonate, perlite, diatomaceous earth, calcium silicate, fly ash, a polysaccharide, a disaccharide, a monosaccharide, a gum, silica, propylene glycol, hemp protein, biochar, montmorillonite, activated charcoal, lignin, wood flour, hemp protein, pea protein, soy protein, gelatin, casein, chitosan, talc, calcium phosphate, arginine, lysine, calcium carbonate, carbon black, glutamine, betaine, bismuth phosphate, bismuth citrate, iron phosphate, or any combination thereof.

[0656] In some embodiments, the carrier comprises the one or more solid carriers comprises a saccharide comprising cellulose, xanthan gum, karaya gum, ethylcellulose, inositol, galactose, arabinose, lactose, lactulose, mannitol, mannose, sorbose, turanose, platinose, or a combination thereof.

[0657] In some embodiments, the one or more solid carriers comprises a saccharide comprising cellulose, xanthan gum, karaya gum, ethylcellulose, inositol, galactose, arabinose, lactose, lactulose, mannitol, mannose, sorbose, turanose, platinose, carrageenan, cellulose acetate, hydroxypropyl cellulose, cellulose acteate phthalate, maltrodextran, dextran, inulin, corn starch, amylopectin, sodium startch glycolate, pentaerthritol, cyclodextrin, or a combination thereof.

[0658] In certain preferred embodiments, the the solid carrier comprises silica and ethylcellulose, more particularly about 10% to about 50% by weight of the silica and about 50 to about 90% by weight of the ethylcelluose.

[0659] In other preferred embodiments, the solid carrier comprises silica and activated charcoal, particularly about 10% to about 90% by weight of the silica and about 10% to about 90% by weight of the activated charcoal.

[0660] In certain embodiments, the binder further comprises arginine, lysine, or both arginine and lysine. While not being bound by theory, it is believed that arginine and lysine are capable of forming hydrogen bonds with the small molecule, such as 3-NOP, thereby altering the release rate into the flooded ecosystem.

[0661] In other preferred embodiments, the carrier comprises activated charcoal and ethylcellulose, particularly about 10% to about 50% by weight of the activated charcoal and about 40 to about 90% by weight of the ethylcellulose.

[0662] In some embodiments, the carrier further comprises about 1 to about 10% by weight of sodium lignosulfate. While not being bound by theory, it is believed that sodium lignosulfate improves coating adhesion to the tablet resulting in a reduction in release rate of the small molecule.

[0663] In other embodiments, the carrier comprises arginine and polycaprolactone, such as about 10 to about 60% by weight of the arginine and about 30 to about 90% by weight of the polycaprolactone.

[0664] In other preferred embodiments, the carrier comprises 25% silica, 66% polycaprolactone, such as about 10 to about 60% by weight of the silica and about 30 to about 90% by weight of the polycaprolactone.

[0665] In certain embodiments, the composition comprises a granular shape. The composition may comprise any suitable shape, such as a spherical-, square-, rectangular-, capsular-, cylindrical-, conical-, ovular-, triangular-, diamond-, disk-like shape, or a combination thereof. In certain embodiments, the shape of the particle affects the rate of dissolution of the particle.

[0666] The granular particle can comprise any suitable texture, for example hard or soft. In certain embodiments, the texture of the particle affects the rate of dissolution of the particle. In certain embodiments, the composition comprises a combination of differently textured pellets each of which release the small molecule at different rates.

[0667] In certain embodiments, the granular particles comprise a uniform size distribution, for example about ±20%, ±15%, ±10%, ±5%, ±2%, or ±1% size distribution in the median particle size. In certain embodiments, the granular particles comprise a non-uniform size distribution, for example greater than about ±20%. In certain embodiments, the granular particles comprise a plurality of differently sized populations of granular particles each of which comprise a uniform size distribution.

[0668] In certain embodiments, the one or more solid carrier dissolves and thereby releases the one or more small molecules that reduce the production of greenhouse gases and/or precursors thereof. In a preferred embodiment, the one or more solid carriers will dissolve in water.

[0669] C. Extended and Delayed Release

[0670] It may be necessary to vary the rate of dissolution of the composition. For example, one may want to produce an extended-release formulation, wherein the composition releases the one or more small molecules over a period of time to maintain a suitable environmental concentration of the one or more small molecules. This can be beneficial to reduce the frequency of applications, for example to reduce labor costs and/or applications in rural and/or hard to reach environments. In certain embodiments, complete dissolution of the composition and full release of the one or more small molecules occurs over at least about 1, 2, 3, 4, 5, 6, 7, 14, 21, 28, 35, 42, 49, 56, 63, 70, 77, 84, 91, 98, 105, 112, 119, 126, 133, 140, and/or nor more than about 2, 3, 4, 5, 6, 7, 14, 21, 28, 35, 42, 49, 56, 63, 70, 77, 84, 91, 98, 105, 112, 119, 126, 133, 140, or 147 days, for example about 1 to about 147 days, preferably about 7 to about 63 days, more preferably about 7 to about 42 days even more preferably about 14 to about 42 days yet even more preferably about 14 to about 28 days.

[0671] In certain embodiments, the extended-release formula may comprise any suitable extended-release formula. In certain embodiments, the extended-release formula comprises one or more additives that reduce the rate of dissolution of the composition, one or more additives that reduce the rate of dissolution of the small molecule from the composition, one or more additives that comprise a membrane that dissolves over time, wherein the rate of dissolution of the membrane controls the rate of release of the one or more small molecules, a suitable alternative, or a combination thereof.

[0672] In certain embodiments, the population of granular particles comprises a plurality of populations of granular particles wherein each population comprises a different formulation and/or shape. In certain embodiments, the population of granular particles comprises a first population and a second population. In certain embodiments, the population of granular particles further comprises at least 1, 2, 3, 4, 5, 5, 6, 8, or 9 and/or no more than 4, 5, 6, 7, 8, 9, or 10 additional populations, for example a total of 3-10 additional populations, preferably 3-7 additional populations, more preferable 3-5 additional populations. In a preferred embodiment, each of the additional populations comprises a different formulation than the others.

[0673] In certain embodiments, the rate of dissolution of the granular particles is modulated by the size of the granular particle. In certain embodiments, smaller granular particles dissolve faster than larger granular particles, such that each successive larger population in the plurality of populations of differently size particles provides a delayed release compared to the smaller populations of particles. In certain embodiments, an increased proportion of larger to smaller granular particles in a population of granular particles results in slower rates of dissolution of the population of granular particles.

[0674] In certain embodiments, the first population of particles comprises an immediate release formulation. In certain embodiments, the second population comprises a delayed release formulation, wherein the second population dissolves and/or releases the one or more small molecules that reduce the production of one or more deleterious atmospheric gasses and/or precursors after the first population. In certain embodiments, each additional population comprises a delayed release formulation, wherein each population dissolves and/or releases the one or more small molecules that reduce the production of one or more deleterious atmospheric gasses and/or precursors at a different time than each of the other populations.

[0675] In some embodiments, an immediate release formulation releases the one or more small molecules that reduce the production of one or more deleterious atmospheric gases with about 1 day, 2 days, 3 days, 4 days, 5 days, or 6 days. In some embodiments, a delayed release formulation releases the one or small molecules after about 1 week or more, for example up to about 21 weeks.

[0676] In some embodiments, the first population of particles provides has a half-life for the one or more small molecules (such as about about 1 to 12 hours), the second population has a longer half-life (such as about 24 or more hours), each additional population has a longer half-life than the previous population such that an effective amount of the one or more small molecules is maintained for weeks or months. Thus, the present compositions advantageously do not, in such embodiments, require repeated, frequent applications to the flooded ecosystem.

[0677] In certain embodiments, the extended release happens within the first 10% of the half-life and then the 1st delayed happens with 1-2 half lives, then the next with 1-2 of the delayed release.

[0678] In some embodiments, the particles have a size ranging from about 1 mm to about 20 mm, about 1 to about 15 mm, about 1 to about 10 mm, about 5 to about 20 mm, about 5 to about 15 mm, or about 5 to about 10 mm.

[0679] Coatings

[0680] In certain embodiments, the composition may comprise a coating, for examples particles or tablet having a coating. The coating can comprise any suitable coating, such as a wax, a fat, or a synthetic polymer. In certain embodiments, the wax comprises organic compounds consisting of long alkyl chains, natural waxes (plant, animal) which are typically esters of fatty acids and long chain alcohols as well as synthetic waxes, which are long-chain hydrocarbons lacking functional groups. In certain embodiments, the fat comprises a wide group of compounds which are soluble in organic solvents and largely insoluble in water such as hydrogenated fats (or saturated fats) which are generally triesters of glycerol and fatty acids. Suitable fats can have natural or synthetic origin. In certain embodiment, the fat comprises glycerine monostearate, carnauba wax, candelilla wax, sugarcane wax, palmitic acid, stearic acid hydrogenated cottonseed oil, hydrogenated palm oil and hydrogenated rapeseed oil, or combinations thereof. Any suitable synthetic polymer can be used, such as poly-L-glutamic acid (PGA) and polylactic acid (PLA). In preferred embodiments, the synthetic polymer is at least partially water soluble.

[0681] The coating may be single layer or multiple layers, preferably two layers.

[0682] In some embodiments, the coating is selected from cellulose acetate phlalate, ethyl cellulose, hydroxypropyl cellulose, polycaprolactone, alginate, chitosan, polyethylene glycol, cellulose actate, triacetin, propylene glycol, n-methyl-2-pyrollidone, and any combination thereof.

[0683] In certain preferred embodiments, the coating comprises two or more polyelectrolytes, such as polystyrene sulfonate, polyethyleneimine, sodium lignosulfate, polyglutamic acid and poly-L-lysine, poly-L-arginine, polyallylamine hydrochloride, polyacrylic acid, or any combination thereof.

[0684] In some preferred embodiments, the polyelectrolytes comprise polyallylamine hydrochloride and sodium lignosulfate.

[0685] In some preferred embodiments, the polyelectrolytes comprise comprise polyallylamine hydrochloride and polystyrene suylfonate.

[0686] In other preferred embodiments, the polyelectrolytes comprise sodium lignosulfate and one of polyglutamic acid and poly-L-lysine, or poly-L-arginine, and sodium lignosulfate.

[0687] In still other preferred embodiments, the polyelectrolytes comprise polystyrene sulfonate and one of polyglutamic acid and poly-L-lysine, or poly-L-arginine.

[0688] The polyelectrolytes may, in certain embodiments, be chemically cross-linked with a cross-linking agent.

[0689] In certain embodiments, the composition comprises one or more coatings applied with minimal to no bubbles. Additionally or alternatively, the composition comprises one or more coatings that comprise a foam or a plurality of air bubbles. In certain cases, the foamed coating can temporarily alter the buoyancy of the composition. One such example includes a composition comprising a foamed coating that floats when initially applied to a flooded ecosystem, then, after a period of time, the air pockets in the foamed coating fill with water resulting in the composition sinking to the bottom of the flooded ecosystem. This may be advantageous when the composition must be distributed from a centralized water source to a plurality of downstream flood ecosystems. Additionally or alternative, this may be advantageous to allow a composition applied to a small portion of a large flooded ecosystem to more evenly distribute across the entirety of the surface before sinking to the floor of the flood ecosystem.

[0690] D. Additives with a Density Greater than Water

[0691] In certain embodiments, the composition further comprises one or more additives with a density greater than water. For example, the additive may have a density greater than 1.1, preferably about 1.1 mg/mL to about 3 mg/mL, about 1.5 to about 3 mg/mL, about 1.5 to about 2.5 mg/mL, or about 1.5 to about 2 mg/mL. Suitable additives include silica, attapulgite, kaolinite, fuller's earth, calcium carbonate, perlite, diatomaceous earth, calcium silicate, fly ash, or a combination thereof. In certain embodiments, the one or more additives with a density greater than water result in the composition sinking below the water surface when applied to the flooded ecosystem. In certain embodiments, the one or more additives with a density greater than water result in the composition partially or completely sinking to the bottom of the flooded ecosystem. In preferred embodiments, the composition completely sinks to the bottom of the flooded ecosystem. In certain embodiments, the composition comprising the additive with a density greater than water has a density of at least 1.1, preferably about 1.1 mg/mL to about 3 mg/mL, about 1.5 to about 3 mg/mL, about 1.5 to about 2.5 mg/mL, or about 1.5 to about 2 mg/mL.

[0692] E. Agriculturally Beneficial Additives

[0693] In certain embodiments, the composition further comprises one or more agriculturally beneficial additives. The agriculturally beneficial additive can be any suitable additive depending on the application, such a vitamin, a nutrient, an antibiotic, a fungicide, an herbicide, a fertilizer, or a combination thereof.

[0694] In certain embodiments, the additive includes one or more suitable components that reduce methanogenesis by methanogens, such as, seaweed (e.g., Asparagopsis taxiformis), kelp, 3-nitrooxypropanol, anthraquinones, ionophores (e.g., monensin and/or lasalocid), polyphenols (e.g., saponins, tannins), organosulfurs (e.g., garlic extract), flavonoids (e.g., quercetin, rutin, kaempferol, naringin, and anthocyanidins; bioflavonoids from green citrus fruits, rose hips and black currants), carboxylic acid, terpenes (e.g., D-limonene, pinene and citrus extracts), or a combination thereof.

Methods for Reducing Production of Deleterious Atmospheric Gases and/or Precursors Thereof

[0695] In certain embodiments provided herein are methods. In certain embodiments, provided herein are methods for using one or more small molecules that reduce the production of one or more deleterious atmospheric gases and/or precursors thereof. In certain embodiments, provided herein are methods for applying one or more small molecules that reduce the production of one or more deleterious atmospheric gases and/or precursors thereof to any suitable environment. The suitable environment can comprise any suitable environment as described in the Ecosystems section above. In preferred embodiments, the suitable environment comprises a flooded ecosystem, such as a rice paddy.

[0696] In certain embodiments, the method for reducing emissions of deleterious atmospheric gasses and/or precursors thereof from a flooded ecosystem comprises applying a composition comprising one or more small molecules that reduce the production of the deleterious atmospheric gasses and/or precursors thereof to the flooded ecosystem. The composition can comprise any suitable composition. In a preferred embodiment, the composition comprises any one of the compositions as described in the Compositions for reducing production of deleterious atmospheric gases and/or precursors thereof section above. In a more preferred embodiments, the composition comprises 3-NOP.

[0697] An exemplary method is shown in FIG. 4. In FIG. 4, the flood environment comprises a rice paddy (401) comprising one or more rice plants (402), wherein there is an oxygen-rich, anaerobic zone near the surface of the water (403) and an oxygen-deprived, anaerobic zone below the surface of the water (404). To the rice paddy, one or more compositions comprising one or more small molecules that reduce the production of one or more deleterious gases and/or precursors thereof (405) is applied, wherein the composition sinks to the paddy floor (406), wherein the dissolution of the composition reduces the production of the one or more deleterious gases and/or precursors thereof by one or more microorganisms.

[0698] In certain cases, the composition needs to be reapplied periodically to maintain a suitable concentration of the one or more small molecules. In certain embodiments, the method further comprises reapplying after a period of time a composition comprising one or more small molecules that reduce the production of the deleterious atmospheric gasses and/or precursors thereof to the flooded ecosystem. In certain embodiments, the method further comprises, reapplying again after a period of time a composition comprising one or more small molecules that reduce the production of the deleterious atmospheric gasses and/or precursors thereof to the flooded ecosystem. Any suitable number of reapplications may be performed as needed to maintain a an effective amount of the one or more small molecules. In some embodiments, the composition is reapplied after about 7 to about 28 days, about 7 to 46 days, about 7 to 92 days or about 7 to 147 days.

[0699] In certain embodiments, the composition is delivered to the one or more flooded ecosystems. Any suitable delivery method can be used, such as delivery with or without human intervention, for example aerial delivery, e.g., by drone.

[0700] An exemplary method of delivery is shown in FIG. 5. In FIG. 5, one or more compositions comprising one or more small molecules that reduce the production of one or more deleterious gases and/or precursors thereof is loaded into an aerial vehicle, e.g., a drone, (501), wherein the aerial vehicle distributes (502) the composition to the flooded ecosystem (503).

[0701] The composition can be applied at any suitable gestational period for the agricultural crop. For example, the composition can be applied during Vegetation, Reproductive, and/or Ripening stage during rice production in a paddy field as shown in FIG. 6.

[0702] In certain embodiments, the composition is delivered to one or more water sources, whereby the composition is delivered to the one or more flooded ecosystems upon use of the water from the source. For example, the water source can be a pool used to irrigate a cropland, e.g., a paddy field, wherein the composition is distributed to the cropland as the water is pulled from the water source.

[0703] In certain cases, the concentration of the one or more small molecules can be measured to ensure the presence of a suitable concentration of the one or more small molecules. Any suitable method may be used to measure the concentration, such as a strip test, liquid chromatography, or thin layer chromatography. The method can be performed with or without human intervention.

[0704] In some embodiments, the amount of the small molecule (e.g., 3-NOP) applied is from about 0.1 ppm to about 100 ppm per acre of flooded ecosystem. In other embodiments, the amount is about 0.5 ppm to about 50 ppm per acre. In still other embodiments, the amount is about 0.5, 1, 5, 10, 15, 20, 25, 30, 40, 45 or 50 pp per acre.

[0705] In some embodiments, the amount of the small molecule applied is from about 0.5 ppm to about 50 ppm per acre.

Kits for Reducing Production of Deleterious Atmospheric Gases and/or Precursors Thereof

[0706] In certain embodiments, provided herein are kits. In certain embodiments, the kit comprises any one of the compositions as described in the Compositions for reducing production of deleterious atmospheric gases and/or precursors thereof section. In certain embodiments, the kit further comprises a suitable container for shipping.

### Methods of Using Vaccines, Animal Feed, Antibodies, Milk

[0707] Provided herein are methods of using the vaccines, antibodies, milk, animal feed, agents (e.g., an agent that reduces methane production in a ruminant, a probiotic bacterial strain, etc.), or any combination thereof.

[0708] In certain aspects, provided herein are methods of inducing an immune response against at least one methanogen in a ruminant, the method comprising administering to the ruminant the vaccines or pharmaceutical compositions of the present disclosure.

[0709] In some embodiments, the immune response comprises a B cell response (e.g., to produce the antibodies). The antibodies produced in response to the vaccine are transferred to the saliva of the ruminants, which are swallowed by the ruminants to enter the rumen. Once in the rumen, the antibodies come in contact with at least one methanogen to bind/neutralize said methanogen.

[0710] As used herein, the term “neutralization of a methanogen” encompasses any reduction in one or more activities that are normally carried out by the methanogen in the absence of the antibodies that bind the methanogen.

[0711] In some embodiments, the activity of a methanogen includes but is not limited to, the activity that aids in producing methane gas. For example, binding of the antibodies to the methanogen may reduce the ability of the methanogen to carry out biochemical reactions that are necessary to produce methane, e.g., reduce the ability to convert hydrogen (H2) and carbon dioxide (CO₂) or acetate into methane (CH4) and ATP. In some embodiments, the reduced ability to produce methane may lower the fitness of methanogen in the rumen.

[0712] In some embodiments, the activity of a methanogen includes but is not limited to, the activity that aids in forming a granular colony with other bacteria. In some embodiments, such activity may be disrupted physically—e.g., antibodies binding to the methanogen would prevent physical association and/or film formation of the granular colony of bacteria. In some embodiments, a reduction in the activity of forming a granular colony may lead to the reduced ability of a methanogen to remain in the rumen. In some embodiments, such reduced ability may result in the reduction of the total number of methanogens inside the rumen.

[0713] In certain aspects, provided herein are methods of reducing the activity, number, and/or type of methanogens in the gut of a ruminant, the method comprising administering to the ruminant the vaccines or pharmaceutical compositions of the present disclosure.

[0714] In certain aspects, provided herein are methods of reducing the amount of methane produced by a ruminant, the method comprising administering to the ruminant the vaccines or pharmaceutical compositions of the present disclosure.

[0715] In preferred embodiments, any one of the methods produces an antibody against at least one methanogen. In some embodiments, the antibody is an IgG or an IgA. In preferred embodiments, the antibody is an IgA. The IgA isoform, at least in cattle, may be more stable in the rumen. For example, IgA levels in cattle saliva were reduced by only 40% after 8 h exposure to rumen contents while IgG levels were reduced by 80%.

[0716] In some embodiments, the antibody is produced in an amount sufficient to: (a) carry the antibody to the gut; (b) reduce the number and/or type of methanogens in the gut; and/or (c) reduce the amount of methane produced by the ruminant.

[0717] In some embodiments, the method reduces the methane production by the ruminant by at least about 1%, 5%, 10%, 20%, 30%, 40%, 50%, 60%, 70%, 80%, 90%, or 95% as compared with a control.

[0718] In some embodiments, the control is an accepted reference, or the amount of methane production in a ruminant that has not been vaccinated.

[0719] Notably, methane emission or production of methane by a ruminant can occur at any part of its intestinal track, which includes, e.g., a rumen and a lower bowel (lower intestinal track). The rumen accounts for 90% of all methane production. The rumen has no adaptive immune response. Thus, to be effective in reducing the level of methane production, the rumen or a methanogen therein must be exposed to neutralizing antibodies that bind and inactivate the methanogen. By contrast, the lower bowel, which accounts for 10% of all methane production, has adaptive immune response such that any immune response due to a vaccine can be amplified in the lower bowel. Accordingly, in preferred embodiments, the result of immune response from a vaccine is exposed to the lower bowel of a ruminant, which then further amplifies the effect of the vaccine. In other words, in preferred embodiments, a vaccine of the present disclosure or the immune response it elicits is exposed to a methanogen in a lower bowel of the ruminant. Thus, the present disclosure encompasses a method of reducing (i) methane production and/or (ii) activity, number, and/or type of methanogens in the lower intestinal track of a ruminant, the method comprising administering to the ruminant a nucleic acid vaccine comprising a nucleic acid encoding at least one methanogen cell surface protein or a fragment thereof.

[0720] As described herein, in some embodiments, the vaccine or the pharmaceutical composition is administered to the ruminant via a route selected from intramuscular administration, intradermal administration, subcutaneous administration, and nasal administration.

[0721] In some embodiments, the ruminant is administered with at least one dose of the vaccine or pharmaceutical composition.

[0722] In some embodiments, the ruminant is administered with at least one or two repeat doses of the vaccine or pharmaceutical composition (e.g., booster dose).

[0723] In some embodiments, the ruminant is administered with the repeat dose of the vaccine or pharmaceutical composition after at least about 2 weeks, 1 month, 6 months, or 12 months from the time the ruminant is administered with the preceding dose of the vaccine.

[0724] In some embodiments, the ruminant is administered with the repeat dose of the vaccine or pharmaceutical composition no more than about 3 months, 6 months, 12 months, or 24 months from the time the ruminant is administered with the preceding dose of the vaccine.

[0725] In some embodiments, the ruminant receives the repeat dose of the vaccine after at least about 2 weeks and no more than about 18 months from the time the ruminant is administered with the preceding dose of the vaccine.

[0726] In some embodiments, the ruminant receives a repeat dose of the vaccine after at least about 4 weeks and no more than about 12 months from the time the ruminant is administered with the preceding dose of the vaccine.

[0727] In certain embodiments, the ruminant is administered with a dosage of between 1 ug/kg and 400 ug/kg of the nucleic acid vaccine.

[0728] In some embodiments, the ruminant is administered with a dosage of the nucleic acid comprising at least about 25 ug, 50 ug, 100 ug, 150 ug, 200 ug, 250 ug, or 300 ug of the RNA.

[0729] In some embodiments, the ruminant is administered with a dosage of the nucleic acid comprising at least about 100 ug.

[0730] In some embodiments, the ruminant is administered with a dosage of the nucleic acid comprising at least about 200 ug.

[0731] In some embodiments, the ruminant is administered with a dosage of the nucleic acid comprising at least about 300 ug.

[0732] In certain embodiments, the methods of the present disclosure further comprises administering to the ruminant at least one agent (e.g., at least one additional agent) that reduces the level of methane produced by the ruminant.

[0733] In some embodiments, the at least one agent is selected from 3-Nitrooxypropanol (3-NOP), ethyl-3NOP, 2-bromoethanesulfonate (BES), 2-chloroethanesulfonate (CES), 3-bromopropanesulfonate (BPS), bromochloromethane (BCM), bromoform, bromodichloromethane, dibromochloromethane, carbon tetrachloride, trichloroacetamide, trichloroethyladipate, lumazin (2,4-pteridinedione), p-aminobenzoic acid, lovastatin, mevastatin, pravastatin, diallyl disulfide, garlic oil, saponins, tannins, flavonoids, nitrate, nitroethane, -nitro-propionate, 2-nitropropanol, 2-nitroethanol, malate, acrylate, oxaloacetate, fumarate, propynoic acid, 3-butenoic acid, 2-butynoic acid, ethyl 2-butynoate, monensin, lasalocid, bovicin HC5, nisin, and any combination thereof.

[0734] In preferred embodiments, the agent is 3-NOP or ethyl-3-NOP.

[0735] In certain aspects, provided herein are methods of reducing methane production in a ruminant, the method comprising orally administering to and/or feeding the ruminant the antibody, the milk and/or the derivatives thereof, and/or the animal feed of the present disclosure.

[0736] In certain aspects, the methods of the present disclosure relate to a ruminant. In some embodiments, the ruminant is selected from a cow, a bull, a bison, a yak, a buffalo, an antelope, a goat, a sheep, a deer, a giraffe, a caribou, a gazelle, a macropod, a llama, a camel, and an alpaca.

[0737] In some embodiments, the ruminant is an offspring (e.g., calf) of the vaccinated female ruminant that received the milk comprising an antibody that binds at least one methanogen.

[0738] In some embodiments, the ruminant is an adult ruminant. In other embodiments, the ruminant is a young ruminant (e.g., a calf). In some embodiments, a young ruminant includes a ruminant from birth to weaning. In some embodiments, a young ruminant includes a ruminant from birth up to two years of age, such from birth up to 3, 4, 5, 6, 7, 8, 9, 10, 11, or 12 months. Accordingly, in some embodiments, a young ruminant may be at least, about, or no more than 1, 2, 3, 4, 5, 6, 7, 8, 9, 10, 11, 12, 13, 14, 15, 16, 17, 18, 19, 20, 21, 22, 23, or 24 months in age. In preferred embodiments, a young ruminant is administered with a vaccine, antibodies, milk, animal feed, agent (e.g., an agent that reduces methane production in a ruminant, a probiotic bacterial strain, a small molecule inhibitor, etc.), or other composition of the present disclosure prior to establishment of methanogens. In some such embodiments, a lower dose of vaccine or other agents may be required.

[0739] In some embodiments, a ruminant is a ruminant born from a vaccinated parent(s). In some embodiments, a ruminant is a ruminant born from a vaccinated mother such that the ruminant received a high level of methanogen-neutralizing antibodies in the colostrum and milk fed to the ruminant at birth. Such a ruminant or a ruminant who received an early treatment may have low initial methanogen establishment, thereby enhancing a long term performance of the vaccines, antibodies, milk, animal feed, agents (e.g., an agent that reduces methane production in a ruminant, a probiotic bacterial strain, a small molecule inhibitor, etc.), or other compositions of the present disclosure.

[0740] In some embodiments, a ruminant is vaccinated with each change in hands and/or environment, such as from one owner to another, one ranch to another, or one geographical area to another. Typical ranch operations will vaccinate a newly arrived animal to manage disease, and vaccinating with a vaccine of the present disclosure (e.g., a vaccine that targets at least one methanogen cell surface protein) will fall into this standard agronomic practice.

[0741] In some embodiments, a ruminant is vaccinated with a vaccine of the present disclosure (e.g., a vaccine that targets at least one methanogen cell surface protein) at a time when the ruminant is subject to at least one other vaccination. For example, a ruminant (e.g., a domesticated ruminant, a dairy cow, a beef cow) is subject to vaccination against infectious bovine rhinotracheitis (IBR), bovine virus diarrhea (BVD), paranfluenza-3 (PI3), bovine respiratory syncytial virus (BRSV), clostridia, E. Coli mastitis, leptospirosis, mannheimia hemolytica, brucella, vibriosis, campylobacter, trichomonas, trichomoniasis, rotavirus, coronavirus, and/or respiratory disease. An exemplary vaccination regimen for a ruminant throughout the life cycle is shown in Table 8A.

TABLE 8A
Vaccination program for a ruminant

| Animal | Life Stage | Exemplary Vaccinations |
|---|---|---|
| Dairy | Adult | 4-way viral- |
| | Dry-off (e.g., 45-60 days | IBR/BVD/PI3/BRSV |
| | pre-calving) | Leptospirosis (5-way) |
| | | Clostridial (7-way) |
| | | J-5 (mastitis) |
| Dairy | Adult | 4-way viral- |
| | Pre-breeding (e.g., 30 days | IBR/BVD/PI3/BRSV |
| | prior to breeding season) | Leptospirosis (5-way) |
| Dairy | Calf | 4-way viral- |
| | Weaning (e.g., 6-12 weeks) | IBR/BVD/PI3/BRSV |
| | | Leptospirosis (5-way) |
| | | Clostridial (7-way) |
| | | Mannheimia hemolytica |
| Dairy | Calf | 4-way viral- |
| | Yearling (i.e., 12-24 mo) | IBR/BVD/PI3/BRSV |
| | | Leptospirosis (5-way) |
| | | Clostridial (7-way) |
| | | Mannheimia hemolytica |
| | | Brucella |
| Beef | Adult | 4-way viral- |
| | Pre-breeding (e.g., 30 days | IBR/BVD/PI3/BRSV |
| | prior to breeding season) | Leptospirosis (5-way) |
| | | Vibriosis |
| | | (Campylobacter)- |
| | | natural mating |
| | | Trichomonas-natural |
| | | mating |
| Beef | Adult | 4-way viral- |
| | Pregnancy examination (e.g., 30-45 | IBR/BVD/PI3/BRSV |
| | days post-breeding season) | Leptospirosis (5-way) |
| | | Clostridial (7-way) |
| | | Scour vaccines-E. coli, |
| | | possibly combination |
| | | with rota and coronavirus |
| Beef | Calf | Clostridial vaccines |
| | Newborn (e.g., 0-3 mo) | Possibly respiratory |
| | | vaccines, if there is a |
| | | history of disease in very |
| | | young calves |
| Beef | Calf | 4-way viral- |
| | Weaning (e.g., 6-8 mo) | IBR/BVD/PI3/BRSV |
| | | Leptospirosis (5-way) |
| | | Clostridial (7-way) |
| | | Mannheimia hemolytica |
| | | Brucella |
| Beef | Adult | 4-way viral- |
| | Arrival at stocker | IBR/BVD/PI3/BRSV |
| | operation (e.g., 6-8 mo) | Mannheimia hemolytica |
| Beef | Adult | 4-way viral- |
| | 14-21 d post-arrival at | IBR/BVD/PI3/BRSV |
| | stocker operation | Clostridial (7-way) |
| | | Mannheimia hemolytica |
| | | Leptospirosis (5-way) |
| | | (optional) |
| Beef | Adult | 4-way viral- |
| | Arrival at feedlot | IBR/BVD/PI3/BRSV |
| | operation (e.g., 9-11 mo) | Mannheimia hemolytica |
| Beef | Adult | 4-way viral- |
| | 14-21 d post-arrival at | IBR/BVD/PI3/BRSV |
| | feedlot operation | Clostridial (7-way) |
| | | Mannheimia hemolytica |
| | | Leptospirosis (5-way) |
| | | (optional |

[0742] Vaccinating a large number of ruminants (e.g., in a ranch, e.g., herding ruminants) is a challenging process. Thus, in preferred embodiments, the administration of a vaccine of the present disclosure is incorporated into a pre-existing vaccination program that a ruminant is already subject to. Such a method reduces the cost, time, and efforts in administering a vaccine of the present disclosure to a ruminant.

### Method of Producing the RNA Vaccine

[0743] Methods of producing the RNA vaccine are well known in the art. For example, preparation of IVT mRNA is described at least in Sahin et al. (2014) Nature Reviews Drug Discovery 13:759-780; and Vlatkovic (2021) Biomedicines 9(5):530, each of which is incorporated herein by reference).

[0744] In some embodiments, the mRNA is synthesized in a cell-free system by in vitro transcription from a DNA template, such as a linearized plasmid or a PCR product. With the exception of the 5′ cap, this DNA template encodes all the structural elements of a functional mRNA. In vitro transcription is performed with T7 or SP6 RNA polymerase in the presence of nucleotides or analogs thereof and thereafter the mRNA is capped enzymatically. The template DNA is then digested by dNases and the mRNA is purified by conventionally used methods for isolating nucleic acids.

[0745] In some embodiments, the nucleic acid vaccines described herein may be formulated in a nanoparticle to be delivered by a parenteral route as described in U.S. Pub. No. US20120207845; the contents of which are herein incorporated by reference in its entirety. In some embodiments, the nucleic acid vaccines may be formulated in a lipid nanoparticle made by the methods described in US Patent Publication No US20130156845 or International Publication No WO2013093648 or WO2012024526, each of which is herein incorporated by reference in its entirety.

[0746] The lipid nanoparticles described “erei” may be made in a sterile environment by the system and/or methods described in US Patent Publication No. US20130164400, herein incorporated by reference in its entirety.

[0747] In some embodiments, the LNP formulation may be formulated by the methods described in International Publication Nos. WO2011127255 or WO2008103276, the contents of each of which are herein incorporated by reference in their entirety.

[0748] In some embodiments, such LNPs are synthesized using methods comprising microfluidic mixers. Exemplary microfluidic mixers may include, but are not limited to a slit interdigitial micromixer including, but not limited to those manufactured by Microinnova (Allerheiligen bei Wildon, Austria) and/or a staggered herringbone micromixer (SHM) (Zhigaltsev, I. V. et al., Bottom-up design and synthesis of limit size lipid nanoparticle systems with aqueous and triglyceride cores using millisecond microfluidic mixing have been published (Langmuir. 2012. 28:3633-40; Belliveau, N. M. et al., Microfluidic synthesis of highly potent limit-size lipid nanoparticles for in vivo delivery of siRNA. Molecular Therapy-Nucleic Acids. 2012. I:e37; Chen, D. et al., Rapid discovery of potent siRNA-containing lipid nanoparticles enabled by controlled microfluidic formulation. J Am Chem Soc. 2012. 134(16):6948-51; each of which is herein incorporated by reference in its entirety). In some embodiments, methods of LNP generation comprising SHM, further comprise the mixing of at least two input streams wherein mixing occurs by micro structure-induced chaotic advection (MICA). According to this method, fluid streams flow through channels present in a herringbone pattern causing rotational flow and folding the fluids around each other. This method may also comprise a surface for fluid mixing wherein the surface changes orientations during fluid cycling. Methods of generating LNPs using SHM include those disclosed in U.S. Application Publication Nos. 2004/0262223 and 2012/0276209, each of which is expressly incorporated herein by reference in their entirety. In one embodiment, the nucleic acid vaccine of the present invention may be formulated in lipid nanoparticles created using a micromixer such as, but not limited to, a Slit Interdigital Micro structured Mixer (SIMM-V2) or a Standard Slit Interdigital Micro Mixer (SSIMM) or Caterpillar (CPMM) or Impinging-jet (IJMM) from the Institut fiir Mikrotechnik Mainz GmbH, Mainz Germany).

[0749] In some embodiments, the nucleic acid vaccines of the present invention may be formulated in lipid nanoparticles created using microfluidic technology (see Whitesides, George M. The Origins and the Future of Microfluidics. Nature, 2006 442: 368-373; and Abraham et al. Chaotic Mixer for Microchannels. Science, 2002 295: 647-651; each of which is herein incorporated by reference in its entirety). As a non-limiting example, controlled microfluidic formulation includes a passive method for mixing streams of steady pressure-driven flows in micro channels at a low Reynolds number (See e.g., Abraham et al. Chaotic Mixer for Microchannels. Science, 2002 295: 647-651; which is herein incorporated by reference in its entirety).

[0750] In some embodiments, the nucleic acid vaccines of the present invention may be formulated in lipid nanoparticles created using a micromixer chip such as, but not limited to, those from Harvard Apparatus (Holliston, MA) or Dolomite Microfluidics (Royston, UK). A micromixer chip can be used for rapid mixing of two or more fluid streams with a split and recombine mechanism.

### Methods for Detection of Methane Production

[0751] Various methods for detecting the level of methane produced by ruminants are known in the art and can be applied to the methods of the present disclosure.

[0752] In some embodiments, portable respiration hoods for tethered and non-tethered animals (Garnsworthy et al. (2012) J. Dairy Sci. 95:3166-3180; Garnsworthy et al. (2019) Animals 9:837; Zimmerman and Zimmerman WO2011130538; each of which is incorporated herein by reference) directly measure the gas concentration of incoming and exhaust air from individual animals.

[0753] In some embodiments, tracer-ratio gas releases from the animal (Johnson et al. (1994) Environ. Sci. Technol., 28, 359-362, which is incorporated herein by reference), such as Sulfur hexafluoride (SF6) (Grainger et al. (2007) J. Dairy Sci., 90:2755-2766; Vechi et al. (2022) Agriculture, Ecosystems and Environment 330:107885; each of which is incorporated herein by reference), assumes that the tracer gas and the emitted CH4 have similar transport paths, so that a tracer measurement can establish the CH4 emission rate.

[0754] In some embodiments, micrometeorological techniques are typically considered a herd-scale measurement, where the emission rate is calculated from the measurement of enhanced gas concentrations downwind of an animal herd (Harper et al. (2011) Anim. Feed Sci. Tech., 166-167, 227-239, which is incorporated herein by reference), and these include the mass balance technique (Laubach et al. (2008) Aust. J. Exp. Agr., 48:132-137; Lockyer and Jarvis (1995) Environ. Pollut. 90:383-390; each of which is incorporated by reference), eddy covariance (Dengel et al. (2011) Glob. Change Biol., 17:3524-3533; Felber et al. (2015) Biogeosciences, 12:3925-3940; each of which is incorporated herein by reference), and inverse dispersion techniques (Flesch et al., (2005) Atmos. Environ., 39:4863-4874; Todd et al. (2014) J. Environ. Qual., 43:1125-1130; Bai et al. (2021) Atmos. Meas. Tech., 14:3469-3479; each of which is incorporated herein by reference). The main advantage of micrometeorological techniques is that they do not interfere with the animals or the environment.

[0755] There are also devices that measure the level of methane (see e.g., Rey et al. (2019) Animals 9:563, Mapfumo et al. (2018) Pastoralism: Research, Policy and Practice 8:15; each of which is incorporated herein by reference). For example, the laser methane detector (LMD) is a hand held open path laser measuring device (e.g., LaserMethaneMini (Tokyo Gas Engineering Co., Ltd. Anritsu Devices Co., Ltd., Tokyo, Japan)). The principle of the LMD measuring technology is described (Chagunda et al. (2013) Animal, 7:394-400; Garnsworthy et al. (2012) J. Dairy Sci. 95:3166-3180; and Chagunda et al. (2009) Comput. Electron. Agric. 68:157-160; each of which is incorporated herein by reference). Briefly, this device is based on infrared absorption spectroscopy using a semiconductor laser for CH4 detection. The device must be pointed towards the nostrils of the cow from a fixed distance. Then, the LMD measures the density of the air column between the device and the animal's nostrils. The reflected laser beam is detected by the device, and its signal is processed and converted to the cumulative CH4 concentration along the laser path in ppm-m. The LMD is connected to a tablet (Samsung Galaxy Tab A6, New Jersey, USA) running GasViewer app (Tokyo Gas Engineering Solutions, Tokyo, Japan) via Bluetooth connection for exporting and storing the data in real time at 0.5 s intervals. The effect of atmospheric ambient CH4 concentration from the measurements is discounted using the offset function of the LMD.

[0756] The non-dispersive infrared analyzer CH4 analyzer (NDIR) (Guardian NG Edinburg Instruments Ltd., Livinstong, UK) is one of the so-called sniffer methods that measure CH4 concentration (ppm) in breath or exhaled air. These methods have been previously used (e.g., by Garnsworthy et al. (2012) J. Dairy Sci. 95:3166-3180) to assess the CH4 production of dairy cows at commercial farms. Briefly, a gas sampling tube from the front of a cow's head to a gas analyzer to continuously measure CH4 concentration in the cow's breath is used. Then, air is drawn through the instrument by an integral pump between the gas inlet port and analyzer. The device can have a range of 0 to 10,000 ppm, and air can be sampled continuously at a rate of 1 L/min through an 8 mm polyamide tube, using approximately 2 m of tube from the analyzer to cow's nostrils. Methane concentration can be recorded at 1 s intervals and stored in a datalogger (Data Recorder SRD-99; Simex Sp. Z o.o, Gdansk, Poland). Baseline or ambient CH4 concentration can be calculated as mean CH4 concentration before starting the measurements and subtracted from the measured data. Each day before starting measurements, the NDIR analyzer should be verified using standard mixtures of CH4 in nitrogen (0.0%, 0.25%, 0.50%, 0.75% and 1.0%; MESA International Technologies INC, Santa Ana, CA, USA).

[0757] Certain methods and devices are described further below and in Table 12.

TABLE 12
Features of exemplary methods for measuring methane output by individual animals

| | Purchase | Running | | | Behaviour | |
|---|---|---|---|---|---|---|
| Method | Cost ² | Cost ² | Labour ² | Repeatability | Alteration ³ | Throughput |
| Respiration chamber | High | High | High | High | High | Low |
| SF₆ technique | Medium | High | High | Medium | Medium | Medium |
| Breath sampling during | Low ⁴ | Low | Low | Medium | None | High |
| milking and feeding | | | | | | |
| GreenFeed | Medium | Medium | Low | Medium | Low | Medium |
| Laser methane detector | Low | Low | High | Low | Low-Medium | Medium |

[0758] As indicated above and shown in Table 12, exemplary methods include respiration chambers, the sulfuur hexafluoride (SF6) tracer technique, breath sampling during milking or feeding, the GreenFeed system, and the laser methane detector. Each method measures different components of methane output. Only respiration chambers measure total emissions from the animal via the oral, nasal and anal routes; all other methods ignore emissions via the anus and only measure methane emitted in breath. Breath measurements are justified because 99% of methane is emitted from the mouth and nostrils, and only 1% via the anus. The SF6 technique samples breath over 24 h, whereas other techniques use spot samples of breath over periods of minutes throughout the day, so diurnal variation has to be considered. The majority of methane (87%) is released by eructation, which provides a clear signal for sample processing.

### Respiration Chamber

[0759] Respiration chambers for open- or closed-circuit indirect calorimetry are considered the ‘Gold Standard’, and were used extensively in nutrition studies when establishing the Metabolisable Energy system. A single animal (or occasionally more) is confined in a chamber for between 2 and 7 days. Concentration of methane (and other gases if required) is measured at the air inlet and outlet vents of the chamber. The difference between outlet and inlet concentrations is multiplied by airflow to indicate methane emissions rate. In most installations, a single gas analyser is used to measure both inlet and outlet concentrations, often for two or more chambers. This involves switching the analyser between sampling points at set intervals, so concentrations are actually measured for only a fraction of the day.

[0760] Respiration chambers vary in construction materials, size of chamber, gas analysis equipment and airflow rate, all of which can influence results. Validation of 22 chambers at six UK research sites revealed an uncertainty of 25.7% between facilities, which was reduced to 2.1% when correction factors were applied to trace each facility to the international standard for methane. The main sources of uncertainty were stability and measurement of airflow, which are crucial for measuring methane emission rate. It was concluded, however, that chambers were accurate for comparing animals measured at the same site. It is an added challenge, when benchmarking alternative methods against respiration chambers, that the respiration chambers themselves have not been benchmarked against respiration chambers at other facilities.

[0761] For large-scale evaluation of methane emissions by individual animals, respiration chambers are challenging, with only a single study in growing Angus steers and heifers exceeding 1000 animals, which found methane production to be moderately heritable h²=0.27±0.07. Installation costs and running costs are high, and only one animal can be measured at a time. If the monitoring time is three days per animal, and chambers are run continuously, then maximum throughput would be approximately 100 animals per chamber per year. In practice, throughput is likely to be 30 to 50 animals per year. Cows are social animals, and confinement in a chamber may ultimately influence their feeding behaviour, resulting in less feed being consumed and in a different meal pattern compared with farm conditions. Altered feeding patterns or levels is not a problem for metabolic studies evaluating feeds, but can be a problem when evaluating individual animals. Furthermore, the representativeness of respiration chambers to grazing systems has been called into question. However, promising developments have led to more animal friendly respiration chambers constructed from cheaper, transparent materials. These lower the cost and reduce the stress of confinement with minimal disruptions to accuracy, precision and no drop in feed intake of the cows (Hellwing et al. (2012) J. Dairy Sci. 95:6077-6085, which is incorporated herein by reference).

### The SF6 Method

[0762] The SF6 tracer gas technique was developed in an attempt to measure methane emissions by animals without confinement in respiration chambers. Air is sampled near the animal's nostrils through a tube attached to a halter and connected to an evacuated canister worn around the animal's neck or on its back. A capillary tube or orifice plate is used to restrict airflow through the tube so that the canister is between 50 and 70% full after approximately 24 h. A permeation tube containing SF6 is placed into the rumen of each animal. The pre-determined release rate of SF6 is multiplied by the ratio of methane to SF6 concentrations in the canister to calculate methane emission rate.

[0763] Many research centres have used the SF6 technique with variations in design of sampling and collection equipment, permeation tubes, and gas analysis. Reliable results depend on following standard protocols, with greatest variation coming from accuracy of determining SF6 release rate from permeation tubes and control of sampling rate. With capillary tubes, sampling rate decreases as pressure in the canister increases, whereas an orifice plate gives a steadier sampling rate over 24 h. A source of error that has not been evaluated is that animals might interact and share methane emissions when the sampling tube of one animal is near the head of another animal. There is good agreement between methane emissions measured by the SF6 technique and respiration chambers, although results from the SF6 technique are more variable. For large-scale evaluation of methane emissions by individual animals, the SF6 technique is more useful than respiration chambers. Animal behaviour and intake might be affected by wearing the apparatus, and by daily handling to exchange canisters, but the technique is considerably less intrusive than respiration chambers, because cows remain in the herd. Labour and monetary costs for changing canisters each day and for lab analysis are high. Throughput is limited by the number of sets of apparatus available, handling facilities, labour, and the capacity of the lab for gas analysis. Animals need to be measured for 5 to 7 days, and it is recommended that group size should be less than 15 animals, so maximum throughput would be about 750 animals per year. Heritability has been estimated for methane production in grazing Holstein cows at h²=0.33±0.15.

### Breath Sampling During Milking and Feeding

[0764] Several research groups have developed methods to measure methane concentration in breath of cows during milking and/or feeding. These are often referred to as ‘sniffer methods’ because they use devices originally designed to detect dangerous gas leaks. Air is sampled near the animal's nostrils through a tube fixed in a feed bin and connected directly to a gas analyser. The feed bin might be in an automatic milking station or in a concentrate feeding station. Different research centres use different gas analysers (Nondispersive Infrared (NDIR), Fourier-transform infrared (FTIR) or photoacoustic infrared (PAIR)) and different sampling intervals (1, 5, 20 or 90-120 s). Methane concentration during a sampling visit of typically between 3 and 10 min may be specified as the overall mean, or the mean of eructation peaks. Some centres use CO2 as a tracer gas and calculate daily methane output according to ratio of methane to CO2 and daily CO2 output predicted from performance of the cow. Repeatability and rank correlations were higher for eructation peaks than for mean concentrations, and were higher for eructation peaks than for methane to CO2 ratio. However, all methods show good repeatability.

[0765] For large-scale evaluation of methane emissions by individual animals, breath-sampling methods have significant advantages compared with other methods. Breath-sampling methods are non-invasive because, once installed, animals are unaware of the equipment and are in their normal environment. Animals follow their normal routine, which includes milking and feeding, so no training of animals, handling, or change of diet is required. Equipment is relatively cheap, although more expensive gas analysers are available, and running costs are negligible.

[0766] The compromise for non-invasiveness of breath-sampling is that concentrations of gasses in the sampled air are influenced by cow head position relative to the sampling tube. The use of head position sensors and data filtering algorithms can remove the effects when the cow's head is completely out of the feed bin, but not within the feed bin. Consequently, sniffer measurements are more variable than flux methods, with factors like variable air flow in the barn increasing measurement error (imprecision), and head position, a highly repeatable characteristic, inflating between-cow variability.

[0767] Using CO2 as a tracer gas partly addresses the issue but, because CO2 arises from metabolism as well as rumen fermentation, variability of CO2 emissions has to be considered. A further consideration is diurnal variation in breath concentrations of methane and CO2 because animals are spot-sampled at different times of day and night. Diurnal variation can be accounted for either by fitting a model derived from the whole group of animals, or by including time of measurement in the statistical model.

[0768] The number of observations per analyser is limited only by number of cows assigned to one automatic milking station or concentrate feeding station and length of time equipment is installed. Typically, each analyser will record 40 to 70 animals 2 to 7 times per day for 7 to 10 days, although the number of sampling stations per analyser can be increased by using an automatic switching system. Throughput per analyser is likely to be 2000 to 3000 animals per year. Estimates of heritability for methane production measured using this method range from h²=0.12 to 0.45 over multiple studies.

### GreenFeed

[0769] GreenFeed (C-Lock Inc., Rapid City, SD, USA) is a sophisticated sniffer system where breath samples are provided when animals visit a bait station. As with other sniffer systems, GreenFeed samples breath from individual animals several times per day for short periods (3 to 7 min). GreenFeed is a portable standalone system used in barn and pasture applications, and incorporates an extractor fan to ensure active airflow and head position sensing for representative breath sampling. Measurements are pre-processed by the manufacturer, and data are available in real time through a web-based data management system. As GreenFeed captures a high proportion of emitted air and measures airflow, which can be calibrated using a tracer gas, methane emission is estimated as a flux at each visit. Providing visits occur throughout the 24 h, methane emission can be estimated directly as g/day.

[0770] A limitation of the GreenFeed system is that animals require training to use the system, although animals which have been trained to use the system will readily use it again. However, some animals will not use the system or will use it infrequently, and frequency of visits is affected by diet. This can be a challenge when screening commercial herds for methane emission under genetic evaluation.

[0771] The manufacturer recommends 15 to 25 animals per GreenFeed unit, and recordings are made typically for 7 days. If all animals visit the unit adequately, throughput per unit is likely to be 750 to 1250 animals per year.

### Laser Methane Detector (LMD)

[0772] The laser methane detector (LMD) is a highly responsive, hand-held device that is pointed at an animal's nostrils and measures methane column density along the length of the laser beam (ppm·m). In the first implementation of LMD on a farm, measurements for each cow were taken over periods of 15 to 25 s between eructation events, and could detect methane emitted each time the animal breathed out. In a later study with sheep and beef cattle, monitoring periods of 2 to 4 min allowed authors to separate breathing cycles from eructation events. Typically, animals are restrained either manually or in head yokes at a feed fence for the required length of time. The operator has to stand at the same distance (1 to 3 m) from each animal every time and must be careful to keep the laser pointed at the animal's nostrils throughout the measurement period.

[0773] The LMD can be used in the animal's normal environment, although for consistency restraint is required during measurement. Because the LMD measures methane in the plume originating from the animal's nostrils, results can be a_ected by factors such as: distance from the animal; pointing angle; animal's head orientation and head movement; air movement and temperature in the barn; adjacent animals; and operator variation. Operator variation is likely to be one of the biggest factors, because the operator controls distance and pointing angle, and is responsible for ensuring that the laser remains on target. The structure of the barn and the resulting ventilation conditions and wind speed at the location of the measurement are also considerable sources of variation in recorded methane.

[0774] Assuming operator fatigue does not limit measurements, each LMD could record up to 10 animals per hour. If each animal is recorded 3 times (on 3 consecutive days, for example), throughput is likely to be up to 1000 animals per year.

Methods for Producing of Recombinant Protein and/or Antibodies

[0775] The terms“expression vector” mean the vehicle by which a DNA or RNA sequence (e.g. a foreign gene) can be introduced into a host cell, so as to transform the host and promote expression (e.g. transcription and translation) of the introduced sequence. Thus, a further object of the invention relates to a vector comprising a nucleic acid of the present invention.

[0776] Such vectors may comprise regulatory elements, such as a promoter, enhancer, terminator and the like, to cause or direct expression of said polypeptide upon administration to a subject. Examples of promoters and enhancers used in the expression vector for animal cell include early promoter and enhancer of SV40 (Mizukami T. et al. 1987), LTR promoter and enhancer of Moloney mouse leukemia virus (Kuwana Y et al. 1987), promoter (Mason J O et al. 1985) and enhancer (Gillies S D et al. 1983) of immunoglobulin H chain and the like.

[0777] Any expression vector for animal cell can be used. Examples of suitable vectors include pAGE107 (Miyaji H et al. 1990), pAGE103 (Mizukami T et al. 1987), pHSG274 (Brady G et al. 1984), pKCR (O'Hare K et al. 1981), pSG1 beta d2-4-(Miyaji H et al. 1990) and the like. Other representative examples of plasmids include replicating plasmids comprising an origin of replication, or integrative plasmids, such as for instance pUC, pcDNA, pBR, and the like. Representative examples of viral vector include adenoviral, retroviral, herpes virus and AAV vectors. Such recombinant viruses may be produced by techniques known in the art, such as by transfecting packaging cells or by transient transfection with helper plasmids or viruses. Typical examples of virus packaging cells include PA317 cells, PsiCRIP cells, gPenv-positive cells, 293 cells, etc. Detailed protocols for producing such replication-defective recombinant viruses may be found for instance in WO 95/14785, WO 96/22378, U.S. Pat. Nos. 5,882,877, 6,013,516, 4,861,719, 5,278,056 and WO 94/19478.

[0778] A further object of the present invention relates to a cell which has been transfected, infected or transformed by a nucleic acid and/or a vector according to the invention. The term “transformation” means the introduction of a “foreign” (i.e. extrinsic or extracellular) gene, DNA or RNA sequence to a host cell, so that the host cell will express the introduced gene or sequence to produce a desired substance, typically a protein or enzyme coded by the introduced gene or sequence. A host cell that receives and expresses introduced DNA or RNA has been “transformed.”

[0779] The nucleic acids may be used to produce a recombinant polypeptide of the invention in a suitable expression system. The term “expression system” means a host cell and compatible vector under suitable conditions, e.g. for the expression of a protein coded for by foreign DNA carried by the vector and introduced to the host cell.

[0780] Common expression systems include E. coli host cells and plasmid vectors, insect host cells and Baculovirus vectors, and mammalian host cells and vectors. Other examples of host cells include, without limitation, prokaryotic cells (such as bacteria) and eukaryotic cells (such as yeast cells, mammalian cells, insect cells, plant cells, etc.). Specific examples include E. coli, Kluyveromyces or Saccharomyces yeasts, mammalian cell lines (e.g., Vero cells, CHO cells, 3T3 cells, COS cells, etc.) as well as primary or established mammalian cell cultures (e.g., produced from lymphoblasts, fibroblasts, embryonic cells, epithelial cells, nervous cells, adipocytes, etc.). Examples also include mouse SP2/0-Ag14 cell (ATCC CRL1581), mouse P3X63-Ag8.653 cell (ATCC CRL1580), CHO cell in which a dihydrofolate reductase gene (hereinafter referred to as “DHFR gene”) is defective (Urlaub G et al; 1980), rat YB2/3HL.P2.G11.16Ag.20 cell (ATCC CRL 1662, hereinafter referred to as “YB2/0 cell”), and the like. The YB2/0 cell is preferred, since ADCC activity of chimeric or humanized antibodies is enhanced when expressed in this cell.

[0781] The present invention also relates to a method of producing a recombinant host cell expressing an antibody or a polypeptide of the invention according to the invention, said method comprising the steps consisting of (i) introducing in vitro or ex vivo a recombinant nucleic acid or a vector as described herein into a competent host cell, (ii) culturing in vitro or ex vivo the recombinant host cell obtained and (iii), optionally, selecting the cells which express and/or secrete said antibody or polypeptide. Such recombinant host cells can be used for the production of antibodies and polypeptides of the invention.

[0782] Antibodies and fragments thereof, immunoglobulins, and polypeptides of the present invention may be produced by any technique known in the art, such as, without limitation, any chemical, biological, genetic or enzymatic technique, either alone or in combination.

[0783] Knowing the amino acid sequence of the desired sequence, one skilled in the art can readily produce said antibodies or polypeptides, by standard techniques for production of polypeptides. For instance, they can be synthesized using well-known solid phase method, preferably using a commercially available peptide synthesis apparatus (such as that made by Applied Biosystems, Foster City, Calif.) and following the manufacturer's instructions. Alternatively, antibodies and other polypeptides of the present invention can be synthesized by recombinant DNA techniques as is well-known in the art. For example, these fragments can be obtained as DNA expression products after incorporation of DNA sequences encoding the desired (poly)peptide into expression vectors and introduction of such vectors into suitable eukaryotic or prokaryotic hosts that will express the desired polypeptide, from which they can be later isolated using well-known techniques.

[0784] In particular, the present invention further relates to a method of producing an antibody or a polypeptide of the invention, which method comprises the steps consisting of: (i) culturing a transformed host cell according to the invention under conditions suitable to allow expression of said antibody or polypeptide; and (ii) recovering the expressed antibody or polypeptide.

[0785] Antibodies and other polypeptides of the present invention are suitably separated from the culture medium by conventional immunoglobulin purification procedures such as, for example, protein A-Sepharose, hydroxylapatite chromatography, gel electrophoresis, dialysis, affinity chromatography, ammonium sulfate or ethanol precipitation, acid extraction, anion or cation exchange chromatography, phosphocellulose chromatography, hydrophobic interaction chromatography, hydroxylapatite chromatography and lectin chromatography. High performance liquid chromatography (“HPLC”) can also be employed for purification. See, e.g., Colligan, Current Protocols in Immunology, or Current Protocols in Protein Science, John Wiley & Sons, NY, N.Y., (1997-2001), e.g., Chapters 1, 4, 6, 8, 9, 10, each entirely incorporated herein by reference.

[0786] Chimeric antibodies (e.g., mouse-ruminant chimeras, or one ruminant-another ruminant (e.g., goat-cow) chimeras) of the present invention can be produced by obtaining nucleic sequences encoding VL and VH domains as previously described, constructing a human chimeric antibody expression vector by inserting them into an expression vector for animal cell having genes encoding human antibody CH and human antibody CL, and expressing the coding sequence by introducing the expression vector into an animal cell. The CH domain of a human chimeric antibody can be any region which belongs to human immunoglobulin, such as the IgG class or a subclass thereof, such as IgG1, IgG2, IgG3 and IgG4. Similarly, the CL of a human chimeric antibody can be any region which belongs to Ig, such as the kappa class or lambda class. Chimeric and humanized monoclonal antibodies, comprising both human and non-human portions, which can be made using standard recombinant DNA techniques, are within the scope of the invention. Such chimeric and humanized monoclonal antibodies can be produced by recombinant DNA techniques known in the art, for example using methods described in Robinson et al. International Patent Publication PCT/US86/02269; Akira et al. European Patent Application 184,187; Taniguchi, M. European Patent Application 171,496; Morrison et al. European Patent Application 173,494; Neuberger et al. PCT Application WO 86/01533; Cabilly et al. U.S. Pat. No. 4,816,567; Cabilly et al. European Patent Application 125,023; Better et al. (1988) Science 240:1041-1043; Liu et al. (1987) Proc. Natl. Acad. Sci. USA 84:3439-3443; Liu et al. (1987) J. Immunol. 139:3521-3526; Sun et al. (1987) Proc. Natl. Acad. Sci. 84:214-218; Nishimura et al. (1987) Cancer Res. 47:999-1005; Wood et al. (1985) Nature 314:446-449; Shaw et al. (1988) J. Natl. Cancer Inst. 80:1553-1559); Morrison, S. L. (1985) Science 229:1202-1207; Oi et al. (1986) Biotechniques 4:214; Winter U.S. Pat. No. 5,225,539; Jones et al. (1986) Nature 321:552-525; Verhoeyan et al. (1988) Science 239:1534; and Beidler et al. (1988) J. Immunol. 141:4053-4060.

[0787] In addition, methods for producing antibody fragments are well-known. For example, Fab fragments of the present invention can be obtained by treating an antibody which specifically reacts with a ganglioside with a protease such as papain. Also, Fabs can be produced by inserting DNA encoding Fabs of the antibody into a vector for prokaryotic expression system, or for eukaryotic expression system, and introducing the vector into a procaryote or eucaryote (as appropriate) to express the Fabs.

[0788] Similarly, F(ab′)2 fragments of the present invention can be obtained treating an antibody which specifically reacts with a ganglioside with a protease, pepsin. Also, the F(ab′)2 fragment can be produced by binding Fab′ described below via a thioether bond or a disulfide bond.

[0789] Fab′ fragments of the present invention can be obtained treating F(ab′)2 which specifically reacts with a ganglioside with a reducing agent, dithiothreitol. Also, the Fab′ fragments can be produced by inserting DNA encoding a Fab′ fragment of the antibody into an expression vector for prokaryote, or an expression vector for eukaryote, and introducing the vector into a prokaryote or eukaryote (as appropriate) to perform its expression.

[0790] In addition, scFvs of the present invention can be produced by obtaining cDNA encoding the VH and VL domains as previously described, constructing DNA encoding scFv, inserting the DNA into an expression vector for prokaryote, or an expression vector for eukaryote, and then introducing the expression vector into a prokaryote or eukaryote (as appropriate) to express the scFv.

### Kits

[0791] The present invention also encompasses kits. For example, the kit can comprise a vaccine of the present disclosure, any one of pharmaceutical compositions described herein, at least one additional agent that reduces methane production in a ruminant described herein, or any combination thereof, packaged in a suitable container and can further comprise instructions for using such reagents. The kit may also contain other components, such as administration tools packaged in the same or separate container.

### Exemplary Embodiments

[0792] 1. A vaccine comprising at least one nucleic acid encoding at least one cell surface protein or a fragment thereof (e.g., an antigenic fragment, e.g., a fragment comprising an epitope, e.g., a fragment comprising an extracellular domain or a portion thereof) of at least one methanogen.

[0793] 2. The vaccine of 1, wherein the at least one methanogen is of a family Methanobacteriaceae.

[0794] 3. The vaccine of 1 or 2, wherein the at least one methanogen is of a genus selected from: Methanobrevibacter, Methanosphaera, Methanomicrobium, Methanobacterium, Methanocorpusulum, Methanosaeta, Methanoculleus, Methanosarcina, and Thermoplasmatales, optionally Methanobrevibacter, Methanomicrobium, and Methanosarcina.

[0795] 4. The vaccine of any one of 1-3, wherein the at least one methanogen comprises Methanobacterium formicicum, Methanobacterium bryantii, Methanobrevibacter ruminantium, Methanobrevibacter millerae, Methanobrevibacter olleyae, Methanomicrobium mobile, Methanoculleus olentangyi, Methanosarcina barkeri, Methanobrevibacter boviskoreani, Methanobacterium beijingense, Methanoculleus marisnigri, Methanoculleus bourgensis, Methanosarcina mazei, Thermoplasmatales archaeon BRNA1, Methanobrevibacter gottschalkii, Methanobrevibacter thaueri, Methanobrevibacter smithii, Methanosphaera stadtmanae, Methanococcoides burtonii, Methanolobus psychrophilus R15, Methanobacterium paludism, Methanohalobium evestigatum, Methanomethylovorans hollandica, Methanothrix soehngenii, Methanocaldococcus vulcanius, Methanosalsum zhilinae, Methanocorpusculum labreanum, Methanoregula formicica, Methanoculleus marisnigri, Methanocella arvoryzae, Methanoculleus bourgensis, Methanolacinia petrolearia, Methanospirillum hungatei, Methanoplanus limicola, Methanohalophilus mahii, Methanococcus aeolicus, Methanosphaerula palustris, Methanocaldococcus fervens, Methanocaldococcus jannaschii, Methanocaldococcus sp. FS406-22, Methanoregula boonei, Methanobrevibacter sp. AbM4, Methanobrevibacter ruminantium, Methanosphaera, Methanobacterium formicicum, Methanocaldococcus villosus, Methanosarcina barkeri, Methanobacterium lacus, Methanotorris igneus, Methanotorris formicicus, Methanocaldococcus infernus, Methanofollis liminatans, Methanothermococcus okinawensis, Methanobrevibacter smithii, Methanobrevibacter, Methanocella conradii, Methanothermococcus thermolithotrophicus, Methanococcus maripaludis, Methanococcus maripaludis, Methanococcus vannielii, Methanothermus fervidus, Methanosarcina acetivorans, Methanosarcina mazei, Methanosaeta harundinacea 6Ac, Methanococcus maripaludis, Methanococcus voltae, Methanolinea tarda, Methanolobus psychrophilus, Methanosaeta harundinacea, or any combination thereof.

[0796] 5. The vaccine of any one of 1-4, wherein the at least one methanogen comprises Methanobrevibacter ruminantium and/or Methanobrevibacter gottschalkii.

[0797] 6. The vaccine of any one of 1-5, wherein the vaccine is monovalent.

[0798] 7. The vaccine of any one of 1-5, wherein the vaccine is multivalent, optionally wherein the vaccine comprises at least one nucleic acid encoding at least one cell surface protein or a fragment thereof of Methanobrevibacter ruminantium and Methanobrevibacter gottschalkii.

[0799] 8. The vaccine of 7, wherein the vaccine comprises at least one nucleic acid encoding at least 2, 3, 4, 5, 6, 7, 8, 9 or 10 polypeptides (e.g., of one cell surface protein or of multiple cell surface proteins; or fragments thereof).

[0800] 9. The vaccine of 7 or 8, wherein the vaccine comprises at least one nucleic acid encoding at least 15, 20, 30, 40, 50, or 100 polypeptides (e.g., of one cell surface protein or of multiple cell surface proteins; or fragments thereof).

[0801] 10. The vaccine of 8 or 9, wherein the polypeptides are of at least 2, 3, 4, 5, 6, 7, 8, 9 or 10 methanogens.

[0802] 11. The vaccine any one of 1-10, wherein at least one nucleic acid encodes a concatemeric polypeptide.

[0803] 12. The vaccine of any one of 1-11, wherein the at least one cell surface protein or a fragment thereof comprises an adhesin-like protein, adhesin-like protein with cysteine protease domain, tetrahydromethanopterin S-methyltransferase subunit, a fragment thereof, and/or any combination thereof.

[0804] 13. The vaccine of any one of 1-12, wherein the at least one cell surface protein or a fragment thereof comprises at least 90%, 91%, 92%, 93%, 94%, 95%, 96%, 97% 98%, 99%, or 100% sequence identity to the amino acid sequence set forth in Table 2A, Table 2B, Table 3, Table 19, Table 20, Table 21, or a fragment thereof.

[0805] 14. The vaccine of any one of 1-13, wherein the at least one nucleic acid comprises at least 90%, 91%, 92%, 93%, 94%, 95%, 96%, 97% 98%, 99%, or 100% sequence identity to the nucleotide sequence set forth in Table 2A, Table 2B, Table 3, Table 19, Table 20, Table 21, or a fragment thereof.

[0806] 15. The vaccine of any one of 1-14, wherein the at least one nucleic acid is codon-optimized for expression in a ruminant, optionally codon-optimized for expression in Bos taurus.

[0807] 16. The vaccine of any one of 1-15, wherein the at least one nucleic acid is a deoxyribonucleic acid (DNA) or a ribonucleic acid (RNA).

[0808] 17. The vaccine of any one of 1-16, wherein the at least one nucleic acid is DNA.

[0809] 18. The vaccine of 17, wherein the DNA comprises coding and non-coding sequences.

[0810] 19. The vaccine of 17 or 18, wherein the DNA is operably linked to a promoter.

[0811] 20. The vaccine of 19, wherein the promoter is selected form CMV promoter, CAG promoter, SCP promoter, CMVe-SCP, CMVmax, JET, PGK, EF-1a, AHSP promoter, MND promoter, Wiskott-Aldrich promoter, and PKLR promoter.

[0812] 21. The vaccine of any one of 17-20, wherein the DNA comprises:
[0813] (a) a transcription regulatory element (e.g., an enhancer, a transcription termination sequence, a proximal promoter element, a locus control region); and/or
[0814] (b) a translation regulatory element (e.g., Kozak sequence, an untranslated region (5′ UTR or 3′ UTR), a polyadenylation signal sequence).

[0815] 22. The vaccine of any one of 17-21, wherein the DNA further comprises
[0816] (a) a sequence encoding a signal peptide (e.g., Table 5A and Table 5C); and/or
[0817] (b) a sequence encoding a transmembrane domain, optionally further comprising a cytoplasmic domain (e.g., Table 5B and Table 5C).

[0818] 23. The vaccine of any one of 17-22, wherein the DNA is linear or circular.

[0819] 24. The vaccine of any one of 17-23, wherein the DNA is double-stranded or single-stranded.

[0820] 25. The vaccine of any one of 17-24, wherein the DNA is single-stranded and comprises at least one hairpin.

[0821] 26. The vaccine of any one of 17-24, wherein the DNA is double-stranded and comprises a telomeric sequence (e.g., a closed linear DNA, e.g., dbDNA™)

[0822] 27. The vaccine of any one of 17-26, wherein the DNA comprises at least one chemical modification.

[0823] 28. The vaccine of 27, wherein the at least one chemical modification is a terminal modification, which is present at 5′ end and/or 3′ end.

[0824] 29. The vaccine of 27 or 28, wherein the at least one chemical modification comprises phosphorothioate, triethylene glycol (TEG), Locked Nucleic Acid (LNA, a 2′-oxygen-4′-carbon methylene linkage), hexaethylene glycol (Sp18), 1,3-propanediol (SpC3), 2′-O-methoxyethyl (MOE) ribonucleotides, 2′-O-methyl ribonucleotides (2′-Ome), 2′-fluoro (2′-F) nucleotides, or any combination thereof.

[0825] 30. The vaccine of 29, wherein the at least one chemical modification comprises at least five consecutive phosphorothioate bonds.

[0826] 31. The vaccine of 29 or 30, wherein the at least one chemical modification comprises at least three consecutive 2′-O-methyl nucleosides and/or 2′-O-methoxyethyl nucleosides.

[0827] 32. The vaccine of any one of 17-31, wherein the DNA is in a vector.

[0828] 33. The vaccine of 32, wherein the vector is a plasmid.

[0829] 34. The vaccine of any one of 17-33, wherein the DNA is packaged in a virus, e.g., AAV, e.g., bovine AAV (e.g., for transduction to a subject).

[0830] 35. The vaccine of any one of 1-16, wherein the at least one nucleic acid is RNA (e.g., mRNA).

[0831] 36. The vaccine of 35, wherein the RNA comprises a 5′ cap.

[0832] 37. The vaccine of 35 or 36, wherein the RNA comprises the 5′ cap with at least one chemical modification.

[0833] 38. The vaccine of any one of 35-37, wherein the 5′ terminal cap is selected from:
[0834] (a) (Cap 0) m7G(5′)pppN1pN2p;
[0835] (b) (Cap 1) m7G(5′)pppN1mpNp;
[0836] © (Cap 2) m7G(5′)pppN1mpN2mp;
[0837] (d) (Cap 4) m7Gpppm(3)(6,6,2′)Apm(2′)Apm(2′)Cpm(2)(3,2′)Up; and
[0838] © Anti-reverse Cap Analog (ARCA).

[0839] 39. The vaccine of any one of 35-38, wherein the RNA comprises 5′ UTR.

[0840] 40. The vaccine of 39, wherein the 5′ UTR comprises a secondary structure.

[0841] 41. The vaccine of 39, wherein the 5′ UTR does not comprise a secondary structure.

[0842] 42. The vaccine of any one of 39-41, wherein the 5′ UTR comprises a Kozak sequence and/or at least one translational enhancer element (TEE).

[0843] 43. The vaccine of 42, wherein the TEE comprises internal ribosome entry site (IRES).

[0844] 44. The vaccine of any one of 39-43, wherein the 5′ UTR comprises a nucleic acid sequence that is at least 60%, 65%, 70%, 75%, 80%, 85%, 90%, 95%, or 100% identical to:
[0845] (a) the 5′ UTR or a fragment thereof of a gene that is highly expressed in muscle (e.g., MyoD, Myosin, Myoglobin, Myogenin, Herculin), endothelial cells (e.g., Tie-1, CD36), or lung epithelial cells (e.g., SP-A/B/C/D); and/or
[0846] (b) any one of the 5′ UTRs or a fragment thereof listed in Table 4A.

[0847] 45. The vaccine of any one of 35-44, wherein the RNA comprises a 3′ UTR.

[0848] 46. The vaccine of 45, wherein the 3′ UTR comprises a secondary structure.

[0849] 47. The vaccine of 45, wherein the 3′ UTR does not comprise a secondary structure.

[0850] 48. The vaccine of any one of 45-47, wherein the 3′ UTR comprises at least one translational enhancer element (TEE) and/or a stem loop (e.g., a histone stem loop).

[0851] 49. The vaccine of any one of 45-48, wherein the 3′ UTR comprises a nucleic acid sequence that is at least 60%, 65%, 70%, 75%, 80%, 85%, 90%, 95%, or 100% identical to any one of the 3′ UTRs listed in Table 4B.

[0852] 50. The vaccine of any one of 35-49, wherein the RNA comprises a polyA tail or a polyadenylation signal.

[0853] 51. The vaccine of 50, wherein the polyA tail is at least 50, 60, 70, 80, 90, 100, 110, 120, 130, 140, or 150 bps long.

[0854] 52. The vaccine of 50 or 51, wherein the polyA tail is about 100-150 bps long.

[0855] 53. The vaccine of any one of 50-52, wherein the polyA tail comprises a linker (e.g., that disrupts the polyA tail).

[0856] 54. The vaccine of 53, wherein the linker comprises the sequence UGC or a plurality thereof (e.g., multiple copies of the UGC linker).

[0857] 55. The vaccine of any one of 35-54, wherein the RNA comprises a sequence encoding a signal peptide, optionally wherein the sequence encodes a signal peptide selected from the signal peptides listed in Table 5A and Table 5C.

[0858] 56. The vaccine of any one of 35-55, wherein the RNA comprises a sequence encoding a transmembrane © domain and/or a sequence encoding cytoplasmic domain, optionally wherein the sequence encodes a transmembrane domain and/or a cytoplasmic domain selected from those listed in Table 5B and Table 5C.

[0859] 57. The vaccine of any one of 35-56, wherein the RNA comprises:
[0860] (a) a 5′ cap, a 5′ untranslated region (UTR), a sequence encoding at least one cell surface protein or a fragment thereof of at least one methanogen, a 3′ UTR, and a polyA tail;
[0861] (b) a 5′ cap, a 5′ UTR, a sequence encoding a signal peptide, a sequence encoding at least one cell surface protein or a fragment thereof of at least one methanogen, a 3′ UTR, and a poly A tail; or
[0862] © a 5′ cap, a 5′ UTR, a sequence encoding a signal peptide, a sequence encoding at least one cell surface protein or a fragment thereof of at least one methanogen, a sequence encoding a transmembrane domain, optionally further comprising a sequence encoding a cytoplasmic domain, 3′ UTR, and a poly A tail.

[0863] 58. The vaccine of any one of 35-57, wherein the at least one cell surface protein or a fragment thereof of at least one methanogen is expressed as a cytoplasmic protein, as a secreted protein, or as a membrane-tethered protein.

[0864] 59. The vaccine of any one of 35-58, wherein the RNA comprises at least one chemical modification.

[0865] 60. The vaccine of 59, wherein the chemical modification is in the sequence encoding at least one cell surface protein or a fragment thereof of at least one methanogen.

[0866] 61. The vaccine of any one of 35-60, wherein the RNA comprises at least one chemical modification selected from pyridin-4-one ribonucleoside, 5-aza-uridine, 2-thio-5-aza-uridine, 2-thiouridine, 4-thio-pseudouridine, 2-thio-pseudouridine, 5-hydroxyuridine, 3-methyluridine, 5-carboxymethyl-uridine, 1-carboxymethyl-pseudouridine, 5-propynyl-uridine, 1-propynyl-pseudouridine, 5-taurinomethyluridine, 1-taurinomethyl-pseudouridine, 5-taurinomethyl-2-thio-uridine, 1-taurinomethyl-4-thio-uridine, 5-methyl-uridine, 1-methyl-pseudouridine, 4-thio-1-methyl-pseudouridine, 2-thio-1-methyl-pseudouridine, 1-methyl-1-deaza-pseudouridine, 2-thio-1-methyl-1-deaza-pseudouridine, dihydrouridine, dihydropseudouridine, 2-thio-dihydrouridine, 2-thio-dihydropseudouridine, 2-methoxyuridine, 2-methoxy-4-thio-uridine, 4-methoxy-pseudouridine, 4-methoxy-2-thio-pseudouridine, 5-aza-cytidine, pseudoisocytidine, 3-methyl-cytidine, N4-acetylcytidine, 5-formylcytidine, N4-methylcytidine, 5-hydroxymethylcytidine, 1-methyl-pseudoisocytidine, pyrrolo-cytidine, pyrrolo-pseudoisocytidine, 2-thio-cytidine, 2-thio-5-methyl-cytidine, 4-thio-pseudoisocytidine, 4-thio-1-methyl-pseudoisocytidine, 4-thio-1-methyl-1-deaza-pseudoisocytidine, 1-methyl-1-deaza-pseudoisocytidine, zebularine, 5-aza-zebularine, 5-methyl-zebularine, 5-aza-2-thio-zebularine, 2-thio-zebularine, 2-methoxy-cytidine, 2-methoxy-5-methyl-cytidine, 4-methoxy-pseudoisocytidine, 4-methoxy-1-methyl-pseudoisocytidine, 2-aminopurine, 2, 6-diaminopurine, 7-deaza-adenine, 7-deaza-8-aza-adenine, 7-deaza-2-aminopurine, 7-deaza-8-aza-2-aminopurine, 7-deaza-2,6-diaminopurine, 7-deaza-8-aza-2,6-diaminopurine, 1-methyladenosine, N6-methyladenosine, N6-isopentenyladenosine, N6-(cis-hydroxyisopentenyl)adenosine, 2-methylthio-N6-(cis-hydroxyisopentenyl) adenosine, N6-glycinylcarbamoyladenosine, N6-threonylcarbamoyladenosine, 2-methylthio-N6-threonyl carbamoyladenosine, N6,N6-dimethyladenosine, 7-methyladenine, 2-methylthio-adenine, and 2-methoxy-adenine, inosine, 1-methyl-inosine, wyosine, wybutosine, 7-deaza-guanosine, 7-deaza-8-aza-guanosine, 6-thio-guanosine, 6-thio-7-deaza-guanosine, 6-thio-7-deaza-8-aza-guanosine, 7-methyl-guanosine, 6-thio-7-methyl-guanosine, 7-methylinosine, 6-methoxy-guanosine, 1-methylguanosine, N2-methylguanosine, N2,N2-dimethylguanosine, 8-oxo-guanosine, 7-methyl-8-oxo-guanosine, 1-methyl-6-thio-guanosine, N2-methyl-6-thio-guanosine, and N2,N2-dimethyl-6-thio-guanosine, and any combination thereof.

[0867] 62. The vaccine of any one of 35-61, wherein the RNA comprises a chemical modification in at least 75%, 80%, 85%, 90%, 95%, 99%, or 100% of the uracils in the sequence encoding at least one cell surface protein or a fragment thereof of at least one methanogen.

[0868] 63. The vaccine of 62, wherein the chemical modification is in the 5-position of the uracil.

[0869] 64. The vaccine of 62 or 63, wherein the at least one chemical modification is selected from the group consisting of pseudouridine, N1-methyl pseudouridine, 2-thiouridine, 4′-thiouridine, 5-methylcytosine, 2-thio-1-methyl-1-deaza-pseudouridine, 2-thio-1-methyl-pseudouridine, 2-thio-5-aza-uridine, 2-thio-dihydropseudouridine, 2-thio-dihydrouridine, 2-thio-pseudouridine, 4-methoxy-2-thio-pseudouridine, 4-methoxy-pseudouridine, 4-thio-1-methyl-pseudouridine, 4-thio-pseudouridine, 5-aza-uridine, dihydropseudouridine, 5-methxyuridine, and 2′-O-methyl uridine.

[0870] 65. The vaccine of any one of 62-64, wherein the chemical modification comprises N1-methyl pseudouridine.

[0871] 66. A pharmaceutical composition comprising the vaccine of any one of 1-65, and at least one carrier and/or at least one excipient.

[0872] 67. The pharmaceutical composition of 66, wherein the vaccine is formulated in lipid or saline.

[0873] 68. The pharmaceutical composition of 66 or 67, wherein the vaccine is formulated in lipid.

[0874] 69. The pharmaceutical composition of 67 or 68, wherein the nucleic acid (e.g., DNA or RNA) to total lipid ratio is at least about 0.05 (wt/wt).

[0875] 70. The pharmaceutical composition of any one of 67-69, wherein the vaccine is formulated in a liposome, a lipoplex, or a lipid nanoparticle.

[0876] 71. The pharmaceutical composition of 70, wherein the vaccine is formulated in a lipid nanoparticle.

[0877] 72. The pharmaceutical composition of 70 or 71, wherein the vaccine is formulated in a lipid nanoparticle comprising an ionizable lipid, a helper lipid, a PEGylated lipid, a structural lipid (e.g., sterol), or any combination thereof.

[0878] 73. The pharmaceutical composition of any one of 70-72, wherein the lipid nanoparticle comprises an ionizable lipid, a helper lipid, a PEGylated lipid, and a structural lipid (e.g., sterol).

[0879] 74. The pharmaceutical composition of 72 or 73, wherein:
[0880] (a) the ionizable lipid is an ionizable cationic lipid; and/or
[0881] (b) the helper lipid is a neutral lipid.

[0882] 75. The pharmaceutical composition of any one of 70-74, wherein the lipid nanoparticle has a molar ratio of about 20-60% ionizable lipid: about 5-25% helper lipid: about 25-55% structural lipid; and about 0.5-15% PEGylated lipid.

[0883] 76. The pharmaceutical composition of any one of 70-75, wherein the lipid nanoparticle has a molar ratio of about 50% ionizable lipid: about 10% helper lipid: about 38.5% structural lipid; and about 1.5% PEGylated lipid.

[0884] 77. The pharmaceutical composition of any one of 72-76, wherein the ionizable lipid comprises 2,2-dilinoleyl-4-dimethylaminoethyl-[1,3]-dioxolane (Dlin-KC2-DMA), dilinoleyl-methyl-4-dimethylaminobutyrate (Dlin-MC3-DMA), di((Z)-non-2-en-1-yl) 9-((4-(dimethylamino)butanoyl)oxy)heptadecanedioate (L319), 4-hydroxybutyl)azanediyl)bis(hexane-6,1-diyl)bis(2-hexyldecanoate (ALC-0315), SM-102, A18-Iso5-2DC18, A6, 3060i10, or any combination thereof.

[0885] 78. The pharmaceutical composition of any one of 72-77, wherein the PEGylated lipid comprises (2-[(polyethylene glycol)-2000]-N,N-ditetradecylacetamide (PEG2000-DMA (also called ALC-0159)); and/or polyethylene glycol 2000 dimyristoyl glycerol (PEG2000-DMG).

[0886] 79. The pharmaceutical composition of any one of 72-78, wherein the helper lipid comprises 1,2-distearoyl-sn-glycero-3-phosphocholine (DSPC) and/or 1,2-dioleoyl-sn-glycero-3-phosphoethanolamine (DOPE).

[0887] 80. The pharmaceutical composition of any one of 72-79, wherein the structural lipid comprises: cholesterol, β-Sitosterol, 20α-Hydroxycholesterol, sterol, or any combination thereof.

[0888] 81. The pharmaceutical composition of any one of 70-80, wherein the lipid nanoparticle comprises SM-102, polyethylene glycol 2000 dimyristoyl glycerol (PEG2000-DMG), 1,2-distearoyl-sn-glycero-3-phosphocholine (DSPC), and cholesterol.

[0889] 82. The pharmaceutical composition of any one of 70-80, wherein the lipid nanoparticle comprises ((4-hydroxybutyl)azanediyl)bis(hexane-6,1-diyl)bis(2-hexyldecanoate, 2-(polyethylene glycol 2000)-N,N-ditetradecylacetamide (PEG2000-DMA), 1,2-distearoyl-sn-glycero-3-phosphocholine (DSPC), and cholesterol

[0890] 83. The pharmaceutical composition of any one of 66-82, further comprising potassium chloride, monobasic potassium phosphate, sodium chloride, dibasic sodium phosphate dihydrate, sucrose, or any combination thereof.

[0891] 84. The pharmaceutical composition of any one of 66-82, further comprising tromethamine, tromethamine hydrochloride, sucrose, or any combination thereof.

[0892] 85. The pharmaceutical composition of any one of 70-84, wherein the nanoparticle has:
[0893] (a) a mean diameter of about 50 nm to about 200 nm, optionally about 80 nm to about 100 nm;
[0894] (b) a polydispersity index (PDI) of less than 0.4; and/or
[0895] © a net neutral charge at a neutral pH.

[0896] 86. The pharmaceutical composition of any one of 66-85, further comprising an adjuvant.

[0897] 87. The pharmaceutical composition of 86, wherein the adjuvant comprises saponin, Montanide ISA61, a chitosan thermogel, a lipid nanoparticle/cationic liposome adjuvant, or any combination thereof.

[0898] 88. The pharmaceutical composition of 86 or 87, wherein the adjuvant comprises Montanide ISA61.

[0899] 89. The pharmaceutical composition of any one of 66-88, further comprising a transfection facilitating compound.

[0900] 90. The pharmaceutical composition of 89, wherein the transfection facilitating compound comprises (±)-N-(2-hydroxyethyl)-N,N-dimethyl-2,3-bis(tetradecyloxy)-1-propanaminium bromide) (DMRIE).

[0901] 91. A method of inducing an immune response against at least one methanogen in a ruminant, the method comprising administering to the ruminant the vaccine of any one of 1-62, or the pharmaceutical composition of any one of 66-90.

[0902] 92. The method of 91, wherein the immune response comprises a B cell response and/or a T cell response.

[0903] 93. A method of reducing the activity, number, and/or type of methanogens in the gut of a ruminant, the method comprising administering to the ruminant the vaccine of any one of 1-65, or the pharmaceutical composition of any one of 66-90.

[0904] 94. A method of reducing the amount of methane produced by a ruminant, the method comprising administering to the ruminant the vaccine of any one of 1-65, or the pharmaceutical composition of any one of 66-93.

[0905] 95. The method of any one of 91-94, wherein the ruminant produces an antibody against at least one methanogen.

[0906] 96. The method of 95, wherein the antibody is an IgG or an IgA, preferably an IgA.

[0907] 97. The method of 95 or 96, wherein the antibody is produced in an amount sufficient to:
[0908] (a) carry the antibody to the gut;
[0909] (b) reduce the number and/or type of methanogens in the gut; and/or
[0910] © reduce the amount of methane produced by the ruminant.

[0911] 98. The method of any one of 91-97, wherein the method reduces the methane production by the ruminant by at least about 1%, 5%, 10%, 20%, 30%, 40%, 50%, 60%, 70%, 80%, 90%, or 95% as compared with a control.

[0912] 99. The method of 98, wherein the control is an accepted reference, or the amount of methane production in a ruminant that has not been vaccinated.

[0913] 100. The method of any one of 91-99, wherein the vaccine or the pharmaceutical composition is administered to the ruminant via a route selected from intramuscular administration, intradermal administration, subcutaneous administration, and nasal administration.

[0914] 101. The method of any one of 91-100, wherein the ruminant is administered with at least one dose of the vaccine or pharmaceutical composition.

[0915] 102. The method of any one of 91-101, wherein the ruminant is administered with at least one or two repeat doses of the vaccine or pharmaceutical composition (e.g., booster dose).

[0916] 103. The method of 102, wherein the ruminant is administered with the repeat dose of the vaccine or pharmaceutical composition after at least about 2 weeks, 1 month, 6 months, or 12 months from the time the ruminant is administered with the preceding dose of the vaccine.

[0917] 104. The method of 102 or 103, wherein the ruminant is administered with the repeat dose of the vaccine or pharmaceutical composition no more than about 3 months, 6 months, 12 months, or 24 months from the time the ruminant is administered with the preceding dose of the vaccine.

[0918] 105. The method of any one of 102-104, wherein the ruminant receives the repeat dose of the vaccine after at least about 2 weeks and no more than about 18 months from the time the ruminant is administered with the preceding dose of the vaccine.

[0919] 106. The method of any one of 102-105, wherein the ruminant receives a repeat dose of the vaccine after at least about 4 weeks and no more than about 12 months from the time the ruminant is administered with the preceding dose of the vaccine.

[0920] 107. The method of any one of 91-106, wherein the ruminant is administered with a dosage of between 1 ug/kg and 400 ug/kg of the nucleic acid vaccine.

[0921] 108. The method of any one of 91-107, wherein the ruminant is administered with a dosage of the nucleic acid comprising at least about 25 ug, 50 ug, 100 ug, 150 ug, 200 ug, 250 ug, or 300 ug of the RNA.

[0922] 109. The method of any one of 91-108, wherein the ruminant is administered with a dosage of the nucleic acid comprising at least about 100 ug.

[0923] 110. The method of any one of 91-109, wherein the ruminant is administered with a dosage of the nucleic acid comprising at least about 200 ug.

[0924] 111. The method of any one of 91-110, wherein the ruminant is administered with a dosage of the nucleic acid comprising at least about 300 ug.

[0925] 112. The method of any one of 91-111, further comprising administering to the ruminant at least one agent that reduces the level of methane produced by the ruminant.

[0926] 113. The method of 112, wherein the at least one agent is administered to a ruminant concomitant with, prior to, or after the vaccination.

[0927] 114. The method of 112 or 113, wherein the at least one agent is administered to a ruminant after the vaccination.

[0928] 115. The method of any one of 112-114, wherein the at least one agent is administered to a ruminant daily, semiweekly, weekly, biweekly (every two weeks), or monthly.

[0929] 116. The method of any one of 112-115, wherein the at least one agent is administered to a ruminant for a duration of at least 1 week but no more than 1 month.

[0930] 117. The method of any one of 112-116, wherein the at least one agent is selected from:
[0931] (a) the agents listed in Table 8B; and/or
[0932] (b) 3-Nitrooxypropanol (3-NOP), ethyl-3NOP, 2-bromoethanesulfonate (BES), 2-chloroethanesulfonate (CES), 3-bromopropanesulfonate (BPS), bromochloromethane (BCM), bromoform, bromodichloromethane, dibromochloromethane, carbon tetrachloride, trichloroacetamide, trichloroethyladipate, lumazin (2,4-pteridinedione), p-aminobenzoic acid, lovastatin, mevastatin, pravastatin, diallyl disulfide, garlic oil, saponins, tannins, flavonoids, nitrate, nitroethane, -nitro-propionate, 2-nitropropanol, 2-nitroethanol, malate, acrylate, oxaloacetate, fumarate, propynoic acid, 3-butenoic acid, 2-butynoic acid, ethyl 2-butynoate, monensin, lasalocid, bovicin HC5, nisin, and any combination thereof.

[0933] 118. The method of any one of 112-117, wherein the at least one agent is 3-NOP or ethyl-3NOP.

[0934] 119. The method of 118, wherein the ruminant is administered with at least about 0.5 g but no more than 25 g of 3-NOP per day.

[0935] 120. The method of 118 or 119, wherein the ruminant is administered with at least about 1 g but no more than 5 g of 3-NOP per day.

[0936] 121. The method of any one of 118-120, wherein the ruminant is administered with about 2.5 g of 3-NOP per day.

[0937] 122. The method of any one of 118-121, wherein the ruminant is administered with 3-NOP for a duration of at least 1 week but no more than 1 month.

[0938] 123. The method of any one of 112-122, wherein the at least one agent is formulated in animal feed.

[0939] 124. The method of 112, wherein the at least one agent is a composition comprising one or more small molecules that reduce the production of one or more deleterious atmospheric gases and/or precursors thereof and one or more agriculturally suitable carriers.

[0940] 125. The method of 124, wherein the one or more agriculturally suitable carriers comprises a solid carrier.

[0941] 126. The method of 125, wherein the one or more solid carriers comprises attapulgite, kaolinite, fuller's earth, calcium carbonate, perlite, diatomaceous earth, calcium silicate, fly ash, a polysaccharide, a disaccharide, a monosaccharide, a gum, a natural or synthetic derivative thereof, or a combination thereof.

[0942] 127. The method of 125, wherein the one or more solid carriers comprises attapulgite, kaolinite, fuller's earth, calcium carbonate, perlite, diatomaceous earth, calcium silicate, fly ash, a polysaccharide, a disaccharide, a monosaccharide, a gum, silica, propylene glycol, hemp protein, biochar, montmorillonite, activated charcoal, lignin, wood flour, hemp protein, pea protein, soy protein, gelatin, casein, chotsan, talc, calcium phosphate, arginine, lysine, calcium carbonate, carbon black, glutamine, betaine, bismuth phosphate, bismuth citrate, iron phosphate, or any combination thereof.

[0943] 128. The method of any one of 125-127, wherein the one or more solid carriers comprises a saccharide comprising cellulose, xanthan gum, karaya gum, ethylcellulose, inositol, galactose, arabinose, lactose, lactulose, mannitol, mannose, sorbose, turanose, platinose, or a combination thereof.

[0944] 129. The method of any one of 125-127, wherein the one or more solid carriers comprises a saccharide comprising cellulose, xanthan gum, karaya gum, ethylcellulose, inositol, galactose, arabinose, lactose, lactulose, mannitol, mannose, sorbose, turanose, platinose, carrageenan, cellulose acetate, hydroxypropyl cellulose, cellulose acteate phthalate, maltrodextran, dextran, inulin, corn starch, amylopectin, sodium startch glycolate, pentaerthritol, cyclodextrin, or a combination thereof.

[0945] 130. The method of any one of 124-129, wherein the solid carrier comprises silica and ethylcellulose.

[0946] 131. The method of 130, wherein the carrier comprises about 10% to about 50% by weight of the silica and about 50 to about 90% by weight of the ethylcelluose.

[0947] 132. The method of any one of 124-129, wherein the carrier comprises silica and activated charcoal.

[0948] 133. The method of any one of 124-129, wherein the carrier comprises about 10% to about 90% by weight of the silica and about 10% to about 90% by weight of the activated charcoal.

[0949] 134. The method of any one of 133, wherein the carrier further comprises arginine, lysine, or both arginine and lysine.

[0950] 135. The method of any one of 124-129, wherein the carrier comprises activated charcoal and ethylcellulose.

[0951] 136. The method of 135, wherein the carrier comprises about 10% to about 50% by weight of the activated charcoal and about 40 to about 90% by weight of the ethylcellulose.

[0952] 137. The method of 135 or 136, wherein the carrier further comprises about 1 to about 10% by weight of sodium lignosulfate or about 1 to about 10% by weight of hydroxyethyl cellulose.

[0953] 138. The method of any one of 124-129, wherein the carrier comprises arginine and polycaprolactone.

[0954] 139. The method of 138, wherein the carrier comprises about 10 to about 60% by weight of the arginine and about 30 to about 90% by weight of the polycaprolactone.

[0955] 140. The method of any one of 124-129, wherein the carrier comprises silica and polycaprolactone.

[0956] 141. The method of 139, wherein the carrier comprises about 10 to about 60% by weight of the silica and about 30 to about 90% by weight of the polycaprolactone.

[0957] 142. The method of any one of 125-141, wherein the one or more solid carriers is inert.

[0958] 143. The method of any one of 125-142, wherein the one or more solid carriers is water soluble.

[0959] 144. The method of any one of 124-143, further comprising one or more additives with a density greater than water and/or one or more additives that reduces the rate of dissolution of the composition in water.

[0960] 145. The method of 144, wherein the composition has a density of at least 1.1, preferably about 1.1 mg/mL to about 3 mg/mL, about 1.5 to about 3 mg/mL, about 1.5 to about 2.5 mg/mL, or about 1.5 to about 2 mg/mL.

[0961] 146. The method of 144 or 145, wherein the one or more additives with a density greater than water comprises silica, attapulgite, kaolinite, fuller's earth, calcium carbonate, perlite, diatomaceous earth, calcium silicate, fly ash, or any combination thereof.

[0962] 147. The method of any one of 144-146, wherein the one or more additives that reduces the rate of dissolution of the composition further reduces a rate of release of the one or more small molecules into water.

[0963] 148. The method of 147, wherein the composition dissolves over at least about 1, 2, 3, 4, 5, 6, 7, 14, 21, 28, 35, 42, 49, 56, 63, 70, 77, 84, 91, 98, 105, 112, 119, 126, 133, 140, and/or nor more than about 2, 3, 4, 5, 6, 7, 14, 21, 28, 35, 42, 49, 56, 63, 70, 77, 84, 91, 98, 105, 112, 119, 126, 133, 140, or 147 days, about 1 to about 147 days, more preferably 7-63 days, more preferably about 7-42 days, even more preferably 14-42 days yet even more preferably 14-28 days.

[0964] 149. The method of any one of 124-148, wherein about 40 to about 80% of the small molecules that reduce the production of one or more deleterious atmospheric gases and/or precursors is thereof is released in water after 15 days.

[0965] 150. The method of any one of 124-149, wherein the composition comprises particles having a uniform size distribution.

[0966] 151. The method of any one of 124-150, wherein the composition comprises particles having a non-uniform size distribution.

[0967] 152. The method of 150 or 151, wherein the particles comprise a spherical-, square-, rectangular-, capsular-, cylindrical-, conical-, ovular-, triangular-, diamond-, or disk-like shape.

[0968] 153. The method of any one of 124-152, wherein the particles have a size ranging from about 1 mm to about 20 mm, about 1 to about 15 mm, about 1 to about 10 mm, about 5 to about 20 mm, about 5 to about 15 mm, or about 5 to about 10 mm.

[0969] 154. The method of any one of 124-153, wherein the particles further comprises a coating.

[0970] 155. The method of 154, wherein the coating comprises at least two layers.

[0971] 156. The method of 154 or 155, wherein the coating is selected from cellulose acetate phlalate, ethyl cellulose, hydroxypropyl cellulose, polycaprolactone, alginate, chitosan, polyethylene glycol, cellulose actate, triacetin, propylene glycol, n-methyl-2-pyrollidone, and any combination thereof.

[0972] 157. The method of 154 or 155, wherein the coating comprises two or more polyelectrolytes.

[0973] 158. The method of 157, wherein the polyelelctrolytes comprise polystyrene sulfonate, polyethyleneimine, sodium lignosulfate, polyglutamic acid and poly-L-lysine, poly-L-arginine, polyallylamine hydrochloride, polyacrylic acid, or any combination thereof.

[0974] 159. The method of 158, wherein the polyelectrolytes comprise polyallylamine hydrochloride and sodium lignosulfate.

[0975] 160. The method of 158, wherein the polyelectrolytes comprise polyallylamine hydrochloride and polystyrene suylfonate.

[0976] 161. The method of 158, wherein the polyelectrolytes comprise sodium lignosulfate and one of polyglutamic acid and poly-L-lysine, or poly-L-arginine, and sodium lignosulfate.

[0977] 162. The method of 158, wherein the polyelectrolytes comprise polystyrene sulfonate and one of polyglutamic acid and poly-L-lysine, or poly-L-arginine.

[0978] 163. The method of any one of 157-162, wherein the two or more polyelectrolytes are crosslinked.

[0979] 164. The method of any one of 124-163, wherein the one or more small molecules comprise a molecule that interferes with the uptake and/or conversion of acetate, H₂, CO₂, methanol, monomethylamine, dimethylamine, trimethylamine, nitric oxide, or a combination thereof.

[0980] 165. The method of any one of 124-164, wherein the one or more small molecules that reduce the production of one or more deleterious atmospheric gases and/or precursors interact with an enzyme selected from the group consisting of 3-(methylthio)propanoate:coenzyme M methyltransferase, acetate kinase, acetyl-CoA decarbonylase, acetyl-CoA decarbonylase/synthase complex α₂ε₂, acetyl-CoA decarbonylase/synthase complex 3, acetyl-CoA decarbonylase/synthase complex γδ, acetyl-CoA synthase, carbon monoxide dehydrogenase, carbonic anhydrase, Co-methyltransferase, coenzyme M reductase, cyclohydrolase, dehydrogenase, dimethylamine-[corrinoid protein] Co-methyltransferase, F₄₂₀-dependent methylene-H₄MPT reductase, F₄₂₀-dependent methylene-H₄SPT dehydrogenase, formylmethanofuran dehydrogenase, formylmethanofuran:H₄MPT formyltransferase, formylmethanofuran:H₄SPT formyltransferase, formyltransferase, H₂-forming methylene-H₄MPT dehydrogenase, methanol-5-hydroxybenzimidazolylcobamide Co-methyltransferase, methenyl-H₄MPT cyclohydrolase, methyl-coenzyme M reductase, methyl-H₄SPT:CoM methyltransferase, methylated [methylamine-specific corrinoid protein]:coenzyme M methyltransferase, methylcobamide:CoM methyltransferase, methylthiol:coenzyme M methyltransferase, methyltransferase, MtaC protein:coenzyme M methyltransferase, phosphotransacetylase, tetrahydromethanopterin S-methyltransferase, tetramethylammonium methyltransferase, trimethylamine-corrinoid protein Co-methyltransferase, and any combination thereof.

[0981] 166. The method of 165, wherein the one or more small molecules that reduce the production of one or more deleterious atmospheric gases and/or precursors interact with methyl-coenzyme M reductase (MCR).

[0982] 167. The method of any one of 124-166, wherein the one or more small molecules that reduce the production of one or more deleterious atmospheric gases and/or precursors comprise a compound having the formula

R¹—[CH₂]ₙ—ONO₂ wherein
[0983] n is an integer from 1 to 15;
[0984] R¹ is selected from the group consisting of H, C₁-C₆alkyl, phenyl, —OH, —NH₂, —CN, —COH, —O(C═O)R³, —NHC(═O)R³, —SO₂NHR³, or —ONO₂, —SH and R³ is C₁-C₆alkyl, phenyl, pyridyl;
   with the proviso that when n is >3 the hydrocarbon chain may be interrupted by —O— or —NH—.

[0985] 168. The method of 167, wherein the one or more small molecules that reduce the production of one or more deleterious atmospheric gases and/or precursors is selected from 3-nitrooxypropanol, 9-nitrooxynonanol, 5-nitrooxy pentanoic acid, 6-nitrooxy hexanoic acid, bis(2-hydroxyethyl)amine dinitrate, 1,4-bis-nitrooxybutane, 1,5-bis-nitrooxypentane, and any combination thereof.

[0986] 169. The method of 167, wherein the one or more small molecules that reduce the production of one or more deleterious atmospheric gases and/or precursors comprises 3-nitrooxypropanol (3-NOP).

[0987] 170. The method of any one of 124-169, wherein the composition comprises about 1 to about 25% by weight of the small molecule, about 5 to about 20% by weight of the small molecule, or about 5 to about 15% by weight of the small molecule.

[0988] 171. The method of any one of 124-170, wherein the composition comprises a plurality of populations of particles, wherein each population or particles comprises a different formulation, a different shape, and/or a different size distribution.

[0989] 172. The method of 171, wherein the plurality of populations of particles comprises a first population and a second population.

[0990] 173. The method of 172, wherein the population of granular particles further comprises at least 1, 2, 3, 4, 5, 5, 6, 8, or 9 and/or no more than 4, 5, 6, 7, 8, 9, or 10 additional populations, for example 3-10 additional populations, preferably 3-7 additional populations, more preferably 3-5 additional populations.

[0991] 174. The method of 172 or 173, wherein the first population comprises an immediate release formulation.

[0992] 175. The method of any one of 172-174, wherein the second population comprises a delayed release formulation.

[0993] 176. The method of any one of 173-175, wherein each additional population comprises a delayed release formulation, wherein each population dissolves and/or releases the one or more small molecules that reduce the production of one or more deleterious atmospheric gases and/or precursors at a different time than each of the other populations.

[0994] 177. An antibody produced by the method of any one of 91-176, or a fragment thereof.

[0995] 178. The antibody of 177, wherein the antibody is a monoclonal antibody.

[0996] 179. The antibody of 177 or 178, wherein the antibody is an IgG or an IgA, preferably an IgA.

[0997] 180. The antibody of any one of 177-179, wherein the antibody is lyophilized.

[0998] 181. The antibody of any one of 177-180, wherein the antibody is in a pharmaceutical composition comprising at least one excipient and/or carrier.

[0999] 182. Milk and/or a derivative thereof produced by the ruminant of any one of 91-176.

[1000] 183. The milk and/or a derivative thereof of 182, wherein the milk and/or derivatives thereof comprises an antibody that binds at least one methanogen.

[1001] 184. The milk and/or a derivative thereof of 182 or 183, wherein the milk and/or derivatives thereof is pasteurized and/or homogenized.

[1002] 185. The milk and/or a derivative thereof of any one of 182-184, wherein the milk and/or derivatives thereof is lyophilized or evaporated to form dry milk powder (e.g., boiling at low pressure at low temperature).

[1003] 186. The milk and/or a derivative thereof of any one of 182-185, further comprising at least one agent that reduces methane production in a ruminant, optionally wherein the at least one agent is selected from the agents in Table 8B.

[1004] 187. An animal feed comprising:
[1005] (a) the antibody of any one of 182-181;
[1006] (b) at least one agent that reduces methane production in a ruminant, optionally wherein the at least one agent is selected from the agents in Table 8B;
[1007] © the milk of any one of 182-186; or
[1008] (d) any combination of two or more of (a)-(c).

[1009] 188. The animal feed of 187, wherein the animal feed is liquid (e.g., drinking water, milk) or solid (e.g., fodder).

[1010] 189. The animal feed of 187 or 188, wherein the animal feed comprises fat and/or fatty acid, optionally wherein the animal feed comprises fat and/or fatty acid that is at least about 1%, 2%, 3%, 4%, 5%, or 6% of the diet.

[1011] 190. A method of reducing methane production in a ruminant, the method comprising orally administering to and/or feeding the ruminant the antibody of any one of 177-181, the milk and/or a derivative thereof of any one of 182-186, the animal feed of any one of 187-189, or any combination of two or more thereof.

[1012] 191. The method of 190, further comprising administering at least one agent that reduces methane production in a ruminant, optionally wherein the at least one agent is selected from the agents in Table 8B.

[1013] 192. The method of 190 or 191, further comprising administering the ruminant with at least one vaccine of any one of 1-65 or at least one pharmaceutical composition of any one of 66-90.

[1014] 193. The method of any one of 91-176 and 190-192, wherein the ruminant is selected from a cow, a bull, a bison, a yak, a buffalo, an antelope, a goat, a sheep, a deer, a giraffe, a caribou, a gazelle, a macropod, a llama, a camel, and an alpaca.

[1015] 194. The method of any one of 91-176 and 190-193, wherein the ruminant is an adult ruminant.

[1016] 195. The method of any one of 91-176 and 190-193, wherein the ruminant is a young ruminant (e.g., before weaning or below 2 years of age).

[1017] 196. The method of any one of 91-176 and 190-193, wherein the ruminant is a pregnant female ruminant.

[1018] 197. The method of any one of 91-176 and 190-193, wherein the ruminant is an offspring (e.g., calf) of the vaccinated female ruminant that received the milk comprising an antibody that binds at least one methanogen.

[1019] 198. The method of any one of 91-176 and 190-197, wherein the vaccine is administered to a ruminant as a part of a pre-existing vaccination program to which the ruminant is subject (e.g., Table 8A).

[1020] 199. The method of any one of 91-176 and 190-198, wherein the vaccine is administered to a ruminant when the ruminant is subject to or receives at least one other vaccine, wherein the at least one other vaccine is against against infectious bovine rhinotracheitis (IBR), bovine virus diarrhea (BVD), parainfluenza-3 (PI3), bovine respiratory syncytial virus (BRSV), clostridia, E. Coli mastitis, leptospirosis, mannheimia hemolytica, brucella, vibriosis, campylobacter, trichomonas, trichomoniasis, rotavirus, coronavirus, and/or respiratory disease.

[1021] 200. The method of any one of 91-176 and 190-197, wherein the vaccine is administered to a ruminant when the ruminant changes in hands and/or a changes in environment.

[1022] 201a. The method of any one of 91-176 and 190-200, wherein the vaccine or the immune response it elicits is exposed to a methanogen in a lower bowel of the ruminant.

[1023] 201b. The method of any one of 91-176 and 190-200, wherein the vaccine reduces methane production in the lower intestinal track (lower bowel) of the ruminant, optionally wherein the method results in at least about 1%, 2%, 3%, 4%, 5%, 6%, 7%, 8%, 9%, 10%, 11%, 12%, 13%, 14%, 15%, 16%, 17%, 18%, 19%, or 20% reduction in the level of methane produced by the ruminant, optionally wherein the reduction in the level of methane is compared to an untreated ruminant. In some embodiments, the ruminant methane emissions are measured using a respiratory chamber.

[1024] 201c. A method of reducing the activity, number, and/or type of methanogens in the lower intestinal track of a ruminant, the method comprising administering to the ruminant the vaccine of any one of 1-65, or the pharmaceutical composition of any one of 66-90.
[1025] 201d. A method of reducing the amount of methane produced by a ruminant in the lower intestinal track, the method comprising administering to the ruminant the vaccine of any one of 1-65, or the pharmaceutical composition of any one of 66-93.
[1026] 201e. A method of inducing an immune response against at least one methanogen in the lower intestinal track of a ruminant, the method comprising administering to the ruminant the vaccine of any one of 1-62, or the pharmaceutical composition of any one of 66-90.

### EXAMPLES

### Example 1: DNA Vaccine Preparation

### Construction of Expression Vectors

[1027] Plasmid constructs comprising the coding regions encoding at least one cell surface protein or a fragment (e.g., extracellular domain) thereof of at least one methanogen (e.g., those listed in Table 2A, Table 2B, Table 3, Table 19, Table 20, or Table 21) are isolated from methanogen RNA by RT PCR, or prepared by direct synthesis since the sequence is known, by standard methods and are inserted into a vector via standard restriction sites, by standard methods. In this example, the DNA encoding an extracellular domain of an mtr polypeptide is cloned.

[1028] The codon-optimized coding regions are generated using the method described herein or the methods known in the art. The coding regions or codon optimized coding regions are constructed using standard PCR methods, or are ordered commercially. The coding regions or codon-optimized coding regions are inserted into the vector via standard restriction sites, by standard methods.

[1029] Plasmids constructed as above are propagated in Escherichia coli and purified by the alkaline lysis method (Sambrook, J., et al, Molecular Cloning: A Laboratory Manual, Cold Spring Harbor Laboratory Press, Cold Spring Harbor, NY, ed. 2 (1989)). CsCl-banded DNA are ethanol precipitated and resuspended in 0.9% saline to a final concentration of 2 mg/ml for injection. Alternately, plasmids are purified using any of a variety of commercial kits, or by other known procedures involving differential precipitation and/or chromatographic purification.

[1030] Expression is tested by formulating each of the plasmids in DMRIE/DOPE and transfecting ruminant cell lines, e.g., Bos Taurus cell lines CPAE (endothelial cell), EBTr (NBL-4) (trachea cell), FB2.K (kidney cell), LB9.Bm (lymph node cell), BT (nasal cell), FBHE (heart endothelial cell), CPA47 (pulmonary artery endothelial cell), BCE C/D-1b (eye endothelial cell), BL3.1 (B lymphocyte), EJG (adrenal gland endothelial cell), BL-3 (B lymphocyte), MDBK (NBL-1) (kidney cell), LB9.D (LB9.Sk) (skin cell), SBAC (fibroblast), and BEND (endometrium cell line), all of which are available commercially from ATCC.org. Appropriate culture media and conditions for the above-described host cells are known in the art.

[1031] The supernatants are collected and the protein production tested by Western blot or ELISA. The relative expression of the wild type and codon optimized constructs are compared.

[1032] A single plasmid may comprise a nucleic acid encoding a single cell surface protein or a fragment thereof.

[1033] Alternatively, more than two proteins or fragments may be placed in a single plasmid as a polycistronic construct. For example, a polycistronic construct, where two or more polypeptides or fragments are transcribed as a single transcript (under a single promoter) in cells may be constructed by separating the various coding regions with IRES sequences (Jang et al. J. Virol. 62: 2636-43 (1988); Jang et al. Enzyme 44:292-309(1990)).

[1034] Still alternatively, fragments of a single cell surface protein can be placed in multiple plasmids, which can then be co-formulated.

[1035] Alternatively, two or more coding regions may be inserted into a single plasmid, each with their own promoter sequence (i.e., not a polycistron).

### Preparation of Vaccine Formulations

[1036] Plasmid constructs comprising codon-optimized and non-codon-optimized coding regions encoding at least one cell surface protein of a methanogen or a fragment thereof are formulated with Montanide ISA61 with or without addition of immunomodulatory monophosphoryl lipid A (MPL). Montanide ISA61 (Seppic, France) was used at a ratio of 6.0/4.0 w/w adjuvant/DNA. MPL (Sigma-Aldrich, USA) was used at a concentration of 0.2 mg per dose.

### Example 2. RNA Vaccine Preparation

[1037] The methods of preparing RNA vaccine are well known in the art. In some cases, the methods described in WO2012/135805 (incorporated herein by reference) is used.

### DNA Construct

[1038] A DNA construct comprising the gene encoding an mtr or a fragment thereof is constructed using the standard methods. The open reading frame (ORF) encoding the extracellular domain of mtr may be flanked by a 5′ untranslated region (UTR) which may contain a strong Kozak translational initiation signal and/or an alpha-globin 3′ UTR which may include an oligo(dT) sequence for templated addition of a poly-A tail. The mRNAs may be modified to reduce the cellular innate immune response. The modifications to reduce the cellular response may include pseudoundine (W) and 5-methyl-cytidine (5meC or m⁵C). (see, Kariko K et al. Immunity 23: 165-75 (2005), Kariko K et al. Mol Ther 16: 1833-40 (2008), Anderson B R et al. NAR (2010); herein incorporated by reference).

[1039] The ORF may also include various upstream or downstream additions (such as, but not limited to, β-globin, tags, etc.) may be ordered from a service such as, but limited to, DNA2.0 (Menlo Park, CA) and may contain multiple cloning sites which may have Xbal recognition. Upon receipt of the construct, it may be reconstituted and transformed into chemically competent E. coli. In this example, NEB DH5-alpha Competent E. coli are used. Transformations are performed according to NEB instructions using 100 ng of plasmid. The protocol includes co-incubation of the DNA construct with the E. Coli, followed by heat shock at 42° C. for 30 seconds. Mix in SOC media, shake, then plate the transformed E. Coli. Incubate at 37° C.

[1040] To isolate the plasmid (up to 850 μg), a maxi prep is performed using the Invitrogen PURELIN™ HiPure Maxiprep Kit (Carlsbad, CA), following the manufacturer's instructions.

IVT mRNA Preparation

[1041] In order to generate cDNA for In Vitro Transcription (IVT), the plasmid is first linearized using a restriction enzyme such as Xbal. A typical restriction digest with Xbal will comprise the following: Plasmid 1.0 μg; 10× Buffer 1.0 μl Xbal 1.5 μl; water up to 10 μl; incubated at 37° C. for 1 hr. If performing at lab scale (<5 μg), the reaction is cleaned up using Invitrogen's PURELINK™ PCR Micro Kit (Carlsbad, CA) per manufacturer's instructions. Larger scale purifications may need to be done with a product that has a larger load capacity such as Invitrogen's standard PURELINK™ PCR Kit (Carlsbad, CA). Following the cleanup, the linearized vector is quantified using the NanoDrop and analyzed to confirm linearization using agarose gel electrophoresis.

[1042] The in vitro transcription reaction generates mRNA containing modified nucleotides or modified RNA. The input nucleotide triphosphate (NTP) mix is made in-house using natural and un-natural NTPs.

[1043] A typical in vitro transcription reaction includes the following:
[1044] 1. Template cDNA 1.0 μg
[1045] 2. 10× transcription buffer (400 mM Tris-HCl pH 8.0, 190 mM MgCl₂, 50 mM DTT, 10 mM Spermidine) 2.0 μl
[1046] 3. Custom NTPs (25 mM each) 7.2 μl
[1047] 4. RNase Inhibitor 20 U
[1048] 5. T7 RNA polymerase 3000 U
[1049] 6. dH₂O Up to 20.0 μl and
[1050] 7. Incubation at 37° C. for 3 hr-5 hrs.

[1051] The crude IVT mix may be stored at 4° C. overnight for cleanup the next day. 1 u of RNase-free DNase is then used to digest the original template. After 15 minutes of incubation at 37° C., the mRNA is purified using Ambion's MEGACLEAR™ Kit (Austin, TX) following the manufacturer's instructions. This kit can purify up to 500 μg of RNA. Following the cleanup, the RNA is quantified using the NanoDrop and analyzed by agarose gel electrophoresis to confirm the RNA is the proper size and that no degradation of the RNA has occurred.

Enzymatic Capping of mRNA

[1052] Capping of the mRNA is performed as follows where the mixture includes: IVT RNA 60 g-180 g and dH₂O up to 72 μl. The mixture is incubated at 65° C. for 5 minutes to denature RNA, and then is transferred immediately to ice.

[1053] The protocol then involves the mixing of 10× Capping Buffer (0.5 M Tris-HCl (pH 8.0), 60 mM Cl, 12.5 mM MgCl₂) (10.0 μl); 20 mM GTP (5.0 l); 20 mM S-Adenosyl Methionine (2.5 μl); RNase Inhibitor (100 U); 2′-O-Methyltransferase (400U); Vaccinia capping enzyme (Guanylyl transferase) (40 U); dH₂O (Up to 28 μl); and incubation at 37° C. for 30 minutes for 60 g RNA or up to 2 hours for 180 μg of RNA.

[1054] The mRNA is then purified using Ambion's MEGACLEAR™ Kit (Austin, TX) following the manufacturer's instructions. Following the cleanup, the RNA is quantified using the NANODROP™ (ThermoFisher, Waltham, MA) and analyzed by agarose gel electrophoresis to confirm the RNA is the proper size and that no degradation of the RNA has occurred. The RNA product may also be sequenced by running a reverse-transcription-PCR to generate the cDNA for sequencing.

[1055] 5′-capping of modified RNA may be completed concomitantly during the in vitro-transcription reaction using the following chemical RNA cap analogs to generate the 5′-guanosine cap structure according to manufacturer protocols: 3′-O-Me-m7G(5′)ppp(5′) G [the ARCA cap];G(5′)ppp(5′)A; G(5′)ppp(5′)G; m7G(5′)ppp(5′)A; m7G(5′)ppp(5′)G (New England BioLabs, Ipswich, MA). 5′-capping of modified RNA may be completed post-transcriptionally using a Vaccinia Virus Capping Enzyme to generate the “Cap 0” structure: m7G(5′)ppp(5′)G (New England BioLabs, Ipswich, MA). Cap 1 structure may be generated using both Vaccinia Virus Capping Enzyme and a 2′-0 methyl-transferase to generate: m7G(5′)ppp(5′)G-2′-O-methyl. Cap 2 structure may be generated from the Cap 1 structure followed by the 2′-O-methylation of the 5′-antepenultimate nucleotide using a 2′-0 methyl-transferase. Cap 3 structure may be generated from the Cap 2 structure followed by the 2′-O-methylation of the 5′-preantepenultimate nucleotide using a 2′-0 methyl-transferase. Enzymes are preferably derived from a recombinant source.

[1056] Cap structure can be analyzed for capping reaction efficiency by LC-MS after capped mRNA nuclease treatment. Nuclease treatment of capped mRNAs would yield a mixture of free nucleotides and the capped 5′-5-triphosphate cap structure detectable by LC-MS. The amount of capped product on the LC-MS spectra can be expressed as a percent of total mRNA from the reaction and would correspond to capping reaction efficiency. The cap structure with a higher capping reaction efficiency would have a higher amount of capped product by LC-MS.

### PolyA Tailing Reaction

[1057] Without a poly-T in the cDNA, a poly-A tailing reaction must be performed before cleaning the final product. This is done by mixing Capped IVT RNA (100 al); RNase Inhibitor (20 U); 10× Tailing Buffer (0.5 M Tris-HCl (pH 8.0), 2.5 M NaCl, 100 mM MgCl₂)(12.0 al); 20 mM, ATP (6.0 al); Poly-A Polymerase (20 U); dH₂O up to 123.5 μl and incubation at 37° C. for 30 min. If the poly-A tail is already in the transcript, then the tailing reaction may be skipped and proceed directly to cleanup with Ambion's MEGACLEAR™ kit (Austin, TX) (up to 500 μg). Poly-A Polymerase is preferably a recombinant enzyme expressed in yeast.

[1058] For studies performed and described herein, the poly-A tail is encoded in the IVT template to comprise 160 nucleotides in length. However, it should be understood that the processivity or integrity of the Poly-A tailing reaction may not always result in exactly 160 nucleotides. Hence Poly-A tails of approximately 160 nucleotides, e.g, about 150-165, 155, 156, 157, 158, 159, 160, 161, 162, 163, 164 or 165 are within the scope of the invention.

### Protein Expression Assay

[1059] IVT mRNAs encoding an mtr or a fragment thereof containing the ARCA (3′ 0-Me-m7G(5′)ppp(5′)G) cap analog or the CapI structure can be transfected into any one of ruminant cell lines, e.g., Bos Taurus cell lines CPAE (endothelial cell), EBTr (NBL-4) (trachea cell), FB2.K (kidney cell), LB9.Bm (lymph node cell), BT (nasal cell), FBHE (heart endothelial cell), CPA47 (pulmonary artery endothelial cell), BCE C/D-1b (eye endothelial cell), BL3.1 (B lymphocyte), EJG (adrenal gland endothelial cell), BL-3 (B lymphocyte), MDBK (NBL-1) (kidney cell), LB9.D (LB9.Sk) (skin cell), SBAC (fibroblast), and BEND (endometrium cell line), all of which are available commercially from ATCC.org. Appropriate culture media and conditions for the above-described host cells are known in the art.

[1060] 6, 12, 24 and 36 hours post-transfection, the amount of mtr polypeptide expressed can be assayed by ELISA or Western blot. IVT mRNAs that expresses higher levels of mtr would correspond to the IVT mRNA with a higher translationally-competent Cap structure.

[1061] When transfected into mammalian cells, the modified mRNAs have a stability of between 12-18 hours or more than 18 hours, e.g., 24, 36, 48, 60, 72 or greater than 72 hours.

Formulation of IVT mRNA Using Lipidoids

[1062] IVT mRNA is formulated for in vitro experiments by mixing the IVT mRNA with the lipidoid at a set ratio prior to addition to cells. In vivo formulation may require the addition of extra ingredients to facilitate circulation throughout the body. To test the ability of these lipidoids to form particles suitable for in vivo work, a standard formulation process used for siRNA-lipidoid formulations is used as a starting point. Initial IVT mRNA-lipidoid formulations may consist of particles composed of 42% lipidoid, 48% cholesterol and 10% PEG, with further optimization of ratios possible. After formation of the particle, IVT mRNA is added and allowed to integrate with the complex. The encapsulation efficiency is determined using a standard dye exclusion assays.

Formulation of IVT mRNA Nanoparticles

[1063] Solutions of synthesized lipid, 1,2-distearoyl-3-phosphatidylcholine (DSPC) (Avanti Polar Lipids, Alabaster, AL), cholesterol (Sigma-Aldrich, Taufkirchen, Germany), and PEG-c-DOMG (NOF, Bouwelven, Belgium) are prepared at concentrations of 50 mM in ethanol and stored at −20° C. The lipids are combined to yield molar ratio of 50:10:38.5: 1.5 (Lipid: DSPC: Cholesterol: PEG-c-DOMG) and diluted with ethanol to a final lipid concentration of 25 mM. Solutions of modified mRNA at a concentration of 1-2 mg/mL in water are diluted in 50 mM sodium citrate buffer at a pH of 3 to form a stock modified mRNA solution. Formulations of the lipid and modified mRNA are prepared by combining the synthesized lipid solution with the modified mRNA solution at total lipid to IVT mRNA weight ratio of 10:1, 15:1, 20:1 and 30:1. The lipid ethanolic solution is rapidly injected into aqueous modified mRNA solution to afford a suspension containing 33% ethanol. The solutions are injected either manually (MI) or by the aid of a syringe pump (SP) (Harvard Pump 33 Dual Syringe Pump Harvard Apparatus Holliston, MA).

[1064] To remove the ethanol and to achieve the buffer exchange, the formulations are dialyzed twice against phosphate buffered saline (PBS), pH 7.4 at volumes 200-times of the primary product using a Slide-A-Lyzer cassettes (Thermo Fisher Scientific Inc. Rockford, IL) with a molecular weight cutoff (MWCO) of 10 kD. The first dialysis was carried at room temperature for 3 hours and then the formulations were dialyzed overnight at 4° C. The resulting nanoparticle suspension was filtered through 0.2 μm sterile filter (Sarstedt, Numbrecht, Germany) into glass vials and sealed with a crimp closure.

### Characterization of Formulations

[1065] A Zetasizer Nano ZS (Malvern Instruments Ltd, Malvern, Worcestershire, UK) is used to determine the particle size, the polydispersity index (PDI) and the zeta potential of the RNA nanoparticles in 1×PBS in determining particle size and 15 mM PBS in determining zeta potential.

[1066] Ultraviolet-visible spectroscopy is used to determine the concentration of modified mRNA nanoparticle formulation. 100 μl of the diluted formulation in 1×PBS is added to 900 μl of a 4: 1 (v/v) mixture of methanol and chloroform. After mixing, the absorbance spectrum of the solution is recorded between 230 nm and 330 nm on a DU 800 spectrophotometer (Beckman Coulter, Beckman Coulter, Inc., Brea, CA). The RNA concentration in the nanoparicle formulation is calculated based on the extinction coefficient of the RNA used in the formulation and on the difference between the absorbance at a wavelength of 260 nm and the baseline value at a wavelength of 330 nm.

[1067] QUANT-IT™ RIBOGREEN® RNA assay (Invitrogen Corporation Carlsbad, CA) is used to evaluate the encapsulation of RNA by the nanoparticle. The samples are diluted to a concentration of approximately 5 μg/mL in TE buffer (10 mM Tris-HCl, 1 mM EDTA, pH 7.5). 50 uL of the diluted samples are transferred to a polystyrene 96 well plate, then either 50 μl of TE buffer or 50 ul of a 2% Triton X-100 solution is added. The plate is incubated at a temperature of 37° C. for 15 minutes. The RIBOGREEN® reagent is diluted 1: 100 in TE buffer, 100 ul of this solution is added to each well. The fluorescence intensity is measured using a fluorescence plate reader (Wallac Victor 1420 Multilablel Counter; Perkin Elmer, Waltham, MA) at an excitation wavelength of −480 nm and an emission wavelength of −520 nm. The fluorescence values of the reagent blank are subtracted from that of each of the samples and the percentage of free modified RNA is determined by dividing the fluorescence intensity of the intact sample (without addition of Triton X-100) by the fluorescence value of the disrupted sample (caused by the addition of Triton X-100).

### In Vitro Incubation—Testing the RNA Vaccine In Vitro

[1068] Cells of the cow cell lines (described above) are seeded on 96-well plates (Greiner Bio-one GmbH, Frickenhausen, Germany) at a density of 35,000 cells per well in 100 μl cell culture medium. Formulations containing the RNA nanoparticles are added in quadruplicates directly after seeding the cells and incubated. Cells were trypsinized with Trypsin/EDTA (Biochrom AG, Berlin, Germany). Samples are then analyzed by ELISA or Western blot for expression of the mtr polypeptide encoded by the IVT mRNA encapsulated in the lipid nanoparticles. This tests whether the lipid nanoparticle formulation is effective in delivering the IVT mRNA to the cells.

### Example 3: Ruminant Immunization

[1069] Eighteen 5-month-old male Holestein-Friesian calves are used. All animals are grazed on pasture with water ad libitum.

[1070] Eighteen calves were allocated randomly into 3 groups. The nucleic acid vaccine (DNA or RNA) with an adjuvant Montanide ISA61 (n=6) is administered subcutaneously in the anterior region of the neck. A second group receives the nucleic acid vaccine without adjuvant (n=6) administered in a similar manner. A control group (n=6) is not vaccinated. Animals are re-vaccinated at 3 weeks after the first vaccination with the same vaccine. Blood samples are collected by jugular venepuncture, with serum separated and stored at −20-C. Saliva samples are collected using a cotton swab placed in mouth. The swab is then placed in a salivette saliva collection tube (Sarstedt, Germany), centrifuged at 2000×g for 10 min and the flow-through material harvested is stored at −20-C. Rumen content samples are collected using a stomach tube, centrifuged at 10,000×g for 15 min and the supernatants (rumen fluid) used for measurement of antibody. Blood, saliva and rumen content samples are collected at weeks 0, 3, 6, and 8. Week 0 samples (n=18) are used to determine level of total bovine Ig in serum, saliva and rumen fluid samples.

### Example 4: Measurement of Antibodies Using ELISA

### Total Bovine IgA and IgG ELISA

[1071] ELISA plates (Maxisorp, Nunc™, Thermo Fisher Scien-tific, Denmark) are coated overnight at 4° C. with sheep anti-bovine IgA (AbD-serotec, UK) for total IgA or sheep anti-bovine IgG (AbD-serotec, UK) for total IgG at a protein concentration of 1 ug/mL in PBS. The plates are washed three times with PBS containing 0.05% w/v Tween-20 (PBST) and then blocked for 2 h at room temperature with 150 uL/well of normal sheep serum in PBS (0.1% w/v for IgA and 1% w/v for IgG). 100 uL/well of saliva (dilution range 1:102-1:105), serum (dilution range 1:103-1:107), rumen fluid (dilution range 1:10-1:103) or 2-fold serial dilutions of standards in PBS are added to wells induplicate and plates are incubated for 2 h at room temperature. The plates are washed three times in PBST and incubated for 1 h at room temperature with 100 uL/well of either horseradish peroxidase (HRP)-conjugated sheep anti-bovine IgA (AbD-serotec, UK) diluted 1:10,000 or HRP-conjugated sheep anti-bovine IgG (AbD-serotec, UK) diluted 1:30,000 in blocking buffer for IgA and IgG determination, respectively. The plates are washed three times in PBST and incubated for 10 min at room temperature in the dark with 100 uL/well of tetramethyl benzidine (TMB) substrate (BD OptEIA™, BD Biosciences, USA). The reactions are stopped by addition of 50 uL/well of 0.05M H₂SO₄ and read at 450 nm. A linear standard curve is fitted to the 2-fold serial dilution of the standards (100 ng/mL to 1.56 ng/mL) and used for the calculation of antibody concentration (ug/mL). Bovine IgA standard is obtained from purification of cattle saliva using anion-exchange chromatography followed by size exclusion gel filtration whereas bovine IgG standard was obtained commercially(Bethyl Laboratories, USA).

### Antigen-Specific IgA and IgG ELISA

[1072] ELISA assays are developed to monitor a mtr-specific IgA and mtr-specific IgG responses in serum, saliva and rumen content. ELISA plates are coated overnight with 50 uL/well of mtr (4 ug/mL) in PBS at 4° C. The plates are washed three times in PBST and then blocked for 1 h at room temperature with 150 uL/well of 1% casein in PBS. Then, 100 uL/well of saliva (dilution range 1:10-1:104), serum (dilution range 1:10-1:105), rumen fluid (dilution range 1:2-1:20) or 2-fold serial dilutions of the positive serum control in PBS are added to duplicate wells and plates incubated for 2 h at room temperature. The plates are washed three times in PBST and incubated for 1 h at room temperature with 100 uL/well of either HRP-conjugated sheep anti-bovine IgA (AbD-serotec, UK) or HRP-conjugated sheep anti-bovine IgG (AbD-serotec, UK) diluted 1:5000 in blocking buffer for mtr-IgA and mtr-IgG determination, respectively. The plates are washed three times in PBST and incubated for 10 min at room temperature in the dark with 100 uL/well of TMB substrate. The reactions are stopped by addition of 50 uL/well of 0.05 M H₂SO₄ and read at 450 nm. Mtr specific IgA and IgG levels of the unknown samples are assigned a unit value based on a positive control (serum obtained from the animal with the highest antibody responses at week 8). A linear curve is fitted to the 2-fold serial dilution of the positive serum control (1:100 to 1:6400 for mtr-IgA and 1:100,000 to 1:6,400,000 for mtr-IgG) and then used for the calculation of antibody concentration (Units/mL) on every ELISA plate. Based on the curves, the mtr-specific IgA concentration in the positive serum control (1:100 dilution) is assigned a value of 6400 Units/mL, while the mtr-specific IgG concentration in the positive serum (1:100,000 dilu-tion) is assigned a value of 6,400,000 Units/mL. For saliva and rumen fluid samples, mtr-specific IgA and mtr-specific IgG are standardised by total IgA or total IgG to control for animal variation in saliva flow rates and rumen content compositions. Data are presented as units mtr-specific IgA/mg of total IgA or mtr-specific IgG/mg of total IgG.

### Example 5: Measurement of Methane Produced by Cows

[1073] The LMD hand-held open path laser measuring device is used. The NDIR, a sniffer method that measures CH4 concentration (ppm) in breath or exhaled air, is also used.

[1074] The records are measured in 29 Holstein and Brown Swiss dairy cows. Cows are 18.5% of the 1st parity, 52% of the 2nd parity, 18.5% of the 3rd parity and 11% of the 4th parity. Average days in milk at the beginning of the experiment is 102±88 d. Cows were offered a partial mixed ration consisting of corn silage, grass silage and straw ad libitum, and a mean of 5 kg of concentrate supplied in the automated milking systems (AMS).

[1075] Breath CH4 concentration is measured on six different days during four months. Measurements are performed after morning unified distribution between 10:00 and 14:00. Animals are restrained and CH4 is measured simultaneously with the two devices during a 5 min sampling period, obtaining a total of 164 paired measurements.

[1076] An operator pointed the LMD at a cow's nostril at a fixed distance of 1 m and trying to maintain the angle from which the LMD is pointed to the cow. Data are recorded every 0.5 s in a tablet. Another operator simultaneously places NDIR sampling tube on the cow's nostrils in order to measure CH4 concentration in exhaled air with the NDIR and data are recorded every is in a datalogger.

### Example 6: Comparison of Intramuscular (IM) and Subcutaneous (SQ) Vaccination Protocol and Antigen Presentation Strategies

[1077] This example demonstrates total and specific immune response to ovalbumin (OVA) using both subcutaneous (SQ) and intramuscular (IM) vaccination. Bovine nucleic acid vaccination protocols (SQ and IM) were assessed in vivo in the dairy cows through the quantification of the adaptive immune response following inoculation with ovalbumin (OVA). Immune response was assessed by quantifying total IgG and OVA-specific IgG over a 28-day period after vaccination. Both SQ and IM vaccination provided a robust immune response, with IM vaccination providing a higher total immune response than SQ vaccination.

[1078] Further, the example demonstrates total and specific immune response to various OVA expression strategies. As shown in FIG. 7A, three OVA constructs (Table 13) were generated: ARK015 (top) comprises a 5′ UTR, a start codon, a sequence encoding the OVA antigen, a 3′ UTR, and a poly A tail; ARK014 (middle) comprises a 5′ UTR, a start codon, a signal peptide (SP), a sequence encoding the OVA antigen, a 3′ UTR, and a poly A tail; ARK011 (bottom) comprises a 5′ UTR, a start codon, a signal peptide (SP), a sequence encoding the OVA antigen, a transmembrane (TM) domain, a 3′ UTR, and a poly A tail. The three OVA constructs result in three different expressions of the OVA protein in the cell and display of the OVA protein to the immune system as shown in FIG. 7B. Specifically, ARK015 results in cytosolic expression (701) of the OVA protein. Without being bound by theory, the OVA protein is then processed and displayed on the cell surface via the major histocompatibility complex. ARK014 is expressed and secreted (702) from the cell for display to the immune system. A portion of the protein may also be processed and displayed on the cell surface via the major histocompatibility complex. ARK011 is expressed and anchored on the cell surface via the transmembrane domain (703) for display to the immune system. A portion of the protein may also be processed and displayed on the cell surface via the major histocompatibility complex. All three expression strategies resulted in a total and specific immune response in dairy cows.

mRNA Synthesis and LNP Preparation

[1079] N1-pseudouridine-modified mRNA for the three ova constructs were synthesized at TriLink with a 5′ UTR sequence of 5′ AGGAAATAAGAGAGAAAAGAAGAGTAAGAAGAAATATAAGAGCCACC 3′(SEQ ID NO: 16965), a 3′ UTR sequence of 5′ GCTGCCTTCTGCGGGGCTTGCCTTCTGGCCATGCCCTTCTTCTCTCCCTTGCACCTGT ACCTCTTGGTCTTTGAATAAAGCCTGAGTAGGAAG 3′ (SEQ ID NO: 16966), and a 120A poly A tail (SEQ ID NO: 16988). The mRNAs were purified into 1 mm sodium citrate buffer, pH 6.4 and shipped on dry ice. All mRNAs were stored at −80° C. until use.

[1080] To prepare lipid nanoparticles (LNPs), the mRNA stocks were thawed on ice. Nucleic acid concentrations were validated by absorbance at 260 nm using a NanoDrop. The mRNAs were then diluted to a final concentration of 0.35 mg/mL mRNA in Precision Nanosystem's dilution buffer. 10 mL of the dilute mRNAs were loaded into separate Luer lock syringes and all bubbles were removed by gentle tapping. A NanoAssemblr Ignite NxGen Cartridge was loaded into the cartridge slot of the Ignite instrument (FIG. 8A, 801) and one mRNA syringe was attached to the aqueous inlet of the cartridge. 3.3 mL of Genvoy-ILM reagent was loaded into a separate Luer lock syringes and all bubbles were removed by gentle tapping. The Genvoy-ILM syringe was then attached to the organic inlet of the cartridge. LNPs were then generated and collected into a 15 mL conical tube. The process was repeated for the remaining two mRNAs and for a buffer only LNP control (empty). Immediately after LNPs were generated, the samples were loaded into 10K dialysis cartridges, submerged into 1×DPBS (Ca²⁺ and Mg²⁺-free) to reduce the ethanol concentration to <0.5%. After dialysis the LNPs were recovered from the dialysis cartridges and sterile filtered at 0.2 um. Size and polydispersity (FIG. 8A, 802) were measured using a Malvern Panalytical DLS by diluting 40 uL of LNPs into 360 uL of 1×DPBS. Size (x-axis) and polydispersity (y-axis) of the resultant LNPs are shown in FIG. 8B and Table 14. The resulting LNPs had a mean particle size of ˜95 nm and a PDI of <0.18. Encapsulation efficiency was measured using a RiboGreen assay following Precision Nanosystems recommended protocol using a BioTek Synergy H1 Plate Reader. The resultant encapsulation efficiencies are shown in Table 14, with an average of ˜85%.

### Table 13. Nucleic Acid Sequences

[1081] See SEQ ID NO: 16673 to SEQ ID NO: 16675 for the nucleic acid sequence of ARK011, ARK014, and ARK015, respectively.

* When expressed as RNA the T may be replaced with U or pseudo Uridine.

TABLE 14
LNP size, PDI, and encapsulation efficiency measurements

| mRNA ID | Z-avg. (d · nm) | PDI | Encapsulation efficiency |
|---|---|---|---|
| ARK011 | 97.79 | 0.1665 | 83% |
| ARK014 | 94.06 | 0.140 | 87% |
| ARK015 | 96.66 | 0.1705 | 84% |
| Empty | 62.095 | 0.2145 | N/A |

### Vaccination and Sample Collection

[1082] Dairy cows were dried off for a period of eight days prior to vaccination. Each vaccine formulation was administered either by IM or SQ injection to three animals. In total, 15 animals were vaccinated with LNPs containing mRNA and 6 animals were vaccinated with empty LNPs. Intramuscular injections were delivered into the cow's right neck muscle by veterinary-trained staff using an 18-gauge 1-1.5″ needle. Subcutaneous injections were delivered into the cow's right shoulder by veterinary-trained staff using an 18-gauge 0.5-0.75″ needle. Total blood samples (˜20 mL) were collected by veterinary-trained staff. Samples were collected into 10 mL vacutainer tubes (2×10 mL) from the coccygeal vein (tail vein) by needle puncture. Harvested blood samples were then processed via ultracentrifugation for serum collection. Isolated serum samples were aliquoted, labeled and stored in cryogenic tubes at −20° C. until use.

### Sera IgG Measurements

[1083] Sera samples were thawed on ice and total IgG was quantified using Triple J Farms' Ig Radial Immunodiffusion (RID) kits (Cat No. 728411) following the manufacturers recommended protocol. Sera IgG measurements are shown in Table 15. While, there was substantial biological variability between animals, each mRNA vaccinated animal demonstrated a maintained immune response over the 28-day test period while the empty vaccinated animals demonstrated a reduction in total sera IgG. In particular, when the treated groups were normalized against the empty groups, the ARK011 construct demonstrated a robust and prolonged immune response across all 3 animals (FIG. 9). The ARK014 and ARK015 constructs demonstrated a detectable immune response in at least one of the treated animals.

TABLE 15
Sera IgG measurements

| | | Ani- | | | | | |
|---|---|---|---|---|---|---|---|
| | | mal | | | | | |
| | Treat- | repli- | Dose | Serum IgG Concentration (mg/dL) | | | |
| Construct | ment | cate | [ug] | Day 0 | Day 14 | Day 21 | Day 28 |
| ARK011 | IM | 1 | 353 | 5,261 | 4,902 | 4,994 | 3,702 |
| ARK011 | IM | 2 | 353 | 5,203 | 5,664 | 6,017 | 4,145 |
| ARK011 | IM | 3 | 353 | 6,150 | 6,716 | 5,823 | 3,794 |
| ARK011 | SQ | 1 | 353 | 4,964 | 6,139 | 7,379 | 3,730 |
| ARK011 | SQ | 2 | 353 | 4,956 | 4,815 | 5,722 | 4,877 |
| ARK011 | SQ | 3 | 353 | 5,599 | 4,777 | 4,034 | 4,344 |
| ARK014 | IM | 1 | 348 | 3,031 | 3,349 | 2,773 | 2,691 |
| ARK014 | IM | 2 | 348 | 3,011 | 4,027 | 3,231 | 2,861 |
| ARK014 | IM | 3 | 348 | 3,804 | 6,213 | 6,100 | 3,326 |
| ARK015 | IM | 1 | 468 | 3,658 | 3,692 | 4,070 | 3,272 |
| ARK015 | IM | 2 | 468 | 4,086 | 5,735 | 2,488 | 4,153 |
| ARK015 | IM | 3 | 468 | 3,167 | 3,947 | 3,797 | 2,723 |
| ARK015 | SQ | 1 | 468 | 4,875 | 5,972 | 5,722 | 4,015 |
| ARK015 | SQ | 2 | 468 | 3,680 | 3,257 | 3,149 | 3,009 |
| ARK015 | SQ | 3 | 468 | 2,964 | 3,894 | 3,981 | 2,221 |
| empty | IM | 1 | — | 5,186 | 5,204 | 5,226 | 3,509 |
| empty | IM | 2 | — | 3,167 | 4,494 | 4,514 | 2,422 |
| empty | IM | 3 | — | 2,670 | 3,459 | 3,280 | 2,507 |
| empty | SQ | 1 | — | 7,813 | 4,834 | 7,246 | 5,065 |
| empty | SQ | 2 | — | 2,670 | 3,273 | 3,745 | 3,009 |
| empty | SQ | 3 | — | 5,286 | 8,496 | 8,165 | 4,577 |

### VA-Specific Ig Measurements

[1084] Sera samples were thawed on ice and total IgG was quantified using NovateinBio's Bovine OVA sIgG Antibody ELISA Kit (Cat No. BG-BVN11731) following the manufacturer's recommended protocol. Ova-specific IgG measurements are shown in Table 16. Each of the animals vaccinated with a construct show a demonstrable OVA-specific IgG response over the 28-day test period. Interestingly, intramuscular injection of ARK015 LNPs demonstrated ˜4-fold increased OVA-specific IgG response as compared to subcutaneous injection (FIG. 10).

TABLE 16
OVA-specific IgG measurements

| | | Animal | Absorbance (OD₄₅₀) | | | |
|---|---|---|---|---|---|---|
| Construct | Treatment | replicate | Day 0 | Day 14 | Day 21 | Day 28 |
| ARK011 | IM | 1 | 0.327 | 0.64 | 0.757 | 0.626 |
| ARK011 | IM | 2 | 0.591 | 0.616 | 0.513 | 0.603 |
| ARK011 | IM | 3 | 1.937 | 1.817 | 2.024 | 1.663 |
| ARK011 | SQ | 1 | 0.756 | 1.085 | 1.063 | 0.704 |
| ARK011 | SQ | 2 | 1.004 | 1.16 | 1.036 | 0.916 |
| ARK011 | SQ | 3 | 0.952 | 0.955 | 0.7 | 0.68 |
| ARK014 | IM | 1 | 0.475 | 0.615 | 0.571 | 0.483 |
| ARK014 | IM | 2 | 0.837 | 0.88 | 0.833 | 0.986 |
| ARK014 | IM | 3 | 2.199 | 1.838 | 1.381 | 2.025 |
| ARK015 | IM | 1 | 0.842 | 1.653 | 1.23 | 1.097 |
| ARK015 | IM | 2 | 0.938 | 1.048 | 1.261 | 0.999 |
| ARK015 | IM | 3 | 0.308 | 0.513 | 0.443 | 0.465 |
| ARK015 | SQ | 1 | 1.394 | 1.287 | 1.504 | 1.368 |
| ARK015 | SQ | 2 | 1.327 | 1.175 | 1.277 | 1.066 |
| ARK015 | SQ | 3 | 3.178 | 2.478 | 1.985 | 1.691 |
| empty | IM | 1 | 1.427 | 1.19 | 1.058 | 0.939 |
| empty | IM | 2 | 1.217 | 1.301 | 1.18 | 1.176 |
| empty | IM | 3 | 0.512 | 0.566 | 0.571 | 0.476 |
| empty | SQ | 1 | 1.128 | 1.093 | 0.918 | 0.848 |
| empty | SQ | 2 | 0.735 | 0.786 | 0.729 | 0.769 |
| empty | SQ | 3 | 1.172 | 1.119 | 1.147 | 1.085 |

[1085] This example demonstrates total and OVA-specific immune response in dairy cattle following vaccination with various mRNA LNP vaccines. Further, this example demonstrates that expression strategy and immune presentation may affect both total and OVA-specific immune response.

### Example 7: Metagenomic Analysis of Ruminal Microbiome

[1086] This example demonstrates the that two methanogen strains, Methanobrevibacter ruminantium and Methanobrevibacter gottschalkii, comprise ˜65% of the methanogen load in the ruminal microbiome, and, thus, are high value targets for vaccine development. Ruminal 16S sequencing datasets were used to analyze the microbial community composition of rumen samples from 394 cattle across 26 countries (Henderson (2015) Scientific Reports). The average relative abundance value of each archaeal species was pulled from the dataset and corrected for 16S gene copy number (GCN). Methanogen genomes can contain multiple copies of the 16S rRNA gene, so correcting for the GCN enables the capture of a more accurate picture of archaeal community structure. The 16S GCN values for each taxon was determined using the rrnDB, which is a database that documents rRNA operon copy number variation in Bacteria and Archaea. All taxa within the dataset were represented in the rrnDB2. The resulting abundance analysis is shown in FIG. 11. Specifically, FIG. 11 shows the relative abundance of the archaeal species that composed >1% of the 16S GCN-corrected data. The methanogenic taxa Methanobrevibacter, Methanosphaera, and Methanomethylophiceae compose the vast majority of the archaeal community. Methanobrevibacter gottschalkii and Methanobrevibacter ruminantium are the dominant species, composing ˜65% of the ruminal microbiome across all 394 cattle when combined. In addition, the study found that within the rumen microbial community, the archaeal community in general is stable across host species, diet, and geographic region, as bacterial taxa are the main drivers of most observed variation. This knowledge builds confidence that the mRNA constructs from the two dominant methanogen species will be relevant on a global scale.

### Example 8: Immunization of Cattle with Nucleic Acid Vaccines Encoding Methanogen Cell Surface Proteins

[1087] This example demonstrates reduction in methane production by methanogens when treated with sera samples from animals vaccinated with nucleic acid vaccines encoding methanogen cell surface proteins. Beef cattle were vaccinated with mRNA vaccines comprising a sequence as shown in Table 17C formulated as LNPs or an empty LNP control. Immune response was assessed by quantifying total IgG over a 35-day period after vaccination and reduction in methane production was quantified after sera addition to methanogen monocultures.

mRNA Synthesis and LNP Preparation

[1088] N1-pseudouridine-modified mRNA for the constructs shown in Tables 17A-C were synthesized at TriLink with a 5′ UTR sequence of 5′ AGGAAATAAGAGAGAAAAGAAGAGTAAGAAGAAATATAAGAGCCACC 3′ (SEQ ID NO: 16967), a 3′ UTR sequence of 5′ GCTGCCTTCTGCGGGGCTTGCCTTCTGGCCATGCCCTTCTTCTCTCCCTTGCACCTGT ACCTCTTGGTCTTTGAATAAAGCCTGAGTAGGAAG 3′ (SEQ ID NO: 16968), and a 120A poly A tail (SEQ ID NO: 16988). The mRNAs were purified into 1 mM sodium citrate buffer, pH 6.4 and shipped on dry ice. All mRNAs were stored at −80° C. until use.

[1089] To prepare lipid nanoparticles (LNPs), the mRNA stocks were thawed on ice. Nucleic acid concentrations were validated by absorbance at 260 nm using a NanoDrop. The mRNAs were then diluted to a final concentration of 0.35 mg/mL mRNA in Precision Nanosystem's dilution buffer. 10 mL of the dilute mRNAs were loaded into separate Luer lock syringes and all bubbles were removed by gentle tapping. A NanoAssemblr Ignite NxGen Cartridge was loaded into the cartridge slot of the Ignite instrument and one mRNA syringe was attached to the aqueous inlet of the cartridge. 3.3 mL of Genvoy-ILM reagent was loaded into a separate Luer lock syringes and all bubbles were removed by gentle tapping. The Genvoy-LM syringe was then attached to the organic inlet of the cartridge. LNPs were then generated and collected into a 15 mL conical tube. The process was repeated for the remaining mRNAs and for a buffer only LNP control (empty). Immediately after LNPs were generated, the samples were loaded into 10K dialysis cartridges, submerged into 1×DPBS (Ca²⁺ and Mg²⁺-free) to reduce the ethanol concentration to <0.5%. After dialysis the LNPs were recovered from the dialysis cartridges and sterile filtered at 0.2 um. Size and polydispersity (FIG. 12 and FIG. 13) were measured using a Malvern Panalytical DLS by diluting 40 uL of LNPs into 360 uL of 1×DPBS. Size (x-axis) and polydispersity (y-axis) of the resultant LNPs are shown in FIGS. 12-13 and Table 18. The resulting LNPs had a mean particle size of ˜90 nm and a PDI of <0.2. Encapsulation efficiency was measured using a RiboGreen assay following Precision Nanosystems recommended protocol using a BioTek Synergy Hi Plate Reader. The resultant encapsulation efficiencies are shown in Table 18, with an average of ˜60%.

TABLE 17A
Genes and Bos taurus codon-optimized sequence of the genes

| | | Bos taurus optimized |
|---|---|---|
| Name | Species | sequence (SEQ ID NO) |
| WP_004031278.1 | Methanobacterium | SEQ ID NO: 16969 |
| | formicicum | |
| WP_012956721.1 | Methanobrevibacter | SEQ ID NO: 16970 |
| | ruminantium | |
| WP_019264904.1 | Methanobrevibacter | SEQ ID NO: 16971 |
| | smithii | |
| WP_016359091.1 | Methanobrevibacter | SEQ ID NO: 16972 |
| | sp. AbM4 | |
| WP_011033493.1 | Methanosarcina | SEQ ID NO: 16973 |
| | mazei | |
| mru0143 | Methanobrevibacter | SEQ ID NO: 16974 |
| | ruminantium | |
| mru0842 | Methanobrevibacter | SEQ ID NO: 16975 |
| | ruminantium | |
| mru2048 | Methanobrevibacter | SEQ ID NO: 16976 |
| | ruminantium | |
| mru1222 | Methanobrevibacter | SEQ ID NO: 16977 |
| | ruminantium | |
| mru2047 | Methanobrevibacter | SEQ ID NO: 16978 |
| | ruminantium | |
| Ova | Gallus gallus | SEQ ID NO: 16979 |
| Signal | | SEQ ID NO: 16980 |
| peptide | | |
| TM/C | | SEQ ID NO: 16981 |
| domains | | |

TABLE 17B
Constructs

| Name | Note |
|---|---|
| Ark_001 | SP + WP_004031278.1 + TM/C |
| Ark_002 | SP + WP_012956721.1 + TM/C |
| Ark_003 | SP + WP_019264904.1 + TM/C |
| Ark_004 | SP + WP_016359091.1 + TM/C |
| Ark_005 | SP + WP_011033493.1 + TM/C |
| Ark_006 | SP + mru0143 + TM/C |
| Ark_007 | SP + mru0842 + TM/C |
| Ark_008 | SP + mru2048 + TM/C |
| Ark_009 | SP + mru1222 + TM/C |
| Ark_010 | SP + mru2047 + TM/C |
| Ark_011 | SP + Ova + TM/C |
| Ark_012 | SP + WP_012956721.1 + STOP |
| Ark_013 | SP + mru0143 + STOP |
| Ark_014 | SP + OVA + STOP |
| Ark 015 | OVA + STOP |

*SP: signal peptide; OVA: ovalbumin; TM/C: transmembrane domain and cytoplasmic domain

TABLE 17C
Nucleic acid sequences

See SEQ ID NO: 16676 to SEQ ID NO: 16688 for the nucleic
acid sequence of ARK001-ARK010, ARK012, ARK013, and
ARK015, respectively.
* When expressed as RNA the T may be replaced with U or pseudo Uridine.

TABLE 18
LNP size, PDI, and encapsulation efficiency measurements

| mRNA ID | Z-avg. (d · nm) | PDI | Encapsulation efficiency |
|---|---|---|---|
| ARK001 | 78.82 | 0.086 | 51% |
| ARK002 | 78.82 | 0.108 | 51% |
| ARK003 | 78.82 | 0.118 | 40% |
| ARK004 | 78.82 | 0.108 | 51% |
| ARK005 | 78.82 | 0.064 | 56% |
| ARK006 | 91.28 | 0.141 | 73% |
| ARK007 | 78.82 | 0.137 | 57% |
| ARK008 | 78.82 | 0.166 | 66% |
| ARK009 | 68.06 | 0.160 | 59% |
| ARK010 | 78.82 | 0.183 | 51% |
| ARK012 | 78.82 | 0.100 | 49% |
| ARK013 | 78.82 | 0.1841 | 60% |
| ARK015 | 68.06 | 0.130 | 62% |
| Empty | 68.06 | 0.228 | N/A |

### Denaturing Agarose Gel Electrophoresis of LNPs

[1090] After LNP formulation, LNPs were broken and the recovered mRNA was analyzed by denaturing agarose gel electrophoresis. Briefly, 10 uL of LNPs were combined with 2×RNA loading dye (Thermofisher) and heated at 70° C. for 10 minutes. The denatured mRNAs were then loaded onto a 1% agarose gel and run at 120 V constant for 45 minutes in 1×TAE buffer. The gel was stained with SybrSafe and then imaged on a BioRad GelDoc. The resulting image demonstrating the integrity and correct size of the mRNA after LNP formulation is shown in FIG. 14.

### Vaccination and Sample Collection

[1091] Healthy, weaned, Angus cross steers were utilized for this study. All calves were weaned for a minimum of sixty days and received pre-weaned vaccinations a minimum of sixty days prior to initiation of the study. Animals were transferred to the study site fourteen days prior to vaccination to allow for acclimation to the study diet and environment. Each vaccine formulation was administered by IM injection to three animals. In total, 39 animals were vaccinated with LNPs containing ˜250 ug mRNA and 3 animals were vaccinated with empty LNPs. Intramuscular injections were delivered into the cow's right neck muscle by veterinary-trained staff using an 18-gauge 1-1.5″ needle. Animals were boosted with a second vaccine administration on day 21. Total blood samples (˜100 mL) were collected from the jugular vein by veterinary-trained staff and processed by ultracentrifugation within 24 hours of sample collection. Isolated serum samples were aliquoted, labeled and stored in cryogenic tubes at −20° C. until use.

[1092] Using the isolated serum samples, ELISA assays were performed to detect total IgG (FIG. 42A) and total IgA (FIG. 42B) levels in the cows' serums.

Methane Production Measurements for Methanogen Monocultures Treated with Sera

[1093] 200 uL of serum from vaccinated animals were added to sterile anaerobic culture tubes. Open plasma containing tubes were placed into an anaerobic chamber containing 95% nitrogen and 5% hydrogen and allowed to stand 1 hr at ambient temperature. A single seeded culture of methanogen (M. gottschalkii or M. ruminantium) was prepared in BY medium at a volume sufficient to distribute 2.5 mL to each plasma sample and control tube. 2.5 mL of methanogen culture was added to each tube containing the serum, a septa was inserted and crimped into place. Sealed tubes were removed from the anaerobic chamber and each was pressurized with 25 PSI 80% H₂, 20% CO₂ gas via a hypodermic needle through the septum. Tubes were placed into a 38° C. shaking incubator and periodically removed for methane measurements. Methane measurements in the tube headspace were made with a handheld remote methane detector using a jig to hold the instrument and tube during measurement.

[1094] Methane measurements for select sera are shown in FIG. 16 and FIG. 17.

[1095] FIG. 16 shows species selective reduction in methane production when treated with vaccinated sera. Briefly, animals were vaccinated with ARK007, a nucleic acid vaccine encoding a protein present in M. ruminantium but not M. gottschalkii. Methane production (y-axis) over time (x-axis) is plotted in FIG. 16A for a culture of Methanobrevibacter ruminantium combined with a serum sample collected at day 14 after vaccination with ARK007 (light gray, triangles) compared to the same animal pre-vaccination (dark gray, circles). Methane production rate is reduced by 3× in the sample treated with the day 14 serum. Methane reaches maximal production at −300 hrs in the sample treated with the day 14 serum as compared to −100 hrs when treated with pre-vaccination serum. FIG. 16B shows methane production over time for a culture of Methanobrevibacter gottschalkii treated with the same sera samples. There is no notable reduction in methane production for M. gottschalkii when treated with either the day 14 or pre-vaccination sera. This demonstrates the ability to generate highly specific and selective antibodies by vaccination with nucleic acids encoding methanogen cell surface proteins.

[1096] FIG. 17 shows a comparison of the effect of serum from animals vaccinated with ARK007 compared to a common small molecule inhibitor or methanogenesis. FIG. 17A shows increased reduction in methane production by monocultures of Methanobrevibacter ruminantium when treated with sera collected pre-vaccination, after a first injection on day 0, and after a boost injection on day 21. Methane production rate is reduced ˜2× when treated with serum collected after a single vaccination (day 21) and ˜20× when treated with serum collected after a boost vaccination (day 35). FIG. 17B shows reduction is methane production rate when treated with a small molecule inhibitor of methanogenesis (lauric acid) at 3 different concentrations. This demonstrates that the vaccinated sera samples are preforming with similar efficacy to known small molecule inhibitors of methanogenesis.

[1097] This example demonstrates the ability to significantly reduce methane production by vaccination with nucleic acid vaccine encoding methanogen cell surface proteins. Vaccination resulted sera antibodies that when combined with methanogens in monoculture result in ˜3-20× reduction in methane production rate in vitro.

### Example 9: Informatic Analysis of Antigen Targets and Vaccination

[1098] This example demonstrates informatic selection of 40 methanogen cell surface proteins, generation of nucleic acid vaccines encoding those cell surface proteins, and subsequent methods for analyzing the efficacy of those antigens as nucleic acid vaccines for the reduction of methane production. An exemplary methodology for testing selected constructs is shown in FIG. 20.

### Cell Surface Protein Selection

[1099] The cell surface protein selection pipeline used to curate 40 proteins for vaccine production is illustrated in FIG. 18. Briefly, Methanobrevibacter ruminantium and Methanobrevibacter gottschalkii were identified as the two most prevalent ruminal methanogens in the abundance analysis (Example 7). Each open reading frame (ORF) from their published genomes were curated first database comprising ˜4500 ORFS. Subcellular localization for each ORF was predicted using pSORTdb (Lau (2020) Nucleic Acids Research) and the predicted localization was appended to the first database. The 741 predicted non-intracellular proteins were then ranked based on published gene expression changes in response to lauric acid stress (Zhou (2018) BMC Research Notes) resulting in a second database comprising 45 proteins. The DNA sequences of the proteins were collected from NCBI and were used to search a subset of rumen transcriptomic studies in the Sequence Read Archive (SRA). Proteins were given additional emphasis for inclusion in the final set of candidates based on if there was evidence that either the exact nucleotide sequence or a highly similar sequence was found in transcriptomic data. From examination of the combination of all of these datasets, as well as information based on the predicted functions of the proteins (adhesin or metal binding for example), a final list of sequences was output for additional studies comprising 40 sequences. The protein IDs were used to download the protein sequences from NCBI. As an additional step prior to ordering constructs, the proteins were analyzed using a signal peptide predictor and signal peptides were removed from the final designs. In addition, some of the proteins were too long for synthesis of the template for mRNA production. In this case, the proteins were examined and truncated versions of the protein were chosen based on predicted domain boundaries. Sequences underwent codon optimization using the Bos taurus codon usage table and uridine depletion in order to be used for mRNA production. This final list of sequences (Table 19, ARK016-055) encompasses a list of proteins from two methanogens commonly found in the rumen of cattle. As these proteins are predicted to be outside of the cells and there is evidence indicating they are expressed, they serve as a set of promising leads to be used in future vaccine studies to reduce methane production within the rumen.

### Table 19. Selected Methanogen Cell-Surface Proteins

[1100] See SEQ ID NO: 16689 to SEQ ID NO: 16728 for the native nucleic acid sequences of selected methanogen cell-surface proteins (ARK016-ARK055, respectively). See SEQ ID NO: 16729 to SEQ ID NO: 16768 for the Bos Taurus codon-optimized and uridine-depleted nucleic acid sequences of selected methanogen cell-surface proteins (ARK016-ARK055, respectively). See SEQ ID NO: 16769 to SEQ ID NO: 16808 for the amino acid sequences of selected methanogen cell-surface proteins (ARK016-ARK055, respectively).

mRNA Synthesis and LNP Preparation

[1101] N1-pseudouridine-modified mRNA for the constructs shown in Table 19 are synthesized at TriLink with a 5′ UTR sequence of 5′ AGGAAATAAGAGAGAAAAGAAGAGTAAGAAGAAATATAAGAGCCACC 3′ (SEQ ID NO: 16982), a 3′ UTR sequence of 5′ GCTGCCTTCTGCGGGGCTTGCCTTCTGGCCATGCCCTTCTTCTCTCCCTTGCACCTGT ACCTCTTGGTCTTTGAATAAAGCCTGAGTAGGAAG 3′ (SEQ ID NO: 16983), and a 120A poly A tail (SEQ ID NO: 16988). The constructs were ordered with a signal peptide (5′ ATGTTCGTGTTCCTCGTGCTCCTGCCCCTCGTCTCCAGCCAGTGCGTG 3′ (SEQ ID NO: 16984)) and/or transmembrane domain (5′ CCCTGGTACATCTGGCTGGGCTTCATCGCAGGACTGATCGCCATCGTCATGGTCACC ATAATGCTCTGTTGCATGACCTCCTGCTGTAGCTGCCTGAAAGGCTGTTGCAGCTGC GGGAGCTGCTGCAAATTCGACGAAGACGATAGCGAACCTGTGCTCAAAGGGGTGAA GTTGCATTACACATAGTGA (SEQ ID NO: 16985)). The mRNAs are purified into 1 mM sodium citrate buffer, pH 6.4 and shipped on dry ice. All mRNAs are stored at −80° C. until use.

[1102] To prepare lipid nanoparticles (LNPs), the mRNA stocks are thawed on ice. Nucleic acid concentrations are validated by absorbance at 260 nm using a NanoDrop. The mRNAs are then diluted to a final concentration of 0.35 mg/mL mRNA in Precision Nanosystem's dilution buffer. 10 mL of the dilute mRNAs are loaded into separate Luer lock syringes and all bubbles are removed by gentle tapping. A NanoAssemblr Ignite NxGen Cartridge is loaded into the cartridge slot of the Ignite instrument and one mRNA syringe is attached to the aqueous inlet of the cartridge. 3.3 mL of Genvoy-ILM reagent is loaded into a separate Luer lock syringes and all bubbles are removed by gentle tapping. The Genvoy-ILM syringe is then attached to the organic inlet of the cartridge. LNPs are then generated and collected into a 15 mL conical tube. The process is repeated for the remaining mRNAs and for a buffer only LNP control (empty). Immediately after LNPs are generated, the samples are loaded into 10K dialysis cartridges, submerged into 1×DPBS (Ca²⁺ and Mg²⁺-free) to reduce the ethanol concentration to <0.5%. After dialysis the LNPs are recovered from the dialysis cartridges and sterile filtered at 0.2 um. Size and polydispersity are measured using a Malvern Panalytical DLS by diluting 40 uL of LNPs into 360 uL of 1×DPBS. Encapsulation efficiency is measured using a RiboGreen assay following Precision Nanosystems recommended protocol using a BioTek Synergy H1 Plate Reader.

### Vaccination and Sample Collection

[1103] Healthy, weaned, Angus cross steers are weaned for a minimum of sixty days and received pre-weaned vaccinations a minimum of sixty days prior to initiation of the study. Animals are transferred to the study site fourteen days prior to vaccination to allow for acclimation to the study diet and environment. Each vaccine formulation is administered by IM injection to three animals. In total, 120 animals are vaccinated with LNPs containing ˜500 ug mRNA and 3 animals are vaccinated with empty LNPs. Intramuscular injections are delivered into the cow's right neck muscle by veterinary-trained staff using an 18-gauge 1-1.5″ needle. Animals are boosted with a second vaccine administration on day 21. Total blood samples (˜100 mL) are collected from the jugular vein by veterinary-trained staff and processed by ultracentrifugation within 24 hours of sample collection. Isolated serum samples are aliquoted, labeled and stored in cryogenic tubes at −20° C. until use.

### Ruminal Microbiome Measurements

[1104] ˜50 mL of fresh rumen samples are collected by esophageal tubing and retained in conical vials. Samples are strained through three layers of cheesecloth, with the liquid phase aliquoted into 50 mL conical vials. All samples re snap-frozen in liquid N2 and stored at −20° C. for subsequent processing. Samples are processed within twenty-four hours of collection. Sample aliquots are labeled with animal number, collection method, collection date and time.

[1105] Isolation of DNA from the rumen follows the methods defined in Henderson (Henderson, G. et al. Effect of DNA Extraction Methods and Sampling Techniques on the Apparent Structure of Cow and Sheep Rumen Microbial Communities. PLOS One 8, e74787 (2013), which is incorporated herein by reference), with preference given to methods involving both phenol-chloroform and mechanical lysis steps (PCQI, PCBB, PCSA). PCR amplification of the hypervariable V6-V8 regions of the 16S rRNA gene is performed using the archaea-specific Ar915aF/Ar1386R primer set with Illumina adapters as defined in Table 1 of Kittelmann 2015 (Kittelmann et al. Buccal swabbing as a noninvasive method to determine bacterial, archaeal, and eukaryotic microbial community structures in the rumen. Appl Environ Microbiol 81:7470-7483 (2015), which is incorporated herein by reference). and PCR cycle conditions as defined in Kittelmann 2013(Kittelmann et al. Simultaneous Amplicon Sequencing to Explore CoOccurrence Patterns of Bacterial, Archaeal and Eukaryotic Microorganisms in Rumen Microbial Communities. PLOS One 8(2): e47879 (2013), which is incorporated herein by reference). PCR products are stored at the appropriate conditions until subsequent use. The PCR products are then purified, quality checked, prepared into sequencing libraries, and analyzed for 16S rRNA sequencing within three weeks of the final rumen sample collection (Day 90). Libraries are generated using the PerkinElmer NextFlex DNA-Seq kit. The 16S rRNA amplicon libraries are sequenced on the Illumina MiSeq v3 600-cycle (2×300 bp) platform. Following the completion of 16S rRNA sequencing, the resulting data is analyzed for methanogen abundance. Methanogen abundance is reduced by ˜10-80% after treatment with nucleic acid vaccines encoding methanogen cell surface proteins as compared to pre-vaccination.

### Methane Production Measurements

[1106] Cow enteric methane production is monitored using GreenFeed Systems (C-Lock, Inc., Rapid City, SD). Briefly, feed intake is recorded daily throughout the study period using GrowSafe Systems. Animals are fed once daily in the morning and have access to a water source at all times. Body weight is recorded periodically, at the time of total blood draws. Enteric methane, hydrogen, and carbon dioxide emissions are measured daily throughout the study period using GreenFeed Systems (C-Lock, Inc., Rapid City, SD). Animals have free access to the GreenFeed System throughout the study period; animals are coerced to use the system. Methane yield and intensity is calculated using dry matter intake for each measurement period separately. Methane production is reduced by ˜10-80% when treated with nucleic acid vaccines encoding methanogen cell surface proteins as compared to pre-vaccination.

[1107] This example demonstrates informatic selection of methanogen cell surface proteins for formulation into nucleic acid vaccines, vaccination into ruminants, and subsequent reductions in methane in vivo.

### Example 10: Ruminal Metagenomic Mining of Methanogen Cell Surface Proteins

[1108] This example demonstrates informatic selection of candidate methanogen cell surface proteins, generation of nucleic acid vaccines encoding those cell surface proteins, and subsequent methods for analyzing the efficacy of those antigens as nucleic acid vaccines for the reduction of methane production. An exemplary methodology for testing selected constructs is shown in FIG. 20.

[1109] To identify candidate methanogen cell surface proteins, a comparative genomics analysis of ruminal methanogen genomes from rumen samples from 283 beef cattle was used (Stewart (2019) Nature Biotechnology, which is incorporated herein by reference). In total, the analysis comprised 4941 genomes were assembled, of which 126 were archaea and 111 were Methanobrevibacter. Genes were annotated in the 4941 genomes using DIAMOND, resulting in first database comprising 9,712,545 total open reading frames. Methanogen genes were identified by narrowing the total 4941 genomes to those that were archaeal genomes comprising one or more methanogenesis metabolic pathway genes. From those, a second database comprising 235,935 methanogen open reading frames was generated. UniRef100 gene's Gene Onotology terms were obtained and GO term enrichment analysis was performed on each of the ORFs in the second database. The p-values for the enrichment analysis were used as input to a machine learning classification model to classify genomes as methanogen or non-methanogen. This resulted in a third database comprising 10,640 methanogen-specific genes. GO terms most specific to methanogens were used to select candidate genes for localization prediction. pSORTb and TMbed was used to predict subcellular localization and selected whole genes and domains predicted to be accessible to antibodies (e.g., localized to the cell membrane or extracellularly). Based on the subcellular localization, 225 whole proteins and ˜7500 peptide fragments were selected for vaccine production. The bioinformatic selection is shown in FIG. 21A (left). FIG. 21A (right) further shows a network map of the enriched cell surface protein functions, with key methanogen enriched cell surface proteins having functions related to adhesin-like proteins, metal binding, ATP processing, proteolysis, and transport. Many of the adhesin-like proteins comprise cysteine protease domains that are important for cell health, survival, and membrane remodeling.

### Table 20. Select Non-Methanobrevibacter Genes

[1110] See SEQ ID NO: 16809 to SEQ ID NO: 16832 for the native nucleic acid sequences of select non-methanobrevibacter genes. See SEQ ID NO: 16833 to SEQ ID NO: 16856 for the bovine codon-optimized nucleic acid sequences of select non-methanobrevibacter genes. See SEQ ID NO: 16857 to SEQ ID NO: 16880 for the amino acid sequences of select non-methanobrevibacter genes.

### Table 21. Select Protein Fragment Sequences

[1111] Table 21 presents the sequences for the fragments of the proteins in Table 20. These fragments are isolated functional domains based on predicted computation folding. For example, a hypothetical protein in FIG. 21B comprising 3 folded domains would yield 3 fragments, each of which is a stable domain on its own and can be used as an antigen for vaccine.

[1112] See SEQ ID NO: 16681 to SEQ ID NO: 16904 for the native nucleic acid sequences encoding the select protein fragments. See SEQ ID NO: 16905 to SEQ ID NO: 16928 for the bovine codon-optimized nucleic acid sequences encoding the select protein fragments. See SEQ ID NO: 16929 to SEQ ID NO: 16952 for the amino acid sequences of the select protein fragments.

mRNA Synthesis and LNP Preparation

[1113] N1-pseudouridine-modified mRNA for the constructs shown in Table 20 and Table 21 are synthesized at TriLink with a 5′ UTR sequence of 5′ AGGAAATAAGAGAGAAAAGAAGAGTAAGAAGAAATATAAGAGCCACC 3′ (SEQ ID NO: 16986), a 3′ UTR sequence of 5′ GCTGCCTTCTGCGGGGCTTGCCTTCTGGCCATGCCCTTCTTCTCTCCCTTGCACCTGT ACCTCTTGGTCTTTGAATAAAGCCTGAGTAGGAAG 3′ (SEQ ID NO: 16987), and a 120A poly A tail (SEQ ID NO: 16988). The constructs were ordered with a signal peptide (5′ ATGTTCGTGTTCCTCGTGCTCCTGCCCCTCGTCTCCAGCCAGTGCGTG 3′ (SEQ ID NO: 16989)) and/or transmembrane domain (5′ CCCTGGTACATCTGGCTGGGCTTCATCGCAGGACTGATCGCCATCGTCATGGTCACC ATAATGCTCTGTTGCATGACCTCCTGCTGTAGCTGCCTGAAAGGCTGTTGCAGCTGC GGGAGCTGCTGCAAATTCGACGAAGACGATAGCGAACCTGTGCTCAAAGGGGTGAA GTTGCATTACACATAGTGA (SEQ ID NO: 16990)). The mRNAs are purified into 1 mM sodium citrate buffer, pH 6.4 and shipped on dry ice. All mRNAs are stored at −80° C. until use.

[1114] To prepare lipid nanoparticles (LNPs), the mRNA stocks are thawed on ice. Nucleic acid concentrations are validated by absorbance at 260 nm using a NanoDrop. The mRNAs are then diluted to a final concentration of 0.35 mg/mL mRNA in Precision Nanosystem's dilution buffer. 10 mL of the dilute mRNAs are loaded into separate Luer lock syringes and all bubbles are removed by gentle tapping. A NanoAssemblr Ignite NxGen Cartridge is loaded into the cartridge slot of the Ignite instrument and one mRNA syringe is attached to the aqueous inlet of the cartridge. 3.3 mL of Genvoy-ILM reagent is loaded into a separate Luer lock syringes and all bubbles are removed by gentle tapping. The Genvoy-ILM syringe is then attached to the organic inlet of the cartridge. LNPs are then generated and collected into a 15 mL conical tube. The process is repeated for the remaining mRNAs and for a buffer only LNP control (empty). Immediately after LNPs are generated, the samples are loaded into 10K dialysis cartridges, submerged into 1×DPBS (Ca²⁺ and Mg²⁺-free) to reduce the ethanol concentration to <0.5%. After dialysis the LNPs are recovered from the dialysis cartridges and sterile filtered at 0.2 um. Size and polydispersity are measured using a Malvern Panalytical DLS by diluting 40 uL of LNPs into 360 uL of 1×DPBS. Encapsulation efficiency is measured using a RiboGreen assay following Precision Nanosystems recommended protocol using a BioTek Synergy H1 Plate Reader.

### Vaccination and Sample Collection

[1115] Healthy, weaned, Angus cross steers are weaned for a minimum of sixty days and received pre-weaned vaccinations a minimum of sixty days prior to initiation of the study. Animals are transferred to the study site fourteen days prior to vaccination to allow for acclimation to the study diet and environment. Each vaccine formulation is administered by IM injection to three animals. In total, 120 animals are vaccinated with LNPs containing ˜500 ug mRNA and 3 animals are vaccinated with empty LNPs. Intramuscular injections are delivered into the cow's right neck muscle by veterinary-trained staff using an 18-gauge 1-1.5″ needle. Animals are boosted with a second vaccine administration on day 21. Total blood samples (˜100 mL) are collected from the jugular vein by veterinary-trained staff and processed by ultracentrifugation within 24 hours of sample collection. Isolated serum samples are aliquoted, labeled and stored in cryogenic tubes at −20° C. until use.

### Ruminal Microbiome Measurements

[1116] ˜50 mL Of fresh rumen samples are collected by esophageal tubing and retained in conical vials. Samples are strained through three layers of cheesecloth, with the liquid phase aliquoted into 50 mL conical vials. All samples re snap-frozen in liquid N₂ and stored at −20° C. for subsequent processing. Samples are processed within twenty-four hours of collection. Sample aliquots are labeled with animal number, collection method, collection date and time.

[1117] Isolation of DNA from the rumen follows the methods defined in Henderson (Henderson, G. et al. Effect of DNA Extraction Methods and Sampling Techniques on the Apparent Structure of Cow and Sheep Rumen Microbial Communities. PLOS One 8, e74787 (2013), which is incorporated herein by reference), with preference given to methods involving both phenol-chloroform and mechanical lysis steps (PCQI, PCBB, PCSA). PCR amplification of the hypervariable V6-V8 regions of the 16S rRNA gene is performed using the archaea-specific Ar915aF/Ar1386R primer set with Illumina adapters as defined in Table 1 of Kittelmann 2015 (Kittelmann et al. Buccal swabbing as a noninvasive method to determine bacterial, archaeal, and eukaryotic microbial community structures in the rumen. Appl Environ Microbiol 81:7470-7483 (2015), which is incorporated herein by reference). and PCR cycle conditions as defined in Kittelmann 2013(Kittelmann et al. Simultaneous Amplicon Sequencing to Explore CoOccurrence Patterns of Bacterial, Archaeal and Eukaryotic Microorganisms in Rumen Microbial Communities. PLOS One 8(2): e47879 (2013), which is incorporated herein by reference). PCR products are stored at the appropriate conditions until subsequent use. The PCR products are then purified, quality checked, prepared into sequencing libraries, and analyzed for 16S rRNA sequencing within three weeks of the final rumen sample collection (Day 90). Libraries are generated using the PerkinElmer NextFlex DNA-Seq kit. The 16S rRNA amplicon libraries are sequenced on the Illumina MiSeq v3 600-cycle (2×300 bp) platform. Following the completion of 16S rRNA sequencing, the resulting data is analyzed for methanogen abundance. Methanogen abundance is reduced by ˜10-80% after treatment with nucleic acid vaccines encoding methanogen cell surface proteins as compared to pre-vaccination.

### Methane Production Measurements

[1118] Cow enteric methane production is monitored using GreenFeed Systems (C-Lock, Inc., Rapid City, SD). Briefly, feed intake is recorded daily throughout the study period using GrowSafe Systems. Animals are fed once daily in the morning and have access to a water source at all times. Body weight is recorded periodically, at the time of total blood draws. Enteric methane, hydrogen, and carbon dioxide emissions are measured daily throughout the study period using GreenFeed Systems (C-Lock, Inc., Rapid City, SD). Animals have free access to the GreenFeed System throughout the study period; animals are coerced to use the system. Methane yield and intensity is calculated using dry matter intake for each measurement period separately. Methane production is reduced by ˜10-80% when treated with nucleic acid vaccines encoding methanogen cell surface proteins as compared to pre-vaccination.

[1119] This example demonstrates informatic selection of methanogen cell surface proteins for formulation into nucleic acid vaccines, vaccination into ruminants, and subsequent reductions in methane in vivo.

### Example 11: Pregnant and Postpartum Animal Vaccination

[1120] FIG. 22 shows an exemplary vaccination protocol. At least one vaccine (e.g., a nucleic acid vaccine comprising a nucleic acid sequence encoding at least one methanogen surface antigen) is prepared. The at least one vaccine is used to vaccinate a pregnant animal (e.g., ruminant). The unborn fetus is exposed to the antibodies against methanogen generated by the mother. After birth, the child ruminant receives milk laden with the antibodies against the at least one methanogen surface antigen. The child ruminant is vaccinated with at least one vaccine of the present disclosure prior to weaning. The child ruminant may be vaccinated with a vaccine encoding the same or different methanogen surface antigen.

### Example 12: Combinatorial Therapies

[1121] FIG. 23 shows another exemplary vaccination protocol. At least one vaccine (e.g., a nucleic acid vaccine comprising a nucleic acid sequence encoding at least one methanogen surface antigen) is prepared. A ruminant is treated with a combinatory therapy, which comprises any two or more selected from a vaccine, antibodies, milk, animal feed, an agent (e.g., an agent that reduces methane production in a ruminant, a probiotic bacterial strain, a small molecule inhibitor, etc.), and other composition of the present disclosure (e.g., those reducing methane production in a ruminant). Here, a reduction in methane production that is greater than the use of a single therapy alone is achieved.

### Example 13: Synthesis of 3-NOP

[1122] Adapted from from “Structure-Based Design, Synthesis, and Biological Evaluation of Indomethacin Derivatives as Cyclooxygenase-2 Inhibiting Nitric Oxide Donors” (J. Med. Chem. 2007, 50, 6367-6382).

[1123] All reagents purchased from Sigma-Aldrich and Fisher Scientific and used as received.

[1124] 3-Bromopropanol (78.0 g, 0.56 mol) in acetonitrile (300 mL) was added dropwise within minutes to a solution of silver nitrate (145.9 g, 0.86 mol) in acetonitrile (600 mL) and stirred at room temperature for 24 hr. The solution was protected from light by being covered with aluminum foil. After 24 hr, 5:1 excess of brine was added to the reaction mixture and stirred for 1 hr. Silver halide was filtered through Celite and filtrate was extracted with diethyl ether (300 mL×3). The organic layer was washed with brine (300 mL×3). Dried over sodium sulfate, and concentrated (59 g, 86% yield). Product confirmed via NMR (>97% purity based on HPLC).

[1125] 3-NOP pH and Temperature Stability: Confirmed via HPLC over a 1-month time period at temperature between 4-30C and pH 4-10.

[1126] 3-NOP Volatility:500 mg of 3-NOP in a 5 dram vial was left open to air at ˜18-24C at 15-30% RH over the course of 6 days. Average mass loss is ˜0.25% per day.

[1127] Compaction Study

[1128] The viability of different binders for densification were examined. 0.5 g of powder was tableted under 20 kN in a 13 mm pellet die. Potential binders are summarized in Table 22.

TABLE 22
Potential binders ranked based on densification.

| | | | 2: compacts, |
|---|---|---|---|
| | | | no strength |
| 5: Unbreakable | | 3: powdery break, | 1: compacts, |
| tablet | 4: clean braking, | retains moderate | disintegrates |
| by hand | no dust | strength | 0: no compaction |
| Xanthan gum | Lignin | Pea protein | Chitosan |
| k-carrageenan | Inulin | Soy protein | Hydroxyethyl |
| | | | cellulose |
| Sodium alginate | Wood flour | Gelatin | Talc |
| Cellulose acetate | Corn Starch | Casein | Sodium starch |
| | | | glycolate |
| Ethyl cellulose | Amylopectin | | Pentaerythritol |
| Hydroxypropyl | Hemp protein | | Calcium phosphate |
| cellulose | | | |
| Cellulose acetate | | | Diatomaceous earth |
| phthalate | | | (Celite) |
| Maltodextrin | | | Biochar |
| Dextran | | | |

[1129] Tablets for Encapsulation of 3-NOP

[1130] A multilayer encapsulation system was employed for extended-release formulations consisting of 3 main parts:
[1131] 1) Adsorbent—inert, non-toxic, solid-support for 3-NOP (ie. silica, biochar, activated charcoal, talc, arginine, lysine, calcium carbonate, carbon black, cyclodextrin, calcium phosphate, celite (diatomaceous earth), glutamine, betaine, bismuth phosphate, bismuth citrate, iron phosphate, etc)
[1132] 2) Binder/matrix—allow for granulation of adsorbent to form solid core (ie, starches, flours, sugars, proteins, gums, gelatin, cellulose and derivatives, etc)
[1133] 3) Coating—single to multilayer coatings to decrease water penetration and modify release kinetics

[1134] All materials purchased from Sigma-Aldrich and Fisher Scientific and used as received unless otherwise specified.

[1135] Tablet Preparation

[1136] 3-NOP was adsorbed onto the corresponding adsorbent at a given weight percent (noted in formulations) by dropwise addition to adsorbent stirring on a hot plate. The mixture was left to stir for more than 30 minutes until a free-flowing powder was obtained. The resulting mixture was speed mixed with the corresponding binder for 1 minute followed by compaction of in a carver press using an 8-13 mm pellet die under various forces of 10-60 kN.

[1137] Coated Tablet Preparation

[1138] Selected coating materials were dissolved in various solvents at 5-20 wt %. Tablets were then dip coated multiple times allowing for drying in between to give the desired coating weight.

[1139] 3-NOP Release Quantification and Corresponding Tablet Formulations

[1140] 13 mm, 0.5 g tablets were placed in a sealed 5 dram vial with 10 mL of distilled water and incubated at 70 F until full dissolution of 3-NOP. 1 mL aliquots were taken every few days and refreshed with 1 mL of distilled water. Aliquots were filtered through a 0.22 um PVDF filter before being quantified via HPLC.

[1141] Uncoated Tablets

[1142] All formulation percentages are based on weight. 2 replicates of 13 mm disc-shaped, 0.5 g tablets were compacted under 20 kN. The uncoated formulations had the following compositions:
[1143] AH-01-7.5% 3-NOP, 12.5% propylene glycol, 60% Cargill hemp protein
[1144] AH-02-8.57% 3-NOP, 22.86% Celite, 68.57% hemp protein
[1145] AH-03-8.57% 3-NOP, 22.86% Wakefield Biochar, 68.57% Cargill hemp protein
[1146] AH-04-8.57% 3-NOP, 22.86% K10 montmorillonite, 68.57% Cargill hemp protein
[1147] AH-05-8.57% 3-NOP, 22.86% activated charcoal, 68.57% Cargill hemp protein

[1148] The 3-NOP release of the uncoated tablets after 12 hours is shown in Table 23.

| | Total Average | |
|---|---|---|
| | Concentration | Standard |
| | of 3-NOP | deviation |
| Formula | (mM) | (mM) |
| AH-01 | 24.56 | 2.09 |
| AH-02 | 24.50 | 1.76 |
| AH-03 | 19.61 | 0.17 |
| AH-04 | 33.10 | 0.10 |
| AH-05 | 18.58 | 0.07 |

[1149] Coated Tablets

[1150] Tablets for coating experiments consist of 10% 3-NOP, 20% Wakefield biochar, and 70% cellulose acetate (Mn: 50,000). Tablets were then coated with ˜0.2 wt % of the corresponding coating material, as shown in the table in Table 24. The release profile over periods of 4, 6 and 11 days for each formula is also shown.

TABLE 24
3-NOP release profile of coated tablets over 4 days.

| | | Total Average | Standard |
|---|---|---|---|
| | Time | Concentration | deviation |
| | (days) | (mM) | (mM) |
| Cellulose Acetate | 4 | 34.21 | 2.23 |
| Phthalate (CAP) | | | |
| CAP | 6 | 30.65 | 0.04 |
| CAP | 11 | 32.38 | 0.24 |
| Ethyl cellulose (EC) | 4 | 29.92 | 0.06 |
| EC | 6 | 31.07 | 0.01 |
| EC | 11 | 31.50 | 0.26 |
| Hydroxy propyl | 4 | 31.70 | 0.05 |
| cellulose (HPC) | | | |
| HPC | 6 | 30.35 | 0.01 |
| HPC | 11 | 32.53 | 0.4 |
| Polycaprolactone | 4 | 32.08 | 0.29 |
| (CAPA 6800) | | | |
| CAPA 6800 | 6 | 31.00 | 0.14 |
| CAPA 6800 | 11 | 31.99 | 0.23 |
| Alignate (layer 1) | 4 | 30.30 | 0.17 |
| Chitosan (layer 2) | | | |
| Alignate (layer 1) | 6 | 30.22 | 0.17 |
| Chitosan (layer 2) | | | |
| Alignate (layer 1) | 11 | 31.90 | 0.10 |
| Chitosan (layer 2) | | | |
| Polycaprolactone | 4 | 33.68 | 0.01 |
| Mn: 2000 | | | |
| Polycaprolactone | 6 | 32.25 | 0.18 |
| Mn: 2000 | | | |
| Polycaprolactone | 11 | 33.23 | 0.09 |
| Mn: 2000 | | | |
| PEG Mn: 1500 | 4 | 32.74 | 0.22 |
| PEG Mn: 1500 | 6 | 31.88 | 1.30 |
| PEG Mn: 1500 | 11 | 33.48 | 0.29 |

[1151] Further formulations were prepared and tested. 3 replicates of 13 mm disc-shaped, 0.5 g tablets were compacted under 60 kN. All formulas consist of 23.8% 3-NOP, 28.6% silica, and 47.6% ethyl cellulose. Tablets were then coated with 60-80 wt % of the corresponding coating material. Control tablet (CTRL) is uncoated. “R” denotes replicate number. CAP coating solution was 18 wt % in 70% ethanol/water. Cellulose acetate (CA) coating was 6 wt % in 70% ethanol/ethyl acetate with an additional 5 wt % triethyl citrate, 5 wt % propylene glycol, and 5 wt % N-methyl-2-pyrollidone. The release profiles were analyzed at 1, 4, 8, 11, and 15 days, as summarized in Table 25.

TABLE 25
3-NOP release profile of coated tablets over 15 days.
Total concentration of 3-NOP is listed in mM.

| | | | | | |
|---|---|---|---|---|---|
| CAP R1 | 25.74 | 47.79 | 59.39 | 61.05 | 59.68 |
| CAP R2 | 18.72 | 43.71 | 52.56 | 53.74 | 53.37 |
| CAP R3 | 23.12 | 50.66 | 57.23 | 59.23 | 58.75 |
| AVG | 22.53 | 47.39 | 56.39 | 58.01 | 57.26 |
| STD | 3.54 | 3.49 | 3.49 | 3.81 | 3.41 |
| CA R1 | 50.90 | 75.98 | 73.80 | 66.97 | 61.48 |
| CA R2 | 71.29 | 78.41 | 73.11 | 66.66 | 60.18 |
| CA R3 | 63.86 | 69.38 | 65.56 | 61.28 | 57.00 |
| AVG | 62.01 | 74.59 | 70.82 | 64.97 | 59.55 |
| STD | 10.32 | 4.67 | 4.57 | 3.20 | 2.31 |
| CTRL R1 | 45.80 | 80.64 | 80.33 | 73.64 | |
| CTRL R2 | 45.80 | 84.41 | 83.39 | 76.22 | 69.25 |
| CTRL R3 | 45.80 | 77.15 | 75.92 | 70.11 | 62.74 |
| AVG | 45.80 | 80.73 | 79.88 | 73.32 | 66.00 |
| STD | 0.00 | 3.63 | 3.76 | 3.07 | 4.60 |

[1152] Coated Tablets

[1153] All formulation percentages are based on weight. 3 replicates of 13 mm disc-shaped, 0.5 g tablets were compacted under 60 kN. All formulas consist of 23% 3-NOP, 30% silica, and 47% ethyl cellulose. Tablets were then coated with 60-80 wt % of the corresponding coating material. Control tablet (CTRL) is uncoated. V1 coating solution was 20 wt % cellulose acetate Mn: 50000 in 70% acetone/ethyl acetate with BYK coating additives. V2 coating solution was 20 wt % in 70% acetone/ethyl acetate cellulose acetate Mn: 50000 with BYK coating additives. Ethyl cellulose coating solution was 20 wt % in 70% ethanol/water with 15 wt % triacetin. CAP coating solution was 18 wt % in 70% ethanol/water with 10 wt % propylene glycol. The 3-NOP release profile of the coated tablets over 18 days is shown in Table 26.

TABLE 26
3-NOP release profile of coated tablets over 18 days.
Total concentration of 3-NOP is listed in mM.

| Time | 1 | 5 | 8 | 12 | 18 |
|---|---|---|---|---|---|
| V1 R1 | 33.04 | 70.32 | 70.57 | 66.04 | 60.88 |
| V1 R2 | 57.54 | 77.54 | 77.42 | 72.65 | 67.44 |
| V1 R3 | 61.42 | 71.21 | 70.08 | 65.71 | 61.19 |
| AVG | 50.67 | 73.02 | 72.69 | 68.13 | 63.17 |
| STD | 15.39 | 3.93 | 4.10 | 3.91 | 3.70 |
| V2 R1 | 31.15 | 66.47 | 65.62 | 61.03 | 56.78 |
| V2 R2 | 32.55 | 66.81 | 67.61 | 63.67 | 59.55 |
| V2 R3 | 53.59 | 69.37 | 71.28 | 67.53 | 63.01 |
| AVG | 39.10 | 67.55 | 68.17 | 64.08 | 59.78 |
| STD | 12.57 | 1.59 | 2.87 | 3.27 | 3.12 |
| EC R1 | 17.99 | 39.67 | 45.39 | 47.12 | 50.00 |
| EC R2 | 15.84 | 38.15 | 43.53 | 45.83 | 49.27 |
| EC R3 | 21.21 | 52.28 | 58.64 | 60.42 | 63.56 |
| AVG | 18.35 | 43.37 | 49.19 | 51.13 | 54.28 |
| STD | 2.70 | 7.75 | 8.24 | 8.08 | 8.05 |
| CAP R1 | 24.07 | 57.62 | 63.10 | 69.28 | 68.61 |
| CAP R2 | 23.24 | 56.30 | 61.85 | 60.67 | 59.42 |
| CAP R3 | 37.58 | 63.57 | 71.80 | 69.89 | 70.48 |
| AVG | 28.30 | 59.17 | 65.58 | 66.61 | 66.17 |
| STD | 8.05 | 3.87 | 5.42 | 5.15 | 5.92 |
| CTRL R1 | 61.62 | 97.29 | 89.52 | 81.26 | 74.20 |
| CTRL R2 | 45.40 | 82.69 | 79.42 | 73.16 | 67.07 |
| CTRL R3 | 53.75 | 83.30 | 76.77 | 70.18 | 64.12 |
| AVG | 53.59 | 87.76 | 81.90 | 74.87 | 68.47 |
| STD | 8.11 | 8.26 | 6.73 | 5.74 | 5.18 |

[1154] Bilayer Coated Tablets

[1155] All formulation percentages are based on weight. 3 replicates of 13 mm disc-shaped, 0.5 g tablets were compacted under 60 kN. All formulas consist of 15% 3-NOP, 20% silica, and 65% ethyl cellulose. Bilayer coatings were applied with ˜10 wt % of the first coating material and ˜20 wt % of the second coating material. CAP/EC denoted first and second coating material. The 3-NOP release profile of bilayer coated tablets over 27 days is shown in Table 27.

TABLE 27
3-NOP release profile of bilayer coated tablets over 27
days. Total concentration of 3-NOP is listed in mM.

| | Time (days) | | | | | | | | |
|---|---|---|---|---|---|---|---|---|---|
| | 1.25 | 2.5 | 5.5 | 8 | 10 | 14 | 17 | 21 | 27 |
| CAP/ | 6.27 | 8.80 | 15.97 | 18.49 | 20.41 | 24.15 | 24.59 | 24.46 | 26.21 |
| EC R1 | | | | | | | | | |
| CAP/ | 4.39 | 7.77 | 15.50 | 17.78 | 19.54 | 22.90 | 23.44 | 23.74 | 25.94 |
| EC R2 | | | | | | | | | |
| CAP/ | 5.63 | 8.43 | 15.44 | 17.84 | 19.29 | 20.36 | 20.94 | 21.18 | 22.65 |
| EC R3 | | | | | | | | | |
| AVG | 5.43 | 8.33 | 15.64 | 18.04 | 19.75 | 22.47 | 22.99 | 23.13 | 24.93 |
| STD | 0.96 | 0.52 | 0.29 | 0.39 | 0.59 | 1.93 | 1.87 | 1.73 | 1.98 |
| EC/ | 9.75 | 14.58 | 22.35 | 23.09 | 23.76 | 26.40 | 26.04 | 26.12 | 26.82 |
| CAP R1 | | | | | | | | | |
| EC/ | 10.72 | 17.13 | 24.89 | 26.10 | 26.78 | 29.51 | 28.89 | 28.52 | 29.31 |
| CAP R2 | | | | | | | | | |
| EC/ | 9.84 | 15.34 | 22.33 | 24.08 | 25.21 | 28.03 | 27.91 | 27.56 | 28.17 |
| CAP R3 | | | | | | | | | |
| AVG | 10.10 | 15.68 | 23.19 | 24.42 | 25.25 | 27.98 | 27.61 | 27.40 | 28.10 |
| STD | 0.54 | 1.31 | 1.47 | 1.54 | 1.51 | 1.56 | 1.45 | 1.21 | 1.25 |
| CTRL | 26.11 | 28.76 | 36.26 | 37.49 | 36.75 | 35.77 | 33.69 | 31.26 | 32.66 |
| R1 | | | | | | | | | |
| CTRL | 26.12 | 28.43 | 38.45 | 39.57 | 38.58 | 37.45 | 34.91 | 32.16 | 33.30 |
| R2 | | | | | | | | | |
| CTRL | 25.23 | 29.94 | 40.65 | 41.23 | 45.02 | 42.91 | 39.10 | 27.92 | −2.04 |
| R3 | | | | | | | | | |
| AVG | 25.82 | 29.05 | 38.45 | 39.43 | 40.12 | 38.71 | 35.90 | 30.45 | 21.31 |
| STD | 0.51 | 0.79 | 2.19 | 1.87 | 4.34 | 3.73 | 2.84 | 2.24 | 20.22 |

[1156] Adsorbent Study

[1157] Various adsorbents were assessed for potential binding affinity and adsorptive capacity of 3-NOP. Activated carbon/charcoal and silica were identified as the most suitable adsorbents based on their high binding affinity and adsorptive capacity.

[1158] Briefly, 0.2 g of adsorbent was added to 4 mL of 2.5% 3-NOP/H2O stock solution or 10 mL of 1% 3-NOP/H2O stock solution. The solution was then placed in an ultrasonic bath for ˜4 hr and then allowed to equilibrate over 24 h. All materials were purchased from Sigma-Aldrich and used as received. After 24 h, adsorbents were tested for their binding affinity and adsorptive capacity by looking at the reduction of 3-NOP concentration via HPLC at 230 nm.

[1159] The following adsorbents were tested and integrated areas were converted to mM concentrations of 3-NOP based on calibration standards of known 3-NOP concentration in distilled water, as seen in Table 28. FIG. 30 is graph showing the concentration of 3-NOP (mM) v. adsorbent (20 mM stock solution).

TABLE 28
Change in concentration
v. control of 0.2 g of
adsorbent in 4 mL
of 2.5% 3-NOP/H2O.

| | 3-NOP |
|---|---|
| | concentration |
| Adsorbent | (mM) |
| Control | 20.649 |
| Calcium Carbonate | 20.649 |
| Talc | 20.463 |
| Silica Gel (40-60 um) | 20.043 |
| Silica (5-20 nm) | 19.920 |
| Arginine | 19.782 |
| Lysine | 18.583 |
| Carbon Black | 17.422 |
| Activated Charcoal | 11.063 |

[1160] Table 29 shows the change in concentration v. control of 0.2 g of adsorbent in 10 mL of 1% 3-NOP/H2O, and FIG. 31 shows 3-NOP concentration (mM) v. adsorbent (˜8 mM stock solution).

TABLE 29
Change in concentration
v. control of 0.2 g of
adsorbent in 10 mL
of 1% 3-NOP/H2O.

| | 3-NOP |
|---|---|
| | concentration |
| Adsorbent | (mM) |
| Control | 8.258 |
| Lignin (Alkaline) | 8.326 |
| Bismuth Sulfate | 8.079 |
| Bismuth Citrate | 8.072 |
| Lignin (Dealkaline) | 8.056 |
| Diatomaceous Earth | 7.895 |
| Copper Sulfate | 7.814 |
| Molecular Sieve (4Å) | 7.771 |
| Cyclodextrin | 7.676 |
| Glutamine | 7.588 |
| Iron Phosphate | 7.503 |
| Betaine | 7.202 |
| Activated Charcoal | 1.358 |

[1161] Activated carbon shows strong binding affinity for 3-NOP filtering ˜45 wt % in concentrated (20 mM) conditions with ˜80 wt % in more dilute concentrations (8 mM). It appears that the adsorbent pore size should be greater than 4 Å for adsorption of 3-NOP. Mesoporous adsorbents with high surface area such as silica and activated carbon show high adsorptive capacity with no visible wetting seen until ˜75 wt %. Layer-by-Layer

[1162] Polyelectrolytes Coatings

[1163] Formulated tablets containing 3-NOP, an adsorbent, and a binder can be coated with sequential layers of oppositely charged polyelectrolytes. While not being bound by theory, it is believed that ionic crosslinking between the layers can result in a controlled release of 3-NOP out of the tablets. Examples of polyelectrolyte pairs that can be used include polyglutamic acid and polylysine, polyallylamine hydrochloride and polyacrylic acid, and polyallylamine hydrochloride and polystyrene sulfonate. An exemplary formulated tablet includes an adsorbent of silica, arginine, lysine, and activated charcoal (30-45%) and a binder of ethyl cellulose and hydroxypropyl cellulose (40-55%).

TABLE 30
Formulation examples of 3-NOP tablets.
Tablet weight varied from 0.2-0.5 g.
Tablet Formulation

| | Part per | | Part per |
|---|---|---|---|
| | formulation | | formulation |
| Adsorbent | (wt %) | Binder | (wt %) |
| Silica, Arginine, | 30-45 | Ethyl Cellulose, | 40-55 |
| Lysine, Activated | | Hydroxypropyl | |
| Charcoal | | Cellulose | |

[1164] The release data of 3-NOP tablets coated with multilayers of some polyelectrolytes is shown in Table 31.

TABLE 31
Release (%) of 3-NOP out of tablets formulated with
15% 3-NOP, 30% silica, and 55% ethyl cellulose. Weight
of tablets ~0.5 g. Calculations are based on a
comparison to control tablets with no coating.

| | Release Compared to Control Tablets (%) | | | | | | | |
|---|---|---|---|---|---|---|---|---|
| | Day | Day | Day | Day | Day | Day | Day | Day |
| PE Pair | 1 | 3 | 6 | 8 | 14 | 16 | 21 | 30 |
| PLK20 + | 58.1 | 56.6 | 61.3 | 62.6 | 64.7 | 63.6 | 63.8 | 63.2 |
| PRE20 | | | | | | | | |
| PAH + PAA | 61.5 | 62.5 | 67.1 | 70.2 | 70.4 | 71.4 | 71.7 | 71.6 |
| PAH + PSS | 61 | 66.5 | 74.7 | 76 | 77.5 | 76.6 | 76.7 | 74.8 |

[1165] 3-NOP to Adsorbent Ratio Study

[1166] Optimal loading of 3-NOP onto adsorbents was determined by varying ratios of 3-NOP to adsorbent. 3-NOP and adsorbent were speed mixed at 2000 rpm for 1 min at the following ratios by weight: 1:1.5, 1:2, 1:2.5. The adsorbed 3-NOP powder mixture was then placed in distilled water at 1% 3-NOP loading. The solution was allowed to equilibrate for 24 hr and then an aliquot was taken for HPLC to determine the reduction in 3-NOP concentration. Table 32 shows the average integrates are of 3-NOP in solution at various adsorbent ratios.

TABLE 32
Average integrated area of 3-NOP in solution at varying 3-NOP:adsorbent ratios.

| | 3-NOP:Adsorbent | | | | | |
|---|---|---|---|---|---|---|
| | 1:1.5 | | 1:2 | | 1:2.5 | |
| | Average | | Average | | Average | |
| | Integrated | Standard | Integrated | Standard | Integrated | Standard |
| | Area | Deviation | Area | Deviation | Area | Deviation |
| 3-NOP | 2566.4 | 51.3 | 2566.4 | 51.3 | 2566.4 | 51.3 |
| Silica | 2499.4 | 293.2 | 2321.9 | 99.3 | 2340.9 | 30.3 |
| Activated | 1751.2 | 29.6 | 1581.9 | 8.5 | 1403.7 | 14.5 |
| charcoal | | | | | | |
| Lysine | 2336.2 | 61.7 | 2308.9 | 23.9 | 2266.6 | 56.1 |
| Arginine | 2406.0 | 113.2 | 2372.8 | 61.2 | 2435.2 | 230.2 |
| Glutamic | 2445.9 | 149.9 | 2452.5 | 78.9 | 2446.3 | 85.0 |
| acid | | | | | | |

[1167] Higher ratios of activated carbon to 3-NOP result in higher adsorptive capacity. At ratio of 1:2.5 an adsorption capacity of ˜45% is observed and at a ratio of 1:1.5 an adsorption capacity of ˜30% is observed.

[1168] Activated Carbon Tablets

[1169] Based on the 3-NOP:adsorbent ratio study, the same ratios were tested for tablet integrity, friability, porosity, etc to determine the optimal 3-NOP loading. 500 mg, 13 mm tablets were compacted under 60 kN.

[1170] High ratios of activated carbon (1:2.5 3-NOP:adsorbent) resulted in tablets that absorb more water and coating solutions. This water/solvent absorption of non-wetted charcoal causes difficulty in producing uniform, defect free coatings. High loadings of activated charcoal >25% in tablets result in poor tablet integrity characterized by loss in hardness, increased porosity, tablet spilling, and poor shape retention. The preferred loading for tablets with poor disintegration was 1:1.5 3-NOP:adsorbent.

[1171] FIG. 32 shows a multilayer tablet formulation above consisting of 10 wt % 3-NOP, 15 wt % activated carbon, and 75 wt % ethyl cellulose. The first day release of coated tablets is ˜40% less than uncoated tablets and after 30 days, ˜30% 3-NOP remains adsorbed on activated carbon.

[1172] FIG. 33 shows a multilayer tablet formulation consisting of 10 wt % 3-NOP, 25 wt % activated carbon, and 75 wt % ethyl cellulose. After 30 days, ˜50% 3-NOP remains adsorbed on activated carbon. These adsorptive capacities are in-line with what was observed during the 3-NOP:adsorbent ratio study.

[1173] FIG. 34 shows a multilayer formulation consisting of 10 wt % 3-NOP, 15 wt % activated carbon, 5 wt % sodium lignosulfonate, and 70 wt % ethyl cellulose. The addition of 5 wt % sodium lignosulfonate improves coating adhesion to the tablet resulting in ˜30% reduction in the first day 3-NOP release. Over time, the release rate remains similar to previous formulations with a residual 30% 3-NOP remaining adsorbed to activated carbon.

[1174] FIG. 35 shows a multilayer formulation consisting of 10 wt % 3-NOP, 15 wt % activated carbon, 5 wt % hydroxypropyl cellulose, and 70 wt % ethyl cellulose. The addition of 5 wt % hydroxypropyl cellulose, a hydrophilic water-soluble binder, results in increased release between day 4 and day 10. After 30 days, ˜30% 3-NOP remains adsorbed to activated carbon.

[1175] Silica v. Activated Carbon Controls to Assess Binding Affinity of 3-NOP

[1176] Various control experiments were conducted to confirm the adsorbed 3-NOP to activated carbon after 30 days. Activated carbon was compared to silica as preferred adsorbents.

[1177] 500 mg of 1:1.5 3-NOP:adsorbent were speed mixed at 2000 rpm for 1 min. The resulting powder mixture was placed in 10 mL of distilled water and 10 mL of acetonitrile (ACN) separately. The solutions were placed in a sonic bath for ˜5 hr, removed, and allowed to equilibrate for 24 hr.

[1178] Aliquots were filtered through a 0.22 um PTFE filter, and taken for HPLC to measure the 3-NOP concentration in solution.

[1179] The same trend was observed in the adsorbent study. However, 3-NOP is recoverable by washing the activated carbon with acetonitrile or a similar organic solvent with high 3-NOP solubility (ie. ethanol, acetone, ethyl acetate, tetrahydrofuran, chloroform).

TABLE 33
Silica powder release v. activated carbon
release in distilled water and acetonitrile.

| | 24 hr | 24 hr |
|---|---|---|
| | in H2O | in ACN |
| | Integrated | Integrated |
| | Area | Area |
| Si-1 | 8415.7 | 8847 |
| Si-2 | 8507.3 | 8822.2 |
| Average | 8461.5 | 8834.6 |
| AC-1 | 4940.8 | 8103.9 |
| AC-2 | 5577.5 | 8082.8 |
| Average | 5259.2 | 8093.4 |

[1180] After 24 hr in water, less than 5 wt % 3-NOP remained adsorbed to silica compared to the powder mix placed in acetonitrile. After 24 hr in water, ˜35 wt % 3-NOP remained adsorbed to activated carbon compared to the powder mix placed in acetonitrile. By washing the activated carbon in acetonitrile, the adsorbed 3-NOP can be recovered in solution proving that the remaining 30-50% 3-NOP that is seen in FIG. 27-FIG. 30 remains adsorbed. Further studies need to be conducted to determine the driving forces for 3-NOP desorption from activated carbon under different environmental conditions to utilize adsorptive capacity of activated carbon. This study also confirms that from previous tablet formulations, diffusion is the primary driver for 3-NOP release of unbound 3-NOP. This can be seen by very similar release profiles between silica-based adsorbent tablets and activated carbon-based adsorbent tablets. FIG. 36 compares a silica-based tablet and activated carbon-based tablet over 8 days. Small differences in release profiles could be due to differences in porosity between tablets using silica or activated carbon.

[1181] Compounding of 3-NOP

[1182] 3-NOP was compounded with a variety of matrix materials using a DSM Xplore MC15 conical twin-screw extruder. The extrudate was pelletized and used as is or further compression molded into tablets as a suitable 3-NOP extended-release form.

[1183] 3-NOP was adsorbed onto the corresponding adsorbent and speed mixed with binder prior to compounding is a DSM Xplore MC15 conical twin-screw extruder at 100C and 50 rpm. The strand was then pelletized, heated, and molded into a 13 mm disc-shaped tablet using a carver press under 40 kN of compaction force. Formula consists of 8.3% 3-NOP, 25.0% arginine, 66.7% CAPA 6800.

TABLE 34
3-NOP release profile of compounded tablets over 24
days. Total concentration of 3-NOP is listed in mM.

| Time | 1 | 3 | 7 | 10 | 14 | 20 | 24 |
|---|---|---|---|---|---|---|---|
| Arg R1 | 8.97 | 16.37 | 22.55 | 23.42 | 24.11 | 23.07 | 24.56 |
| Arg R2 | 12.49 | 15.85 | 20.43 | 21.45 | 21.60 | 19.33 | 19.97 |
| Arg R3 | 9.90 | 17.78 | 24.52 | 24.50 | 24.36 | 22.60 | 22.33 |
| AVG | 10.45 | 16.67 | 22.50 | 23.13 | 23.36 | 21.67 | 22.29 |
| STD | 1.82 | 1.00 | 2.04 | 1.55 | 1.52 | 2.04 | 2.29 |

[1184] Formulas consists of 11.1% 3-NOP, 13.9% silica, 75.0% CAPA 6800 denoted “11PCL” and 19.4% 3-NOP, 24.2% silica, 56.5% CAPA 6800 denoted “19PCL.”

TABLE 35
3-NOP release profile of compounded tablets over 24 days.
Total concentration of 3-NOP is listed in mM.

| Time | 1 | 3 | 7 | 13 | 17 |
|---|---|---|---|---|---|
| 11PCL R1 | 9.79 | 18.77 | 24.31 | 29.15 | 27.93 |
| 11PCL R2 | 10.34 | 19.81 | 24.99 | 30.02 | 29.49 |
| 11PCL R3 | | 19.05 | 22.51 | 27.14 | 26.95 |
| AVG | 10.06 | 19.21 | 23.94 | 28.77 | 28.12 |
| STD | 0.39 | 0.54 | 1.28 | 1.48 | 1.28 |
| 19PCL R1 | 23.55 | 40.56 | 49.99 | 55.00 | 3.48 |
| 19PCL R2 | 24.19 | 40.59 | 51.03 | 53.46 | 51.64 |
| 19PCL R3 | 25.05 | 42.76 | 52.21 | 57.93 | 55.77 |
| AVG | 24.26 | 41.30 | 51.08 | 55.47 | 36.96 |
| STD | 0.75 | 1.26 | 1.11 | 2.27 | 29.07 |

[1185] Compounded Polyelectrolyte Complexes for Extended Release of 3-NOP

[1186] Solid polyelectrolyte complexes can be processible when plasticized with aqueous electrolytes to act as a matrix for 3-NOP molecules. An example of a polyelectrolyte pair for compounding is polydiallyldimethylammonium chloride (PDADMAC), as a cationic polyelectrolyte, and polystyrene sulfonate (PSS), as an anionic polyelectrolyte. At no salt conditions, the complex is brittle and not ideal for processing and the addition of salt, such as sodium chloride, can help with the plasticization and further processing. A trial formulation used for compounding includes mixing of equal charge stoichiometry of PDADMAC and PSS solutions with a concentration of 100 mM, with respect to each polymer, and a total volume of 200 mL (as per preparation method described in ACS Appl. Mater. Interfaces 2015, 7, 895-901). The polyelectrolyte complex can be separated, removed from the supernatant phase, and soaked in salt water with a concentration of 1M for 24 h. The polyelectrolyte complex should be decanted and ready for compounding. A typical formulation used for compounding is summarized in Table 34.

TABLE 36
Compounding formulation with polyelectrolyte
complexes for extended release of
3-NOP. Total materials used 20 g.
3-NOP was mixed with arginine
(as in solid powder) overnight at 30 C.
PEC Compounding Formulation

| | Part per | | Part per |
|---|---|---|---|
| 3-NOP | formulation | | formulation |
| Complex | (wt %) | PEC Complex | (wt %) |
| 3-NOP: | 25 | PDADMAC: | 75 |
| Arginine | | PSS (Equimolar | |
| (ratio 1:3, | | with respect to | |
| wt %) | | the monomer) | |

[1187] Table 37 shows release (%) of 3-NOP out of compounded PEC formulated as per Table 27. The compounded PECs were cut into 5-10 mm pellets and soaked in water (10 mL) for the release study.

TABLE 37
Release (%)

| Day 1 | Day 4 | Day 6 | Day 12 |
|---|---|---|---|
| 22.4 | 34.4 | 35 | 35.7 |

[1188] Compounded Pellets

[1189] 3-NOP was adsorbed onto the corresponding adsorbent and speed mixed with binder prior to compounding is a DSM Xplore MC15 conical twin-screw extruder at temperatures of 110-130C and 100 rpm. The extrudate was then pelletized forming ˜2 mm pellets. Material suppliers are listed in Table 36. Polybutylene succinate grades FZ71, FZ91, FD92 were supplied by Mitsubishi Chemical. Polycaprolactone-based formulations are summarized in the Table in FIG. 37. FIG. 38 shows 3-NOP release in mM for polycaprolactone-based formulations.

TABLE 39
Polybutylene succinate-based formulations

| | | | | |
|---|---|---|---|---|
| Code | 65FZ71 | 65FZ91 | 65FD92a | 65FD92b |

Material

| | | | | |
|---|---|---|---|---|
| Polybutylene succinate | 65.0% | 65.0% | 65.0% | 65.0% |
| Activated charcoal | 20.0% | 20.0% | 20.0% | 20.0% |
| 3-NOP | 15.0% | 15.0% | 15.0% | 15.0% |

On total solids

| | | | | |
|---|---|---|---|---|
| Glycerol monooleate | 0.5% | 0.5% | 0.5% | 0.0% |
| Compounding | 120 C. | 120 C. | 130 C. | 110 C. |
| Temperature | | | | |

[1190] FIG. 39 is chart showing the normalized 3-NOP concentration v. Release time in days of polybutylene succinate-based formulations. Lower 3-NOP loadings (<10%) have a less pronounced burst release over the first 7 days of monitored release. Glycerol monooleate was identified at a potent processing aid at loadings <1%. High levels <25 wt % activated carbon can easily be processed unlike silica which leads to high viscosity and screw torque. Cross-linked systems show slower release in comparison to un-crosslinked systems. High shear conditions of compounding appear to destroy activated carbon structure and adsorption capacity is lost.

[1191] Microcapsules for the Encapsulation of 3-NOP

[1192] Polyelectrolyte complexes (PECs) are used to form microcapsules and encapsulate 3-NOP. PECs are formed through attractive forces such as ionic interactions, hydrogen bonding, hydrophobic, and pi-interactions between the polyelectrolytes. Polyelectrolytes are polymers with ionic groups bonded to counter ions and can dissociate in a solution to make positively or negatively charged polymers. Herein, PEC microcapsules refer to interconnecting networks of polyelectrolytes formed upon the interaction between oppositely charged polymers.

[1193] Examples of polyelectrolytes used in this invention include synthetic polyelectrolytes such as polystyrene sulfonate (PSS), polyacrylic acid (PAA), and polyallylamine hydrochloride (PAH). Further examples include naturally occurring polyelectrolytes such as chitosan and alginate or ionic biopolymers such as proteins, enzymes, and charged polypeptides.

[1194] Examples of Polyelectrolytes (charged polymers with positively or negatively charged repeating units) Used:

[1195] Synthetic Polyelectrolytes

[1196] Polystyrene sulfonate (PSS), molecular weight ˜200,000 Da, Sigma Aldrich

[1197] Sodium Lignosulfonate (SLS), molecular weight ˜52000 Da, Sigma Aldrich

[1198] Polyethyleneimine (PEI), molecular weight ˜2000 Da, Polysciences

[1199] Polyallylamine hydrochloride (PAH), molecular weight ˜17,500 Da, Sigma Aldrich

[1200] Commercially Available Peptide Sequences

[1201] Poly (L-lysine) (PLK10), degree of polymerization:10, molecular weight: 1600 Da, Alamanda Polymers

[1202] Poly (L-lysine) (PLK20), degree of polymerization: 20, molecular weight: 3300 Da, Alamanda Polymers

[1203] Poly (L-arginine) (PLR10), degree of polymerization: 10, molecular weight: 1900 Da, Alamanda Polymers

[1204] Examples of Crosslinker Used:

[1205] Glutaraldehyde, 25% solution in water, Sigma Aldrich

[1206] EDC (1-ethyl-3-(3-dimethylaminopropyl) carbodiimide hydrochloride), Thermo Fisher.

[1207] PEC Microcapsules Preparation

[1208] Equal stoichiometry of oppositely charged polyelectrolytes is sequentially added to water or water-3-NOP solutions followed by vortexing for 10 s, after the addition of each component, to form PEC microcapsules. Some samples are chemically crosslinked (glutaraldehyde is an example of the crosslinker used). The PEC microcapsules may also be formed with non-stoichiometric ratios of polyelectrolytes. While stoichiometric ratios of polyelectrolytes provide almost a neutral microcapsule, microcapsules prepared with non-stoichiometric ratios are positively or negatively charged. All polyelectrolyte solutions are prepared in water and pH adjusted. The concentration of solutions is based on the monomer charge. The stock solution of 3-NOP is prepared in water with a concentration of 100 mM and pH adjusted to 8.

[1209] High-performance liquid chromatography (HPLC) is used to determine the concentration of 3-NOP in PEC microcapsules and calculate the release of 3-NOP from the microcapsules. Samples are centrifuged to separate the supernatant phase from the complex phase. The supernatant phase is then removed carefully by using a micropipette and transferred to a 2 mL glass vial for further analysis. The 3-NOP release of some PEC microcapsules prepared at neutral pH conditions and after 96 h of preparation is summarized in Table 38.

TABLE 40
3-NOP release (%) from the PEC microcapsules.
Samples are prepared with a 3-NOP concentration
of 100 μM. Final pH solution ~7. K, L, F, and E refer
to lysine, leucine, phenylalanine, and glutamic acid,
respectively. PSS refers to polystyrene sulfonate.

| | | 3-NOP |
|---|---|---|
| | Release | Concentration in |
| Polyelectrolyte | (%) at 96 h | Microcapsules |
| Pair | timepoint | (μM) |
| (KKLF)3 + (EELF)3 | 63 | 37 |
| (KKLF)3 + PSS | 64 | 36 |
| (kKIF)3 + PSS | 66 | 34 |
| (kKIF)3 + (EELF)3 | 70 | 30 |
| (crosslinked) | | |
| (kKIF)3 + PSS | 72 | 28 |
| (crosslinked) | | |

[1210] FIG. 40 is a graph showing 3-NOP release (%) from the PEC microcapsules. Samples are prepared with a 3-NOP concentration of 100 μM. Final pH solution ˜7. K, L,F, and E refer to lysine, leucine, phenylalanine, and glutamic acid, respectively. PSS refers to polystyrene sulfonate.

[1211] Examples of release profiles of some microcapsules made of positively charged polypeptides with either polystyrene sulfonate (PSS) or sodium lignosulfonate (SLS) are shown in FIG. 41 (3-NOP release (%) from the PEC microcapsules. Samples are prepared with a 3-NOP concentration of 100 μM. Final pH solution ˜7. PLR refers to poly (L-arginine), and PLK refers to poly (L-lysine). SLS and PSS refer to sodium lignosulfonate and polystyrene sulfonate).

[1212] The encapsulation efficiency of some PEC microcapsules prepared at neutral pH conditions is summarized in Table 41. Table 42 shows the encapsulation efficiency of samples prepared at pH-8.

TABLE 41
Encapsulation efficiency of the PEC microcapsules.
Samples are prepared with a 3-NOP
concentration of 100 μM. Final pH solution ~7.
Upper and lower cases in (kKIF)3 sequences
represent L and D-chirality, respectively.

| | Total | | |
|---|---|---|---|
| | Concentration | | |
| | (monomer | | 3-NOP |
| | charge | Encapsulation | Concentration in |
| Polyelectrolyte | basis) | Efficiency | Microcapsules |
| Pair | (mM) | (%) | (μM) |
| PLK20 + PRE20 | 5 | 7.4 | 7.4 |
| PLR10 + PRE20 | 5 | 0 | 0 |
| (KKLF)3 + (EELF)3 | 5 | 100 | 100 |
| (kKIF)3 + (EELF)3 | 5 | 22.2 | 22.2 |
| (KKLF)3 + PSS | 5 | 37 | 37 |
| (kKIF)3 + PSS | 5 | 100 | 100 |
| PAH + PSS | 5 | 30.9 | 30.9 |

TABLE 42
Encapsulation efficiency of the PEC microcapsules.
Samples are prepared with a 3-NOP
concentration of 2.5 mM. Final pH solution ~8.
Upper and lower cases in (kKIF)3
sequences represent L and D-chirality
of the amino acid residue, respectively.

| | Total | | |
|---|---|---|---|
| | Concentration | | 3-NOP |
| | (monomer | | Concentration |
| | charge | Encapsulation | in |
| Polyelectrolyte | basis) | Efficiency | Microcapsules |
| Pair | (mM) | (%) | (mM) |
| PLR10 + PRE20 | 5 | 50 | 1.25 |
| PLK20 + PRE20 | 5 | 53.8 | 1.34 |
| (kKIF)3 + PRE20 | 5 | 50.2 | 1.26 |

[1213] Physical Crosslinking of 3-NOP with Small Molecules

[1214] 3-NOP molecules can form hydrogen bonds with small molecules such as amino acids to make a larger size conjugate resulting in enhanced encapsulation efficiency. For example, an equal stoichiometry of 3-NOP and two selective amino acids, arginine and lysine, were reacted in aqueous solution for 24 h, and the solution was used for encapsulation studies. The results of such encapsulation with some PEC microcapsules are shown in Table 43.

TABLE 43
Encapsulation efficiency of the PEC microcapsules.
Samples are prepared with a 3-NOP
concentration of 125 μM. Final pH solution ~7.

| | Encapsulation | | 3-NOP | |
|---|---|---|---|---|
| | Efficiency | | Concentration in | |
| | (%) | | Microcapsules (μM) | |
| Polyelectrolyte | Arginine- | Lysine- | Arginine- | Lysine- |
| Pair | 3-NOP | 3-NOP | 3-NOP | 3-NOP |
| PLR10 + PRE20 | 4.6 | 19.1 | 5.75 | 23.9 |
| PLK20 + PRE20 | 34.3 | 28.4 | 42.9 | 35.5 |
| (KKLF)3 + (EELF)3 | 27.4 | 34.8 | 34.25 | 43.5 |
| PAH + PAA | 30.3 | 47.1 | 37.9 | 58.9 |
| PAH + PSS | 67.4 | 67.6 | 84.3 | 84.5 |

[1215] Ranges

[1216] Where ranges are given, endpoints are included. Furthermore, it is to be understood that unless otherwise indicated or otherwise evident from the context and understanding of one of ordinary skill in the art, values that are expressed as ranges can assume any specific value or sub-range within the stated ranges in different embodiments of the disclosure, to the tenth of the unit of the lower limit of the range, unless the context clearly dictates otherwise.

### INCORPORATION BY REFERENCE

[1217] All publications, patents, and patent applications mentioned herein are hereby incorporated by reference in their entirety as if each individual publication, patent or patent application was specifically and individually indicated to be incorporated by reference. In case of conflict, the present application, including any definitions herein, will control.

[1218] Also incorporated by reference in their entirety are any polynucleotide and polypeptide sequences which reference an accession number correlating to an entry in a public database, such as those maintained by The Institute for Genomic Research (TIGR) on the world wide web at tigr.org and/or the National Center for Biotechnology Information (NCBI) on the World Wide Web at ncbi.nlm.nih.gov.

### EQUIVALENTS

[1219] Those skilled in the art will recognize, or be able to ascertain using no more than routine experimentation, many equivalents to the specific embodiments of the invention described herein. Such equivalents are intended to be encompassed by the following claims.

The application's sequence listing, which the Patent Office published only in electronic form, follows.

SEQUENCE LISTING (16998 sequences)

SEQ ID NO: 1 - DNA, 1167 bp, Methanobrevibacter ruminantium
  source 1..1167: mol_type = genomic DNA
atgactaatatttttgaggatttacaggaagaaagcgtgggagtgagtatttttaaagataaaaaacctttagatcatcgttttttacctgaaaatttgcctcatagaaagaaacagattactgaaattgctaaacattggattgaagcattaaatggaaacaccccttcaaacattacaatttatggtaagacaggaactggaaagactgctgctgctaaattcgctaaagagcagcttattgaagcatctagagataaaaatgtcttcattaaagtcgaatatatcagatgtacagacttcactacagaataccaggtccttacctatctttgtcaaaggctaggccgtgatgttcctaaccgtggatggaccaagggggagattgtaaacacctttagagacattttaagaagaaatgcctttggcagaaatcttattttaattgtcattttagatgagatcgatattcttcttgaaaaggacggcgacggaatcttatacacccttacaagaactgataatattgccattctttcaataagtaattatcttgactttaagcaattcattaagccaagggttgcaagcagcttaagggataaagaaatagtgttcccgccttatgatgcagagcaattagctgatattttacatgaacgttctgaattggcatttgaagaaaatacacttgaagaaagcgttattccattatgttcagctatggctgctaaggaagaaggtgatgcaagatatgctcttgacctattggagaacgctggagacattgctgttgaagaaggatctgaaatcgttaagggaaaatatgtgcgtcaagctaaggatgtcattgagtataataaggttaaagacgttattattacacttccaacccaacagcaaagggttcttgcagctataatgaaattaactcaagacaatgaggaaatcacttcaggtaagctctttgaagtctataaagatatttctaaaggagacagtgttacctatagaagaatctttgatttcattaacgaattggagatgttaggaattatctctaccaacaccatatccaggggcagaggtaaaggcaggaccaatattattaagttgcagactgattctaagttgattcaagataacttatctgctgttctttattag

SEQ ID NO: 2 - DNA, 705 bp, Methanobrevibacter ruminantium
  source 1..705: mol_type = genomic DNA
atgactagacttattgagtttaagaatgtgaacaaggagtataaatctggagattacattttaaaagctatggataatgtgaactttacaatagatgaaggagagtttgtagtaattcttggaccttcaggtgcaggtaagtccacccttctaaaccttttaggaggccttgattcagttagctcaggtgaaataatcgtaaatggcagtcatattgaatcattcgatgacgatcagcttacaaactatagagcccgtaatgtaggctttgttttccagttctataaccttattcctaacttgacagccttggaaaacattgaattgatgaaggacgttgttgattttgacatcaatggattggctgtattggatgctgttgggctaaaggatcatgccgatcattttccagcacaattgtccggtggagagcaacaaagggtgtcaattgcaagggcaattgctaagagacctagtatgcttttgtgtgatgagccaacaggagctcttgattcaaaaacaggggctttgatattggctttgcttcaggacatgtgcgaaaagctcaatacaactgttgtcatagttactcataatgcaattctatcagaagctgccaataaggttattaggataaagaatggacagattgaaagtgtaattgtaaatgagatgcctaaaaaggtctctgaattagaattgtga

SEQ ID NO: 3 - DNA, 2268 bp, Methanobrevibacter ruminantium
  source 1..2268: mol_type = genomic DNA
atgcttaaaagaaagatgctaagagatatttggaattataaagttcaatttatatccattttcataattgcattcataggcgtatttgtatttgccggactgactgcagaggcagatggttttgaagcctccatagactcattttaccagaggagcaatttagctgacggatggatatactcaaactatcttgttgatgactttctaaagcaggtctacttgcttggcgcaaccactagtatggagagacagttggttgtagattcccaagctgaattagatggcaagcccgatattacgctgcattttgttgaaaacaacaccatatctaaatattatcctcttgaaggcaatgaattaaatataagcgattctgaaggtgtatggttagataaaactttcgctgatgctcgaaatctgaagataggggacaccattgcatttgaaagcaatggaattaaaatagaaaagaagattaggggattaggctattctccagagaatgtttatagcttagttcccactcaaacagttccaaattatacggcaaggggctttgcttatatgtcctataaggcatttccatcagacaatataacttataatgttcttaatgttaagtttgatggacgccctgaaatcttctcagagctattgtcctatcgtttagatggatattatgaattgtatctgccccaatcaaatcaatatagcgtaaatgcggtttcagattcaatcgctcatcaaagttcattaaacgctgttttcccaattcttttcactttgatttcaatgctgatgctttcagtgactatgaaaagaatcatctctaatcaaagaactcaaatcggtgttcttaaggctaatggatttagcaataggtcaatagctatccattatatgtcctttggctttttattagtcacatcagggtcaatattaggtgcaattttagggccgatcgtattccatttcgttgttcatgaatccagaatttattattttaagttccctgtttgggcttatgtgggacttgagagattcatatttgtaattgttataatatcattgatttcacttattgtttcatatctttcaattaaaagcattgtcaatgagcctccatctcaaataataaagcctaagcctccaaaaatggtcagttctggtttcattgaaaagctagcaatctggaaaaggctttcatttaacataaggtggaattatagggatatcaaaagaaacaggttcaaatcactaatgacaatcgttggcgtgatgggatgcactatacttttgatttcaggctttgcagtttatgagcagatggaaatttcaaaggattggtatttcaatgacgttaatcattttgaatccaagctggtgattgatgataatacagacttatctcaaatagattcaatagcccataaggttaatggggatgagataatggagtcctccattgaaatattaaagggtgatgccaattttgcttcccttttggttttaaatgacaccgatcttatcacaatgaccaatgacaatcgtgagaagatagatattccaaaaaatgaggtttcaatttcaaagaagatggctgatattctggatttaaaggttggagatactatagattgccatctattagattccaataagcttgttaagattaggattgataggattcattcaaccccatttactcagggccttgtcatgtctgccgataaatatgaagagttaggctttaattttactccaacaagcataatcacttcagagcatgtcaataagtcttatgatggagtcaaatccacaatctattcagaagatatggttcgaggatgggaccagatgcagaaaaccagcatgatgataataacttcaatattgtttttagctattgttttagctgttgtgattctttataatatgaatcttctttctttcatagagatggagaatgatattgcaacacttaaggttttaggatttaagagcaagtatctcactaaattgctagctactcagggctttttctttattattgttggttttattttaggtcttcctgtagcttattatattttaacattgttgatgcctgcatttggaaataagatctatttgattcctaatatttctgttttgaatatggcctttagctttttgataattgtatctgtgtttattgttatgaatttatatttctctaggaagattagaaagctagacatggttgatgctcttaagacttttgagtag

SEQ ID NO: 4 - DNA, 2238 bp, Methanobrevibacter ruminantium
  source 1..2238: mol_type = genomic DNA
atgaaaaatcgtatgattttaattatttcactattccttatttcattactcgctatcggtgcggcaagcgcatctgaagacataactgatacaattgaagcacctgctgctgatgaagtagtaacagttgatagtgaaatccaagaaatagaaacggttgataataaccttgaagaaatagaaaccgatacaaataatattgaagaggtggaagctgctgacgatgaagtcataaatgaaacagctgaaactgaaataaaagacgaaaccgaaattacagatgaaactatcatatctgaagaaaaggttcaaatcgctaatgatgaaaaaatcgtccaagacggtttgcttggctttagcatcaatttaacagacctacttggaggagaaagctcaagccttaatttgagcaaactcttaagtggagacaacttaaaccttaatttgagcaaactcttaagtggagacaacttaaaccttaactggagcgaactcttaagtggagatagcttcacccttaactggacagacctattaggaggagacagcctaacagtcaactggacagacctacttggaggagaaagcacaaccctcaactggacagacctattaggtagagacagcctaacagtcaactggacagaccttctcggagaagactttacccttaatttgacagacctattaggtagagacagcctaacagtcaactggacagacctattaggaggagacagcctaacagtcaactggacagaccttcttaacggagacagcttaaccttcaactggacagacctattaggagataacctaacactcaatatgtcaagccttttaggtggcgaaagcacaaccatcaactggacagaactgttaggtgacaatttaacattcaatatgtcaagccttttaggagaagactttaaccttaatatgacaagccttttaggagaagatttcaaacttaacctaacaaacatctttggagataacttaacagcaatctttggagaaaacttaacaaacaaactagaagaactcttcggagacgatttcacaattaacatgacagatctctttggagaagacttagctcttaacatgtcagacatcttcggagacgattccatattcaatctttcaaatatattaggcgaaagcacaaccatcaactggacagatctccttggagaaggttctacacttaacatatcaaaaatcctcggagaaagcctaacacttaacttgactgacctctttggagaaagttcaaccctcaattggacagaactattaggtggcgaaagcctaacacttaactggacagaactattaggcggagacagcttcaccatcaactggacagatcttttaggaaacagcacaaccatcaactggacagacctcctcggcagagacagcctaacagtcaactggacagacctcctcggtggagacagcttcaccatcaactggacagacctattaggaggagaaaccctaactatcaactggaccaaaatcttaggaaacgatacttcattaattgataacatcacttcattaattgatgatatcagtccattcgttgataaccttaccactgcagtcaaagatttaattaacaagttccttaaagaagaaaagactgtgagtgtcatcaactatgaagatatgaccacaactgctttcgactctaaaattgatggcagaatcggtaaatacttcgtagtaaaattaaccgatgacaagggcaaagccttatcagacaagtttgtacaaatcggattcaatggtagaatctacaacagaaccagtgatgaaaacggtacagtcaaattgcaaataaaccttggatataaaggtgattacacctttgctatttgtttcctcggtgatgaaaaaaccaacggatcatttgcagttgcaaaaattactgtcaaaaaacaaaaggctaaattaaccggaactgccgctagctacaaagcatccgctaaaaacaaatacatcagcgctacctttaagacaactgcaggcagtccaatagccggtaagaaaataacctttaccatcaataagaaaacttacactgctaagaccgatgcaaaaggtgttgctaaagttaaagtaagcattaccaataaaggcacttatgctttcactgctaaatacgcaggcgacgatacttatgcaactattaccagtgcaagtaaaaaacttactataaaataa

SEQ ID NO: 5 - DNA, 960 bp, Methanobrevibacter ruminantium
  source 1..960: mol_type = genomic DNA
ttgtatttcaagtgtaaacttaaggagtgtaatattatttttggccataataatgtaatttcaataaaagactttgaaaaggaagatataaaattcatcctagatgaagctgaaaagcttgaagacatcgctcaatcaaaagaaaaatcagaagagctctctggaaagatactcggactattattctacgaaccttcaacaagaaccagattgtcctttgaaaccgccatgaaaagattaggcggagactgcatctcacttggagaaacttcaaacagcagtgtagccaaaggagaaagcattgcagacactgcaaagatgtttgaaagctactgcgatgcaatcgtaataagacacgaccttgaaggtgtttcacgatttttatctgatgtaatagacgttccaatcataaatgcaggagacggtgcaggccaacaccctacccaaaccctattagacttatacaccatcagaaagcacttcggcaagatcgatggccttaacatagcacttcttggagacttaaaatacggccgtaccgtacactcactttcatatgctttagggatgtatgatgttaaaatgacattcgtatcccctgaagagctaaagatgcctaaggaaaacctccttgaccttgaaaagaacaatataaaatataaggaaacatcaaacctgaaagacatcatagatgagattgatgtattgtatgtcacaaggattcaaaaggaaagatttccggatattgaagagtatgaaaagatcaaaggagcttatcttatcaacaaagacttgctcgaaggcaaggaactgattgtaatgcacccattgcctagagtagatgagatagactatgatgttgacaatacaaaatacaataagtactttgaacaggctgcaaatgcaattcctgtaagaatggccatattaaagaatctcattaggcacagatacgaatag

SEQ ID NO: 6 - DNA, 504 bp, Methanobrevibacter ruminantium
  source 1..504: mol_type = genomic DNA
atgaaaacagccattatttatgcaagcaaaactggaactactaaaaagattgcaaaggccttagtggacaagatagatggagaagtcctaacaataccaatagctagagccaaatcagcctgtcttttaaaatacgactttgtaatcatagcaggatccatccattacggccgcattcaaggggaaataaaatcctttgtaaataaaaactataaaacattgcaaggaataaattacggcctatatatcacttgcacaaaccaaggcaaggctgaagaatatctgaacaaatcattttcagaggagatagtaaaatcagcatttgtaactgcatgctttggagctgaaataaaccccaataagggagacatgattactaaacgcataataaattccaatttaaaaaggtttaaaaaggaaaataaggagccaccaagtattgattgggagcttgtagatgaatttgcagataaaatcaataaaagaacaataaaaaagaaataa

SEQ ID NO: 7 - DNA, 807 bp, Methanobrevibacter ruminantium
  source 1..807: mol_type = genomic DNA
atgaagtttttaagattcaaaaagaaaatcaatgaattgggcaaagacaattcaatcaaaataggattctacgatggagaaaagataatcgaacttaaaggagacatattagactattttaactctaatctagatgaaataaaggaaaatatgatagaatcatatagtctagaagatatagaaatagaagctccagtaaatccatctaaaatcatatgcattggcctaaactacaaagaccatgccaaagaattaaatttagagcttccaaaaaagcctgtaattttcataaagccaaattctgcattaaacagtacagaaaagaatataatcttccctaacatttcaaagcaagtggattatgaaggggaattggcagttgtcattggaaaggcaacaaaaaaggtatctaaagaagaggctgatgattatatattcggctacacaatcataaacgatgtcaccgcaagggatttcacccttggagatggccaatggacaagaggaaaaagctgtgatggatttgccccaatagggccttttattgaaacagaccttgacccattaaatcaaagaatcgtaacaaaggtaaacggagagataaagcagaattccaacacttccatgatgatcttctccccacaggagataattgaattcatatcacagacaactaccctcaatccaggagatataattgcaaccggcacacctccaggtgtaggtccaatggatgctggttcaactgtagaagtctctattgaagagataggaatcttaaagaactatttaataaaagaagaataa

SEQ ID NO: 8 - DNA, 1452 bp, Methanobrevibacter ruminantium
  source 1..1452: mol_type = genomic DNA
atgaatcaaaatgcccagtggaattcaattataacatttatattggcaatgattggccttaccataggcatagggaatatttggcgtttcagctatgtattatactctaatggaggaggatccttcttcataccttattttattgcaataatggttatgggaattcctttcttgattttagagtatggattaggctttagcctaaagaagagtttttcaaagctgatgcatgatatacgcccggaatttgaggtaattgcttggatgttggtcatattcgtattcatcgttgtaatttactatatggttatcataggctgggattttgtatatttcctaaacagctttagcttcggttggggaagcgatcccaattcattcttcatgacttatgttggtggaactagggagatatcccagattggaaggcttcttcttcctacattaatttgcacaacagtcttatggattattttttggtttgtatccaatcgtgatgtggatgaaggaatcggaaagatttcaaccattctaatgcctttgctatttataataatgatttttatctttttatactcattcacattgccaggatttgacattggaataaagacattgcttaagcctaattggtctcttcttttagacattcacatctggcttgcagcattcggacagacaatattcaccttaagcataggccaggcaatggtctatacctatgcaagctatttgcctaggaattccaaattggtcgatgaagtattgcttgtggttattacaaacaccttatatgaggttttcattgccattggggtcttttcaatacttggatatatgtccctaaagtcatcaatacctatagaaaaactaatcagtgaaggaactggactgatatttgttgtatttccaaagatatttagtgagatgggttttgtaggtcagattataggtccattgctatttttatcaatactatttgcaggatttacttccgcattggcattgtttgagcctttcctatcatccttatgtgataagtttaatttaagtagacgcaaaggggttacaatacttgtaattgttgcagtgatttgctccattcctttttcaacaggaataagcagctatttggttgggattgttgacaagtttgtaaatgactttggaatattgattttgattggtgtgcaggccattatatttggatggttctatggtgttgaaaaggtcatgcccgttttaaatgagctttctacttttaaggtaggcaaatcatgggtttttacaataaaatatctattgcctgttcttattattatcatttgggtaaatggtgttgtgggactgttcagtaataccaatagctttgaattgattgtagatttgattattacttttgttgtggttggattctctgttttgtttactaaattaggtgttaaagagtaa

SEQ ID NO: 9 - DNA, 750 bp, Methanobrevibacter ruminantium
  source 1..750: mol_type = genomic DNA
atgatattctactatacaggaactggaaacagcaaatatgtagcagagacaatagctaaaagcaatgaagaagagattatctcaatcccagactgcataagggaaaacaaattcacatttgacgtgaaagaagatgaaataataggatttgtatgcccaatctattcgctaggaataccagattctgttagaatattccttaagaaactccgccttaactataataaaaagccatatatcttccttgtagccacatatggaagcactgttggaaacattaaaagcatagtttcaaaatactttaaaaagatagatggattcttcaatgtaaagatggtagacaattgggttcctaaatttgatctaacagaccaaaactacataaaacaggctgaagaatatggagagaaaagattagaggaagtgaacaatctaatactcttaagaaaaacaggaaaataccttgaaaatgaaaataaaatattcagcggattcatatacaaggttggatatgacttcatccgtaatacaagcaattttaagctagatgacaattgtataggctgcggaatatgcagaaacaattgtccaaccaatacaataaaaatagagaataaacggcctgtctggaagagaaaaaagtgtgacatgtgctttgcttgtctacatagatgtcctcaatttgccattcactatggaaaaaggtctatagagcatggccagtatttaaatcctaacgttaaattataa

SEQ ID NO: 10 - DNA, 864 bp, Methanobrevibacter ruminantium
  source 1..864: mol_type = genomic DNA
atgaaaatcaaaatagcagtcccttccaaaggaagaataagtgaaccttccataaaaatactagaaaaggcaggactaggcttaaaggattcaacaaacagaaaattattctcatcaacttacaatgaaaatatagacgtgatgtttgcccgtgcagcagacattccagaatttgtagacgaaggaatttgtgatatgggaatatcaggctatgacctgatagaagaggcaggagcagatgttaaaatattaacagacctccaattcggtgcaacaaagcttgttttagcttctcctgaaaactccgaaataaacacaaaagatgatttgaaggatggaatgacaatagctacagaatttccaaaccttacaagaaaataccttgaagaaaacaatctgaacataaagatagtaaagcttacaggatctactgaaatagctccattcattggaatagcagatgctataacagaccttacaagcacaggaacaacactaaatatgaatcatttgaagatagttgatgtcatccttgaaagctcaattaaattgatagctaacaaaaattcatacacagaaaaaaataaccttgtagaagcggttagcaccagcattcaaggtgtgcttgaagcggaaagaaagaaactggttatgatgaacgtcgcaaaggaaaacctttgtgaggttcaaaaggtcatgccggcaatgagcggacctactatatctcaagtgctttccgaagaggaaaccatggccgtacaagcagtggttggagaggatgaagtctttgacctagttaacaagcttagaaatgctggcgcacgtgatatcttggtagttcctatagaaaggattattcaataa

SEQ ID NO: 11 - DNA, 204 bp, Methanobrevibacter ruminantium
  source 1..204: mol_type = genomic DNA
atgagtattcctgtagctcctattggaagaatcattaaagacgctggtgctgaaagagtaagcgaagatgctaaaaaagaattaaacgcatacgtaaccgcacaagctgaagctgttgctaaaaaagcaatcgaattcgcagctatggcaaaaagaaaaaccgtcaaagctgaagatatcgaattagcaatcaaaaacttataa

SEQ ID NO: 12 - DNA, 1020 bp, Methanobrevibacter ruminantium
  source 1..1020: mol_type = genomic DNA
atgggaagaagaaaaaaacaagattctacacttgattcttattttccagattctgatttgatagaggaaaaaaagaagaaggatgaagcatgcaagatctgtggcaatcctatagaggacgccacctttcaaagatgtcgcaagtgcttaaacaagcttgcactgatagatgacttaagggaactattggaatacgtttctccaggtgaaagctttagggaaattgacctaatcaataaaggctttaaaagcttgaaactcaacattctcatttctaaatttttaaaagaacagctcattttaattaatctcgacggtttatttactcttaacaatattgattttttaaatgcctttattaaaaaatatggcgaaaaggaaaagccacttaaggaaacagattacttaatagtaagggatgacaagtctgccttttatattgatgtcaacaactattcagattatataaagataaggttcaatcctaggattaacaagtggcaggttgatttctttaatgaaaacggcctcgcaaataccaagtcctttattgattccaatgatgcaaataaggaagccatctattacattaagcagttaggtgttatcggatcttcagctgatgataagaaagaggaaaagtctgataaaagattatactcttctcatgagggaatctattacagccctagccgtggaatgtggggagctaaagtcaagggatataagggatttaagttcattggacacttcagcagcgaagaggaagcttatgaggcaagatgcaagtatttggaaaataaggaaagaaccagacaaaagtatatttctgaaaagagaggattgaaatccggccttaggaatcaaagctctggagagctgatttactttagcaaacagaagggcaaatggattgtaaggcttaaaaataaggaaggccaaattgttaatgtaggccagtttgacaccgaagaggaagctaataaagctaaagaggagtttattaaggataatagttaa

SEQ ID NO: 13 - DNA, 321 bp, Methanobrevibacter ruminantium
  source 1..321: mol_type = genomic DNA
atgagtgaattaaagttggatttggtattcgatgactatcaaatcaaaagggcaaaacctgcaaggggttcatctgttattcatgtgaataagagatggataggaaaggaagtgtccataattccactgccatttgacgtggatgaaaagtttattgatgaaactaaaggggaagacggtttatatcatttagagttggctgttaaggagatcttttccaaaacagtatcagatcgtaaagatgtaggattcttttatcttaaggagtctttgcttggattgtttttcctcattatagaagcgcctgatattgtttattag

SEQ ID NO: 14 - DNA, 1464 bp, Methanobrevibacter ruminantium
  source 1..1464: mol_type = genomic DNA
atgtatgaaaaagaagatattttaatcgattatattaataatgaaattaacactgttccattcagcttaaatgataaacttaaaataagaaatgagaagtttcgttgtcgtgaggagttttatgagataaaaaattatgtggatgattttttagaaggtaactataccaatagatacatagtgttacctggactaaggggtttaggtaaaacaaccattatttaccagttatatcaatatttattaagagaaaaggaaatcaatcataatcaaattctttatatctcctgtgatgatttaaatgactatatggatattaatattttagatgtcgttaactgcttcttgaagcttcatcataattctaatttaagaactttagataagaagatctttatttttattgacgagtcacagtatgattctaattgggcaggggctggtaaaagaatttatgataagactaataatgtttttttaatatttactggttcatctgcattgaatttagaatataatgctgattctgcaagaagattattgaaaaaaagcatcactcctttaaattacggtcattttttaaaattaaaatatggttttcactatgatgaattctctgatgcattaagtgacctgatatttttaggtgatgagaagaaagccattcaatgtgaaagggaagtttattctaaattgtataatttagaaggctataatgataatgtatgggatgattttttaagaaatggaggatttcccatatccttttatgagaaaaatgatgataatgtttctcaaaggttaagggaagtagttaaaaaagtcttaataagcgatattgctaatatttccactatttcaagtgaaaagtatattaacagcattaggctattaaattttttagcggtgcaaaagccaggggacatttcacaaaataaattagctaattttttaaatgtatctcctacaactgttaagggtataatagaccttttggaaaagacacatttgatatttcatacagagccttatggttctgccgccaaaagatctaaaaaatcatggaaatatttttttgctagttcttccctaaaacatgctttagttaaggatttaggtagttctatgagagatgtaaaatcttatgaaggtatcttattagaaaatcttgtagcatccactttctttaattggacaaataggaaaaatatttccttcaatctattttatgatgcaaatgatgatgaaaaaaataagactactgttgattttattattaaggaaggttttaataagccaattcctatagaagtaggtattggaaaaaaaggcgataagcaaatttccaagtctattagtgattatagggctgattatggtattgttatatctaataagaccaagtttatagaaagacagggaaatgttatttatttgcctccaagaagcttttcttttttatga

SEQ ID NO: 15 - DNA, 3846 bp, Methanobrevibacter ruminantium
  source 1..3846: mol_type = genomic DNA
atgaaattatataaaaatagcataatcattttattattaattttaattttatcgattggagcagctgcagctgtagaaaatgattattctaatgccgatttagatatttctaatgattttgttttaagtgataattctaatgaaattttaatagattcttctggctctttagatgattcttctagtgccttagtttcagaaggttcttctaatggattggattcatattattctaatgatttggttttaaatgattctttatcttctagatcatctgtgattgaagactcttgttctattgactcaactactattgaagataaggccttagaaaaaagcttgtcttcaaatgaattggctgaaggcacaaagacatatacagacctgctaaaggatataaagagtgctaagaatgtgcttaacttaaaatacgactatatatacgatagcactattgacaaaagtcttaaaaaaggaatcgtattaacctttgatgaagactatgagcttacaatcaatggaaacggccatattatagatggaaatggaattgctggtggatttaactttgaaaatggtgaatttgtcataaataaccttagctttcaaaactgtaagatatcctctctaatcttaactagctgtgatttcactacaaattatgtcactttttcaaacaattatgacaagagctctggtgcatgcgtatatcttgacaactcttatttctacagcagtcatgataattttatagataactatgcgccttcaggatcagccatctatggcgaatgcagtgtaatagatgtttatgatggcttatttgagtctcaaaaaccgattgactggtcctttatctatggatgggatgagactgaaatatatatagaagactgtttgtttagaaacaccgtatccaattactcaactgcagtatatggcgattatataatagaaatctccaactctcattttactaatctattctccaaattcacaggaggagccattggagtaaggaatgctagccttaccgttgaaaaatctgaatttaacaatgtctcctctttaagaaatggcggagtcatttatgcagacatgaatgtggatgaggaaaaatccagcgaagagacaatcattaaggattctagctttgtaaattccaagtctgactttggaggagctgtattgcagcttggaggtaaattaaagatatacagatcaaattttacagagaatactgccaactactatggtggtgccatttatacttccaatgtcagcttttacaccagtaaaagcaaattttcaaataatgtagcaaatgaaatgaaaggctctgcaatctattttgacaatggagacttgaaaatcgaaaattctaatgtcttaagcaatccttcctgcgaaggagccatttatatttacgatagcttttataatataagtggcagtacgttttcaaacaatgatgtggcaatacattcattctttgaccgcacaagaactgtaaaaaattctaaaacaggtaaaagcaccactgtaaagtcctctctaaataataatacttggggcggcgatagaaataagttaaacaatgtggaatatccttattttgtatccaatcttggtcaagacattatattgaatccagttaaaattaatgccactatcaaggacaaatactttaatctggttgatttgggattggtgacacctgttaaggaccaaggagacagcggagcatgctgggcatttggaggagcagcggcccttgagtcagcaatcttaaaggcaactggagtaagcttagacatatctgaaaacaatatacagtctgcaggattaagatatagcctttatggaaagccttcccttaccgaaggaggctatgactataccgcccttgcatactacttaagctggctaggtcctaataatagctctatcgatgagtatgaccaattcggtaagatatcccctcaattgttctctgaagataattatcatatcttggatgtgattttcctagaccctgcaaatacaagctcaataaaggatggattaatcaaatatggggcattgtctgcctcagcaaatggtgcagattcagattccaatgactttttcaatgaaaagacctatgcccaatactgcaatgatgatgaggcttccgccaatcacatcataagcattgtgggatgggatgacaactattccaaaaacaatttcctcattacccctaagggaaatggggcatggattgtaaagaatagctggggatctgactggggaaagaatggatactattatatctcctactatgacgaaagcctaaggtcctgctatgcagtagcctatctattaaataatactcttcgctacaataagctttatcaatatgacttgactaattacgatgactttgatgacggcgattatgatggggttatctattccaataagttcacctcaaatggggatgacctgattgccgctgttggaacctactttgaatatgaggatgacgactatgtcatttcagtttatgtaaatggcaaaaaggcctatcagcaaaagggcacatctgcatttgtaggatacaataccattaaattgaataagtatatcgctgtaaataagggagaaacatttacagttgccatcagctcatctgccatgccttatgttgatgatactaggatccatcttcctaagggaagctcatttttaaccgttgacggcgaacagattgacttaagccaaagaggccaaatagcttgcattaaggtatatacctttaatgacacaaagataactagagaccaaagcacttattacggttcagataagaagctagctattgaatctgagcttgaaggtactacaatcagcctaacagattcaaattgtaagagcttaggctctgctaaggtcgtagatggagtggctcaattcgatttggtattaggccctggaacttatttctacacaagctcatatgctggagagaaaataataaatagctttaaagtcttcagcacaatcggaggagtttctaataagaacataggatataaggctacagcaagctttagcctatcctttaaagatgaaaatggagagattttaaacaatagtcaattcacttacacattggatggaaagtcaaagactttaaccacattggatgatggaacttataatatctcctttaagaatttggccattggaacacataagttgtctgtcaagaaccttataagcggccaggtttccaatgccacaatcaaggttgtctcaagattcagcggcgctaaagacattagcatgttctatttcgatggcacatgctataaggttagaataatgggtaatgatgctaaggcagttggaaagggacagacagtaactgtagttctcaataagaagacctacaagctaaagacagatgcaaacggatatatcagccttaagatacctaatacattaactccaaatggcgcaaaggccaaggtatactcaattaagatgacttatgctggtcaaagcctgtccaagaagataactgtaaagcaggtcttaaagaccaatagtctcactgtcaagaagaaagcaaagagcttttcaattaaagtcacacttaagggaaaaacagttcttaagtataaggtgctgaccattaagtttaagggaaagacctataaggtcaagaccaatgctaaaggaattgcaactttaacccttaagaaagctgttattaatggtcttaaaaagggaggaaagtacactttcactgtgacctatcttaaggacactattaaggctactgtgagtgttaaatag

SEQ ID NO: 16 - DNA, 507 bp, Methanobrevibacter ruminantium
  source 1..507: mol_type = genomic DNA
atgaataaaaaattgattgaatatttgattatagcaacagttattattttaatcctttatggttgctattctcttattgattatcaatccaacggatatcagtttcgtatggtgaatgctactgattcaatgaatatatcttgtccttcaagttctgcctattcagtcagtggagacacagtagaatttagaaatggattaaacagtttctataatatggacgttagcaagctaaactcttcagatggtaaagttaaaaatatattgaatcaatattctaagttccataagtccggtactttagatttaaaaaatgagacttgctatgtgctgacagtagaattggaagacgataaaggatttaattatcattccatgattatctctgtcgattcatttgataaggatagtttatcctttaataaggaagcaaccgtttatctatttgatggaaacaatagggaatttgttgtagatactgtatatggaagtcaggtggtaatatga

SEQ ID NO: 17 - DNA, 939 bp, Methanobrevibacter ruminantium
  source 1..939: mol_type = genomic DNA
atgagtccatatgaactgataaaggatgatggtgaagtggttaatcttggtggttctcctgatgagagtcaagattttgatgtttctttagaaaggctaaatgataaatctttagcagattcagatggcgatggaaagcatgacgtattcatcagctattcaactaaaaactcagatatagcaaatgagatatgctaccttcttgaaaagaacggtcttgaatgctggattgctccaagaaacatttcatctggcaaaaattatgttgatgagatagcagatggaatcaaatcaactaaaatagtcgttttagtattttcaaaatattcacaggaatccaaatatgtaaacaatgaagttatgatggcattcagctataataagcctattatttcatttaatattgatcaaacagagcctaatgacattatgggatattatttaaaggtggctcaatggctgccggcatatccaaatcctaaaagtcagtatgagacattggttactgacgctttaaaattatgcaatgaaaggccaagaactgtaattacaagcttagacggcttcattccagaagacatatccaagcaaaagaaaaattggatatcacttatattgctgtttactccaatctattgggcttcatttatttatatgggccttgtttcaaagaaaaaatcatggacattgttaggatttttatatgcgattccaacagtaatcggattgcttttgtatttccaggtatttaccagattattccttatttatccgatatttaggttatttaatttaatatttatattatgctggatattggccataattcatggattggttattagaaatgagtttttaaccagatattctgttttaggactgatgtcttttgataaggatctctttgagtatctttatggtatgtattataaaatgtaa

SEQ ID NO: 18 - DNA, 876 bp, Methanobrevibacter ruminantium
  source 1..876: mol_type = genomic DNA
atgagtcatgatgtttttatatgctatgatgaggaagataaagattgtgcagaggccatttgccgtatctttgaagagaataatattaagacttggattcgctcaagagacgtatcttcaaaggatgcagcccgcaatctaacagaggctataagaaattccaaatgttttgtattggtctattcaaagaatggaaagaacaccaattatattataaatgaaacagacatagcattttcaaaagaaattccaattatactctttaagcttgatgagacaagcattccaaaggatttggaatttattttaataagcaaaaagaagatagtggcatatcctcatagcaaaagacaattaaagactcttgtaaaagagacttcagatatattagatagaccaacagatgatattaagcttgattctaattcagtcaagacaattgaaaggtctaatcctaaaagaaaggaaaacaatataaagaaagctattggagcagcggctttaatagcagcagttttaattttaatttatttatttgtaatagtgcctacaggccagaacatcaccgatagcggtgtattctccatggatgtaacccatgttgaagtggatgaattggccaaaggcaataagtatacgatatatggcgaatcatataatttgccaagtgattctgatagatactttatgaaccttcaattctttgatgataaggataatgtggtttatgaggtaaattcaacagccgatgagtttaaatcaggcattatatggagtggtgatataaataaaggtgatattaagcatattgggtttaaattaactgatatggataataaaatactctcccaagaggattataatcttggattgtag

SEQ ID NO: 19 - DNA, 1221 bp, Methanobrevibacter ruminantium
  source 1..1221: mol_type = genomic DNA
atggtgaaaatgaaatttaagcgtagtttaatattggcagtgattttgataatcctattttcacttggaactgttgcagcaagtgaaaatatagttattgatgagtcttctgattccaatttagttatagaccatgctaaggataattatttattcaatggacctataaaagataattatttatctagcagttctattagtgataattatttatctaaaggtgttcttgatgattcttatttatcaagaagcgatttggatgattcttatttatctatggatgatggcaaaggctctatcgatttgacgaatcataatcaactatctaattcagatgataaacagcttaaaacttctaatttagaggatgaaaaacagcttgaaagtgtaaataaaggagataagcttcttaaagattcaaatgacaatgtcgatttgtttattaatatggatgtaaagacatcattgaccaacaagcaatataaccgtgcaggaagcgaagttccatggattataactgtttcctctctcaatggaaccagctataatacccaagttcgtgacgttttatctgaaaatttacagtatttatcacataatgctacaatgggaacattcgatccggaaaatggaatttggactgttggtgacttggaatcttctaaaaatgcaagcttgacaatattgacaagattgaaaagagatggtacatatataaacaaggcttatgctactaccgattcaaatgatgttaatctattgaataacttcctaatcatttccataaggaccggttcatcaaagatcacttctaacattacagagacaagtgatgaaagagagggaattcagcataatgttcattatgctagtatggttgatacggactttatatatagatatgaagaggactcttcagaagacgatggcggcaatgaagaaggccaatctgaaggaaattcccataccaagactagatctttaggaaataaattgaaattattcaatgctcagaatatagattatcattctctttccaaaaacatcggtggagcattaggttttggatataattcaaatggaggattccttaattcaaaggacatttatgaggctttatttgtttatgactatacaagaatccctattattgtatttgcagcctttttagttgttttagcatctatagttggctatgataaggttaaatcttcaaaataa

SEQ ID NO: 20 - DNA, 6015 bp, Methanobrevibacter ruminantium
  source 1..6015: mol_type = genomic DNA
atgaggattatgataaataaaaaattgttttttgttttcttattaatggttctagtgattggaaccatttctgcagttagtgcaaatgaatgcgctaatgacttaacgatggagataagtgatgataatatagctattgatagttcttctgctttagaaggggatgatttagctattgatagttcttcttcagatttaagtaatgaaaataatataaattctatgaatgatagtgtaattaattctaattctattaattctgattctattaattctgattctattaattctgattctattaaccctaatcctaatattgatgatgaaataaataaccataaagatagctttttaaaggctgtacaggcctctaaaaccggaacatttacagagcttcaaactaagataaacaaggcaagcaaaggctcaacaatctatctggataagaattacctctataatgatgactttaaaggcaaatatggaatagtgataaacaagtctatcacaatcgatggaaaaggccatgtcattgacggtttaaagaaatcaaatctgattttcatcaatgatgcttcaaacgttgtctttaagaacataatatttagaaagggcgacggggacgagaatggagctataaatcttattggctctgatcatatcgagtttaacaattgcagcttcaattataactatggtgataggggtgctgtatttttatccggcagcgattactcctcctttgtaaattgcaagtttaatgagaatattggggagaacggcggagctcttatattggctgatagtgattattctcgccttgtcaactgtatcttttttggaaatgaggcatctgacggaggagccgtatttataacttatagtgattattcttactttttcaactgtacttcagagggcaatagcgtagattatacaggaggggccttttatttggattattccgataattcctctttcattgattgcgtatttgacacttccagcgctaaggatggcggtgccttttatttaggcgattgccataattcctctttcattaactgtagctattggaataatcaagttgattattatggtgctgtttgttatttggacaattgctatgactcctctttcatatcttgtaatttcactggaaattctggttctaaccctgaattagatgaaacaccttccattggcggtggcgtattttatataagcgagtctcacggcttgtattttacccattgtaatttttccgaaaatgaggcaaaaaatgatggcggtgccatatatgcttcagattccgatgttcatattgattcctctgtatttgaggagaattgcgctttatgcggaggtgccctttatgctatgaactctgatattttcattgactcatccctttttgagagtagcgttggagataggggaggttcaatatttgcaaataagtctaatgtttattctaaaaactcctcttttattcaatactatgaaattgaagatgaatatgtctatattcctgcttctggagcatatcaccttatggaaggaaatattggcggagcaatatactctcttcagtctgtcttgaatatttcttctaataaattcaataacaattttggcttgacttcagggggagatatctattcccaatacagcatgatctatatagatgactgctcattttcaaattcattctccaatggatttggaggctcattaagcttcaacaacgactatgtccaaatcacagattccagctttgaaaactgcagctcaagggataacggcggaggtggaatctactctataaattccattttgaattgctctgattcagacttcaccaattgctattcatatttcggcggttcaatctgttccttaaacactgatctatccattaataacaataatttttacaaaagctctgctgaatattatggcggatccatttatttcctttatggaactttagacattaacggctctctcttttcaaattcatacggtcagtatggaggctccatttatataagaagtcctcagacaataaagaacattacaaataatcagtttctattttctcaaggcataagaggcccaaggatatatatcgaccaatattatggagaaatctccaatagcggcaatgtttataccgatgaatatgaagaaaagggattgttttcagattatggaatgggaatttcttttgaaagcaatgaaggtttggtcccattgattcactattacccttcaaacgagtcattgccttcattctatgaccctagaggtggtggagattcagaagatgattatgaagatgaggatgatgattcagatatagctgttaaagaccaaggcattggaggcaactgttgggcattttcaggaattgcaacccttgaggcatgccttgaaaaggtaaccggagaggaattcggcttttcagagggcaatgctaaaaaccttatggccatatcatccatttatggcttgaacatagacacaaacaatggaggatatgacacaatgttccttgcttatcttgcaagctggctaggtcctatctatgaggaatatgatacatataatccattatcctccctatccatagatcttccttcagtattccacattcttgacattgatttcttggctcctcgtaaaaacagcttggataatgatgagtacaaaagggcgataatgaataacggagccgtttcagtgaccttcgattgggtggaaaataaggtttccaacggattccattcagtttccattataggatgggatgatgattatgatgacattgactccttaggaaactatgcaaagggcgcctggatatttaaaaacagctggggctatgaatggggagatggcggtttcggatacctttcctataagcaaaagctttcagaggagatagctccatatatgcatgcatatacattttcatttaaggaaaatgacattggatatactgacatatatcaatatgacttttcaggattaagcgatttcctgattttaaattccacaaatgcctattataagaacaagttcatagcagaggacaatgaattcctatatgcattttccacatattttgataaggagaccgatttcacctattcagtttccataaatggcaatgtcattacaaaaacagaggatggcaaagacatattgacttctatccatcattctccggctggatatcataccattccattaggctataacctgaccttgaaggagggggatgagtttgagataatcataaaattgctgaatgacaatcaaaacaggattcctgtttgccaagctgatgaattgtacagaacttcactgccttcaaatgcatctttcatgagtttaaacggcaaggattggattgacttgagcaatttagcttcatccaatgagttctcttcacttggcatcaaggcaaacacttcacaagtagcttgcataaaggcattcacttccaattggagaatgaattcggattcctctatagtgaactctaagaatcatagcataatcacctcagaaggaacagagttaagccaatatgaaatatgccagcttaaggtaggctcatttacaagggcttcagccaatgaaactatcattatagccatgagcattccagaatggagaaattatcaggatgaatatgaaaattatatagaggttcatatcaatgatgaattctattatgtaagggtcaatgagggagttgcctatttggatatcagctttgataagattggccattatgactttaaggcccagttcaagtccaatatatactcatctgatattgtagagtttgattttgaagtagtaaaggattcaatctttgatgttgatgatttggatgcctcaaacccaggaactttcaaggaacttcaggatataattagaaatgctaagaacggttccataatcagtttggataaggattatgctttctctagtggtgatgagtctgttgttgatgattatatagagataaataaatctctaattattgatggaaaaggccatataattgatggttcttctgattcaggcatttttagactaagttcaggtgataatcttactttgagaaacattaagtttatgaatgcagataatggtgcaatagtttctaatggaaatttgacagtttctaattgttatttcattagtaattgtgcttctggttctagttctacttctacttccagttctgattctagttctactgcttgtggaggtgcaatttactgtgaaggcacttgttttatagtgaattctctatttgaatctaattctgcagatgccggtggtgctgtttactgtgaaggcacttgttttatagtgaattcttattttgattccaattatgcagatcttggtggtgctgtttgttgtgatggcagctgttatatagtgaattctctatttgattccaattttgcagtttatggaggtgcagcttccatagttggaaatgaatcatgtgaaattatagattcaaactttattgaaaatgaggccatctatggcggtgcaatatacttagaaagctattgttatcttttagattcaagtttcaattataattatgcaaacaatggaggcgccatttattctatagctgaccttgacattcataccactggctttaattacaatgaagcctataaggatggaggtgcaatctatcttgtaaacagcacatcctatatcaatgaaggaaatttcactgaaaacagtgctaaagagaggggcggtgcaatatgcgcacttgaattctcaaatctaactattagatgggcttatttcatggataactctgcttcaaagtatggaagtgcaatcttttcagtaaatgcccttaacattacagattctgaagtgactgtaagttctggtaaggtggaacttatctgctttgcttatgattatgcttcaaatggccaggcatatggagatttatactttgatgaaaatagcttttatatcagtggtgctcctgagatttactacttcagagaaaagatagctcataaattagccttggatcttgagttcaataatatagagcttatcagaggaggaggcgttgagatatccagggacttgaatgatgatggctgggaggataaaatcaataacaatatgcttgagatatgcagattggttgatgacgatgattatatgactgtccttagaatgaaggagatagaagtgattctaataaacaagaacaatagatctgacattcaaaagtttaagattccatttaatgtcaagcttaatggctatttccttaacacttcttcattgaagtatggctcttatatccttactggaaatctttctaaggatcttgcaagcaattgtattgtaaagaatggaactttgaaagttttaaggaaaactaccctctcttctctgtctactttcactaaagtttatggaaatagtaagaatcttgtagttactttaaaggacagtagtggaaaagctatagttggtgttaatattgctgttaaattgaatggaaaaacaattaaagcaaagactaattcaaagggtcagatttccatagccattagtcttaagccaaagacatatactgcatatatcagctttgcaggcaatgactattatgcaagcgcaagcaagaaggtaaaggtagttgttaaaaaggcaaaccctaaattgactgcctctaaaaagacctttaagttaaggaatgctaaaaagtatacagtcactcttaagaacaaccttggaaaggcattgaagaatgctaaggtcactattaaggtggctggaaagacttataccgctaagactaatgccaaaggtcaggtaacattcaatttgaaattggctaaaataggcaagttcaaggcagttgttagctttgcaggtaataagctttataatggcttgaagaaggcggttgttttaactgttaaaaagtaa

SEQ ID NO: 21 - DNA, 558 bp, Methanobrevibacter ruminantium
  source 1..558: mol_type = genomic DNA
atggaatatgagaatatactggacttgaagagctctgaagagtttagggagtggatgataaaaaaccattccagccaaagggaatgctgggtcaactgcaaaaggggaaaggccgataaggatgagttgtcctatgtcgatgcagcctatgtggcattgtcattcggatggatcgattccacctatgggctgatagatggaaagagaatgcaaagattctctccaaggagaaaaaacagcaattggtctcagcttaataaggaaagatgtcgatggcttataagaaatggccttatgacagatagcggatatgaaagccttcccgatttagaggaagattttattatagattcagatattttagatgaattgaagaaggataatgagacttggaataattttaagaactttccagacctttataaaagaataaggatagctaatattcaaaaggaaaaagatagggaagcatttgataaaaagttggctaattttattaaggacacaaaggacaataagatgaaaggaaactggaatgatgatggaaggcttatatga

SEQ ID NO: 22 - DNA, 255 bp, Methanobrevibacter ruminantium
  source 1..255: mol_type = genomic DNA
atggcaaatgagataattttaaatatagatggcaatgagcatcaaattaaatatgataatatggaagtagatcatgtttctataatagatcttgaaaaattgggacgttcattgattttagaattggaaatagatggaaaggtggataggaactcattggatgatgctatcaacagctttttagatacaatctatgatgatattaagtattttgcagtagagtatgcagatgataatgaaatagaattaatatga

SEQ ID NO: 23 - DNA, 468 bp, Methanobrevibacter ruminantium
  source 1..468: mol_type = genomic DNA
atgagaaaccctaaagattatattatgaagactgattatttgattattcttatggccttattgctgatttctatagtttcacctatagcagctgcagatagctttgattttgatattccagagggctatcatatagagaatgcaagcgatgatttcgtactattggagaatgaggactattatagcatttcaatttccattatggacaattccacagacaggaagactctgatggatatgcttgaaaggcacaggtgctatgactttagaaatggtgtcaattataccaaaggggatttttatatagaggagaagccttattatcaggagttccaaatgggaattttgtacttttgtgaaaatggtagagatcttgttgtgattgattataagggacctttaggtatggatttgaataatagtcctatagatggcattttggatagttttaagtgggtaagttattaa

SEQ ID NO: 24 - DNA, 759 bp, Methanobrevibacter ruminantium
  source 1..759: mol_type = genomic DNA
atgggacaagatggttttaaaaacgaagatttaatgttagaagctttaaataataaaaaatttatggatttgaacgataatttaaaacaaatgattttagatatgtatggtgaagaaatttctcaagattttattattaaggcttataaaaaaggtggagtaaataaaacagatttgactattgatattaattctcaaaattttaatgtcagtataaaaaaaggaactggaaatagtgtccatcaagaaaaattagaagagtttgtttcttttttaaaagaagaatatggtatttctaatgtattatctgatgatataaggttttttatttggggtgatggaactttagatggtactggtgaagtttcagatagattaagcgcttctgaatttagaaaacaattccctgaaaaaataagaaatattagagaatttttctatactgttaaaagagatttaatagaacgttttgtcattaaaggacctaaatctaaatctaggcctgattttatttattatggaacaccagataaaggtattattgttgaatctcaatccgttattgattggttatcggatgataaaaatgaaaaaagcagctcccctattcctataggcagattaacattccaagcatggaataggaatattaatggtggagataaatctgaaaataaaagaggggttattcaattaaaatggagttcagttggtaaggatttagttaagatttataaggagaaaaaagatgacaaatag

SEQ ID NO: 25 - DNA, 582 bp, Methanobrevibacter ruminantium
  source 1..582: mol_type = genomic DNA
atgacaaatagaggaactgcagaaggtacagaagaagaaatatcctttgtaaaattattaaacaaaaaagaggacttatcttattgggatgtattaaatttagatcataattgtcattttgcaatacatgttttatatcaaaaatttagtaaaataagtaataaaaaagtttatcctaaagcagatgtttatattgctaaaggtaatgttccttatagctatttagaagataatgatttctatctaagcgaagataatacagaagactttgatttggaacctataaaatacactggcatttcagtcaaacttcaaaattctagtagatatcaaataacaaaaatgggacctaatacatttaaagatatttttggttgttatgaattgggggctggagcttcaatatattgtagagatgtggatgatttagaaaaaaatcctcaagtcttaactggctggaatactaattttgaagactttataaagtattttaaatcttttgatgtagtttccagctcagatttagatatttcttcatataaaaaattaaaagtttttctaatcaaaagattgaggaaatga

SEQ ID NO: 26 - DNA, 1020 bp, Methanobrevibacter ruminantium
  source 1..1020: mol_type = genomic DNA
atggtttcaaaaaaaagagcaatgcaatacacattagaagattttaaagagaaaaatcttgatgaaactgaagaaaacgataaagatttcacattcattgatttattttcaggtattggtgggttcagattagcctttgagtcagtaggtggaaaatgtgtctttagttcagatattgacaaatgggccaatgaaacttattatatgaactttggagaatatcctcatggagatataagtgagattcctgcaaatcaaatacctgatcatgacattttatgtgcaggatttccatgccagccatttagcataggaggatatagaaaagggttttgtgataccagagggactttattttttgaaattgaaagaatacttaaagctaaaaaaccccaaatgttcctactggaaaacgttaaaggcttaacaaaccatgacaagggaaaaacatttaaagttatcaaggaatccttatggaatttaggatattcaatattttaccaagttttaaattcaaaagactatggagtccctcaaaacagggaaagaatattcatagttgggtttaaagacaatgtaaatacattcaagttcccattaccttttgaaaataaagccaatattaatgatttattggaaaaaaatgttaaagatcatgagttaagtggaattgcttcagatcatctaaaaaagcattatgaagaattcttaaaaaataaaaaagttaataaaaattatcccattttcgctacagaaattaggccttcaagatgttctattaggaatgatggcaattctccttgtttaactgctaaaatgggtactggtggcaataatgtcccggtattagtaaatgaaaataggaaattaactgttcgtgagtgtttaagacttcaaggattcccagagaattataaaattaaagataattattctcaaagctataagcagattggaaacagtgtaactgttccagttgttactttgatagctaaggaaatgataaaatatttaaattaa

SEQ ID NO: 27 - DNA, 1029 bp, Methanobrevibacter ruminantium
  source 1..1029: mol_type = genomic DNA
atggaaaaaccaacagttattgatctattctgtggaatcggaggatttagtaaaggatttgaaatggcaggtttcgatgtgttatttggaatagatatttgggatattgcaatagaaacattccaacataatcataaaaacacagagggaatattagcagatttaacagaattagatgatgatttttttaaacaatacacaaataaagttgatgttatcatagcagggccaccttgccaaggattttcaatgtgtggaaagagagaagttggagataaaagaaatgaactgttccaagaggtagtgagagcagttaaaattattaatcctaaaattgttattattgaaaatgtagtaggccttctttctatggaaaatgttgatggtgaagatgttaaaggacttatagtctctgaattcgaaaaattaggctatgaaacaaactataaaatactagatgcatcagaacatggagttcctcaaaaaagaaaaagagtaattttcattggttctagaattggagatgttgaattcccaaaaccaaaagataaaaaagtttctgttatggaagcattaggcaacattccagacacaaattttgaatattatgatgagccaacaaatagctttcaagagcttatggctgatggagaaaagaaaatctataaccatgacgctatgaaacataatgaaaaagtgcttaaaagaattgaaaacgttcctcaaggaggtaattggcaagatattcctccagaaatctatgatgttggtggaacacatagtaataattacagacgtttagatccaaataaaccgtctataactatcaaacatgctattaaatctatgataattcacccaacattcaatagagtaattacagcaagagaagcagctagattacaatcaatacctgatagttttataattaaaggaaataaaactgcacaacatcaacaactagctaacgctgttcctccattattaggttatgagattggaaagcaaattataaaaaagttaaattaa

SEQ ID NO: 28 - DNA, 174 bp, Methanobrevibacter ruminantium
  source 1..174: mol_type = genomic DNA
atgaaaagaatacaagtaaattttacaaaagaacagtatgaactattacaaaaacttaaaggagaattaggaaacagtgattcagaagttataaaaaatataactatggcttggctaagcgaaaaatcattaatatcaacaaccctaaaagaaaaaatatttaacaattattaa

SEQ ID NO: 29 - DNA, 753 bp, Methanobrevibacter ruminantium
  source 1..753: mol_type = genomic DNA
ttgaatgaaatcataaagaccacattgattctacttttaaagcaagagataagaaaagaacaaagacggggcataaagaacatacttttatacttccgtgatgtggatacgctggatacaaattccataaattggaaaatccgctatgataggaataatcagaattatcagatgattgtcggcatttgctatcttacacttaaaggactcctccagtctgatagtaagggtgaaaagaagcttatgagctttttggataatcaaaggatgaataggctatatgagaaattcattttaaattattataagagagagcatcctgacatcaaggcttcctctcctaagatagaatggcaattggacgatgattttggtgaaatgcttcctcgtatgcagacagatatcactttagagcataaaaataagatattgattattgatgccaagtattattcaagcaccactcagacctattatgataaaaagaccattcattcacacaatctctatcagatttttacctatgtgaaaaataaggaagttgaagtggctaatgaagcaaatggagtggaacttgacaataaggtttctggaatgttactttatgcaagaacaagagaaaaaatatatccagacaatgattatttaatgagtggaaataggataagcgttaaaaccctagatttaaaccaggattttactttaattaagaaacaattagacagcattatagaggtttatttgaaggcttga

SEQ ID NO: 30 - DNA, 471 bp, Methanobrevibacter ruminantium
  source 1..471: mol_type = genomic DNA
atgaataataaaaagatatttgtggccggattagccatattggctattgttctaatgggatcagttgctgcagttgatatgggcattcttagcggaagcccaaccaaattcagcattgacggcatcgacttcaatattccacagggatatgcagttactgacaactatacaagagtgaatgatacagacactgctggaagctcaagctatagggttacccaagcaacctttgaaaacaatgtacatgatgccatttcagttcttgtagctgattatgatcatgacatgagtgaggatatcatatctcaaagaggcaataagacaactataaatggtgtggacggatatatgcaaacccaaggggattatactacattcaattatcttgttgatgggaatcttgtgacaatcactcttacaaatgcagatttgcttgaggatattattgttggtaatcagacagatgactga

SEQ ID NO: 31 - DNA, 4416 bp, Methanobrevibacter ruminantium
  source 1..4416: mol_type = genomic DNA
atgtccgaagatattggaatcaatgacaataatggtgctttgatagcagacgttaactttgctgatgacaataataatgctttaaaggctgaatccaactctgctagtcagaatgacgcttcaatagatgaatctgctaatcccactcaagatcttgtagatacagataatggattaaaccaatccatcactaaaagcccactaaaatccaatactggcctcactgttacaaaaacaattgataacagctctaaccatatgcctgtagacggattttacgacattggagacactatctactataccatcaacataaccaacaatctagaagaaagcataggcaatatcagtgttgttgaaaacttccctgatggattgatatgggaatatatttggtttgctgatgacaatccaaattggaaaaatgagagcaatgtattcaattatacaaaagcattagagcctgaacatagcatccttctcaagatacgtatgacaggaaataaaacaggcacttacattaacacaatcaatgtaagctccaacctaacaagctctcaagagttcttatccgaagaagtgactgtttatgctccaaatttaacaattacaaaagtggccaatgatccaatcgttaccattggagaaatagcaaactttacaatcaacgttaccaataacggaaataggccattaagtaatttgcgtatctatgaagatcctgaagaatcattattcctaaatgagttcactaacataagtggaaattgggactcttttgcaaatcgtggtggagattacggttttagcttggaccagctggatataggtgaatctgctgctataatagtatcttttttaacaacagaaattggaaatttcaccaataatgtctatagcaactatccgaatcctcaagtagaggcaaatgccactgtcacagttgttccaagaattgaaaagactgtcaatgccactgaaattgatatgggagagtctgttgaatacaatgtttacatcgacatgacaggagccaataaattaggcattgatgactttaaaatcaaggtcaccgacattttaaacgaatacttcgatttggataaagatagcatctcctcaaattggaaatataatagagatgaaaaggcctttgaatatatgctaagcgacattccagagtcatttgaattcaattttgctgtatatatcactgaaagaggaaattacaccaacacagtttcccttaaaataggtgacctgcctgaagtcagtgctgagtctgatgtcactcatgtcagaataagtgatgcaaatatcgctgaaactgccctagattcaacagtaaatcttcaagaacaagcggttttcattgttaatatcaccaatactggagataagacatttaatccttatgaacttgttgtaaacgacgactatgatgaagatgctctaacttacctcagtcatgaagatataacaggcaaatggatagagaatattgaaactgattccctttcatttacattgaattcaacattagaggtaggagaatctgcaagctttaagctttacttcaatacaagcaaggtaggatcttattccaattatgtctatattaacattaatgataaagaggatgattcaatagtcattgtattagctctcatgaacaaatcagtcaattcaagagagattgatgcaggagactctgttgagtataatatcttcattaatttaagcggatatcaaggccctgtaaaggttgaagaccttttcaatgatacatttgcattggataaggacactatctcagagaattggcattatgatgaaacagaaaatgctttcattttcgatcttagcgacaatccagacaccttaaaccttagcttcaatgttacaatcaatgaaaaaggcaattacactaaccttgctaagcttatattaagttcagattatcctgaaatcacagctgaagctccagaggtctgtgtctacaagccggatatgacagtgacaaaaacagtaaacgacactgaaatatatatcggagatactgtaaaatacactgtcactatagataacactggagatagaactttaacaaacattattgtcaaagacgaactggaccctgcatttatactggatgaatcctctatcactgaaggctggacttacaacaaggacaattcttcattcacttacaacaataacataagcgttggagaaagcgccatcttagaatttattgttgagataagcaaagaaggcaaatacacaaatattgtaaatgtctcaagtccaggagttgctaataaagaagctaggtctgaagaaaccgttgctaaaactattccgaccaatatctgcctagaaaacgtgactgccgatccagacagttttgtgagaataataatcaacataactgcagataaaggcttaattaatggaacagtaaacattactttccctgatgggacaaatgaagctgtagaaatcacaaacggaattggagaaacagtctggtatgttcctgataattatgcttcaggaaactacagtgtctttgcatattatgaaggcaatggaacttatttagaatctgaaggccaaggaaatattgaagttattccatattacactgaaataagcctatctaatgtgactgcttatccagacagtgatgtggaaatagaaatcaacataactgcaggagatgctaagcttataaatggaactgtaactgtaagtttcccagacggcacaaacaaaactgcagaaataatcaatggtacaggaaatgtaaattggactgtaccagatgattataagggcaattattccataagcgcaagttatcctggaggtggaaactatctggattcaaatgccacagccaatattgaagtcatagcaaagatcagtactcaaatcacagcagacattcctaatgcctatccgggagaggagatagatatttctgtaaatgtcacagcagataatgatgtaccattcaatggaaatataacagtgaatctacctgatggctctaaagaaactgtagagattaaagacggaaaaggaaacatagcttggactgttccagacaatttggatgtaggagattataatctcaccctcactttcgatggagataataattacctgccttcaaatgcaacaagcaccctaacagttgaaaagataaaattactcatcattatagataacattactgctcatccaaaagaggatgtgactatttctgttaatgttgctatagatgatggtagtgagtctgataattcaactaaaggttctttatctgataacaatctaaataagggtgctttatctgataacaatctaaataagggtgttttatccaataatgataataaggctttattaaaggcttatatcagttcagctaaaggcattctatccagcaaccatcttaatgatggagataatttcaacggctatgtcaatataaccttaccagacaattccaccgttgaagttcaagtcaaggatggaaaagctgctctcaattggactgtaccagagggatacgaaggtgaatatccaataaaagtcactttcaacggcaatggaaaatatctatctgccagcgagacaggatacattacaatcgaaaagatcccaacttcaatcgaccttgaaaacattggaacaaagccaaacagagaaatcataattccaatcacaataaaaactgatgatgacgttccattcaatggaaaagtaagtgttgaactgcctgatggcacaattcaaacagcagaaatcacagagggcattggaaacacaacatggactgttccagatgattataatggagaatataattatacagtaagatttgaaggagacgaaacctacctcccatcaaacaatactgctataattaaggttgattccaagatcccagttgaaataattgttggaaacattacagcaaaaccaaaagataaggtgacaattcctattgaagtaatcactgcagaagaatccttatttaatggaaatgtaactgtaagattgccagacggaactgaagtcactgcccaaatcactaatggtgaaggcagtgtggaatggacagtcccagaggattataatggaacttattccgttagcgtaagattcgatggagatgatacattcctagaggctgatggaactggatttattactgtaactccagagactccggataatccagtgcctccaataagtccagtaagtccagataatccagtagctccagcaaaacattcagctaataagccgatgccaatggataaaacagctccaggtaatcctataatggcattgttaatagtgctttcaagtttaatttttgtaagaagaagtagaaaataa

SEQ ID NO: 32 - DNA, 978 bp, Methanobrevibacter ruminantium
  source 1..978: mol_type = genomic DNA
atggactttaataatttcaaatatcttgatgaattgattcatagtggtgcaaaggaaataaatctagactcagacataatcctagaggacaaagaagagcaaaaatattcagatggaattaaactgaacatagacaatctagtcatcaatggaaatggccatatcattaacgccaaagaaaaaacaagaatattctattccacagcccaaaacatcacaataaaaaacattagattaaaaaatggaaaaacaaatacaataggaggagccatatacaacctaaagggcaaaataaaaatcatagaagccacaataaaagaaaaccaatcaaaatatggcggatccatatacaatgacgaaggagaaatggaaataataaagtccacattcacaaaaaacaatgccaaatcaaatggaggggcaatccacaactataaaggcaagatgagcatagaggaatcaataataaatgaaaacaccgcaaagcaaggaggagcaatccacaactatagagccattctaagcatagaaaacaccacattaagaaaaaacgatgcaaaagactttggtggagccatattcaacgatggcaatgagttaaaaatcaccgaaagcacaatagaagaaaacacatcaagccaaggaggggcaatatacaataatattggagaaataatcataaaaaactccacaatcacaaaaaacatagcaaaaataggtggagcaatccacagctggaacaaattaagcataatatcctccacactcaataaaaacaaatcatatgagtatggcggcgcaatacataatttcgatggagaaatattcatcaaagactccataatcaccgaaaacatatcaaacaaaggtggaggaatattctcaaacaataaaaaatacaaaattacgacttccaccatcgaaaacaatgaatctgacaatatccatgaaatagactcatttttagacatggattga

SEQ ID NO: 33 - DNA, 1098 bp, Methanobrevibacter ruminantium
  source 1..1098: mol_type = genomic DNA
atgagcaaaagttttagagaccttgaattattgatagaaaattgcgacgatgagatagttttggattcagacattgttttaggagatggtgaaggccctatttacttagaaggcattaatttggatagtgatgtaattattgatgggaatggacattcaattgatgcatgtgggaaagtgagaatattttattcttcaggagaacttacaattaaaaacattagcttattgaatggatactctgatgaaagcggaggtgccatagtggtagatgggggaaagatggacataattgattctatcatctctggaaactattctgctgatgatggaggggctatacacatagaggaaggtgaattggcccttataaactccacagttaaggagaataaagcaaaggaattcggtggagcaatcaataattgggacagcttgaagattgtaaactgtgaaataagctcaaatgaggcacgttttggtggagcaatccttaataatgatggcaatttagagataagcgattctctttttaaagacaacaaggcagataagggaggagttatctataatcaagatggtgacttttccgttgaaaaaacactctttgagaaaaacaaggcatctgctgatggcggagtattctataatgaaaattgtgatataagcgttattgaatccaaattaaatgacaatcaggcagataaaggtggagttatctataataatggtgtctttatcataaaggactgtgaacttataaataatagggcaaatgatggaggatctattgtcaattatgaggcagagcttaatgtaatgggttccagtcttagtggaaatctttctaattatggcggggccatatacacttatgatggtgagatgagcattgacgagtctagatttgatgataatagggcagaatgtggtggagctatctatagcgaaaagtgcatctgggatgtttctaattcagagtttaattcaaataaggctaaaaactctggcggtgctatattattgaagaaatctaaatatgaagttgataatgttagttttagggataatgagcctgatgatgtttcaaacttttag

SEQ ID NO: 34 - DNA, 276 bp, Methanobrevibacter ruminantium
  source 1..276: mol_type = genomic DNA
atggatgacctaattaccactgcaggaatgtatggagagccagtaagctcaagaaaaggaaactatatagtggaaggtctctttggaaagcctatttattatatagacggagatatagtaagagaaaataatccgtttggaaaacccgtctatagaatagaaggaaactatataaaagaaggaatgtatggaaagcctaaatactatattgatggtgacttgattagggaaaataatcagtttggaaaagtagtaggccgaaaaagaaaattttga

SEQ ID NO: 35 - DNA, 273 bp, Methanobrevibacter ruminantium
  source 1..273: mol_type = genomic DNA
atgaaatactgttttaaatgcggagctaaattgatagaagagaaccaaaagttctgcatagaatgcggttccaatctggaaaagcgtaaagaagagcacaataaggatttaaaagagtcccataagaaatacaatccaaaaaagggcgaatcctataatgattatctaaatagaatcgactcaccaataaaagacaaaatagcaacagaagatgagataataaaagaaagcattgcctataaagaatacaatccgctaaaaaaaagagtctga

SEQ ID NO: 36 - DNA, 1815 bp, Methanobrevibacter ruminantium
  source 1..1815: mol_type = genomic DNA
atggattttagagaggaattaaataaaatattaaaatctgatgatgaagaaaataataatttaaaatcaactgaaaacaaaataaaagacaaaaaagaagacaacaacttaaaaccaatcgataacaaaataaaagacaaaaaagaagacaacaacttaaaaccaatcgataacaaaatcccaaatgaaaataaagaacctaaagagaaaaaaactccacagaaaactgatgaagaacgaatgcaaaacagacctaaagaaaccatagaccatctaaaaagatttaaagaactaaacaccacaactgacagcatatttaatataagtccataccaagtcctaatcatcctaaaagatggaacaaacatcaccgattggaaagagatagaagacaaaaaggacattctctatatcagtgaagacctgtctggagagagctatatatcaaacaaatatagagacctggaaggaatgcgccttatcatagcccaagggattacaagcaaagtccaatttatcgaatcaatgtttgcagactgcaagtccctgattgacgtaatcggacttgaaacatgggacacttccaatctattaagcttggagaatatgtttggaggatgctccagcttgacaagctgcgacggtctaaggtatctggatgtctctaacgtcaatgacatgaccgccctattcaatgactgttaccgcctaaatgacatagattcactaaaggaatggaacacatccaatcttacaaagatgtggagcatgtttgcaggctgcaaatcattaaaggaccttagaccaataagcaattggaacacaagcaatgttacaaacatgaccagtctctttacagaatgcgaatcattgaatgatataaatggcatcagatcatgggacagctctaatctaaaagatatgggaagtctcctttggggatgcaaatccttaactgacatttcagccttaagcaattggaacacaagcaatgttagaaaaatggggcgcatgttttggaactgcgaatccctaactgacatcagcccattaaaggattggaacgtctcaaatgttgaagacatggtctatatgtttgtaaactgcaaatccctaaaggacctcactccgctatctaactggaagccttccaaagtcataataatgagaagcatgtttgacggatgctcctctatagaaagcctgaatgggcttgaaaactggaatctggaaaatgtcacaactgtagagaggatgtttgacagatgcaagtccttaagtgacgtttctgccttaaagtcatggaatctctcaaatgatgtaatcgccggaggaatcttcaatgaatgtccgaatgtgaaggaaaatccccttaaaaaagaaataaaagacaaaaataagccattgcaccatattgacctaaatatcaagtttctagacatctatggaacaggatggtgcctggtcaagctgggagacatctacagcagggcatcatatatcacagatgtgccctatgattgccttagctcaatagtaaatgcaataaagaatgatgaaaacttccatgttgacttcaatggagagggatggacctttgatgttgaagcagacaatgaacagtgctattttaatttccatggaggagaaaagcatgcatttgacacaatgaacaagtatgaccttgcaattgtaatatatagaaacataagggacaacctttcatcttggaagggatggacacatagggacttaagtccattgcttaatgagctatgctccctgattaatgagaatgaagcagatgaaaattaa

SEQ ID NO: 37 - DNA, 1344 bp, Methanobrevibacter ruminantium
  source 1..1344: mol_type = genomic DNA
atggaattactcgatagattaataccaaaatacaaagatatcaattggatgaaaagaattgatataataagaaaaacagatgaccaagcccttttagaggagattgcccgaaaggaagaagagggaatcgttcgaaaatatgccgtaaaaaagatcaatgaccaaagcgtcctaatcgacattgcctacaacgatccccattgggaaagctccagtgaggctgtaaagaaaatcgacaatcaagacgtcttaatcgatatagcatatagcaagcttaaggccagccctagaagcaaggcagcagaaagaatcaaagaccaaaatgtcctaatcgaccttgctcaaaatgacaaggaatatcaagttcgccgtgcagctgttaaaggaattgatgaccctttcgttttaaaagaactggccttaaacgacccggacagttctgttcaaatggaagctgcaaaaaaaataaatgatggtgaagccctagcagagattgccctaaaagaccgtagcgagtttaaacgattggaagccaccagacatattgatgatgagaagatcctatcccaaatcgtcctaaatgacccagatttctatgtcagactggaagcatccaaaaagatcacagatgaaaaaaccctagcagagatgggaaagaatgatttttattggcagattcgttcaaatgcccttaataaaatcaccgatgaaaaggtattggcatatatggcatgcaatgaccctaatccaagcacacgttacgaagcagtgaaaaaaataaatgataaagctatcttagtagatatcgccctcaatgcattcgattggaaagtcaggttatgcgcctgcagaagaatagatgatgaagaagttatgacaaaaatagtcaaaaaagacacatgttggagaataagaaggaatgcagtgggcaaaataactaatgaaacatttttagaagaaattgcctttaatgaacctgcctggagagtcagactggaatcaataaagaacattgaagatgaatctgcattgatttatattgctttaaacgattcaaactggcatgtcagaaggcaggcattaagcaaaataaaagataaaagtattttagaagacatagctcaaaacgacccaatatttgagcttagaaaacttgcagtaagaatgataaatgatgagtcagttctaagaaaaatagctaaaaatgacccagaatggaaaatcagaagacttgcaattagaaacatagaaaacacagatattttaaaagatattgcaatgaatgattccaatattgatgttcgtttagctgccagtgataaaattactgataaaagtgattaa

SEQ ID NO: 38 - DNA, 1917 bp, Methanobrevibacter ruminantium
  source 1..1917: mol_type = genomic DNA
atgacagctcctgatagtaattacgaaacaatggcagaaatgaccataagaaactccattatagaaaataacagtgcaaggaatggaggggcgatcctcaatgatggaaatctttttattgaaaagacgacttttaagaataatcttgcatttactgccggagcaataagcaatggaggatatgtttccttaaaggatgtttcaatggaaaataacattgcagttacaggggctgccttcatcaatggaggagatgcgaagatagaagacagctttataataaaaaacattgccataggtgaaaaaagaggaatgaacggcgaacatgatgtcggcggagcagtcggtaattcagataatcttttgctgaaaaacacttccttcattaataactcatcaccttttggaagtgcaatatacaatttaggcattgatattccaaaattaaaatatttatgtaaaataaaaatagaagactgcagatttgaaaacaatagctcccatataagcggtgagattcataatgagataggtgaaatatcaatagatgattccaaattcaaaaacgaaactgcaaaaagaggatcagtcatatacaatgacagttatctgacaatcacatcctgtgattttaaagacttaaaaaagatagttcataatttcaatctcatgacaatccacagctctaatttcgagtcaaatcaatcagacagcgcagttattgaaaatgatggggaaattggaatcttaagcattgaaaaaggaaaaatcgccaataatatcagcgattataccactgtctataatcatggaaaggattgcaacattacaggaactatttttgaaaacaatcactctaaaaaagaaaattgccataatatatgcaataggtccaatatggtcttaaaagaaataatcctaaaggataagactgtcagcatttttaatgagggaatcctaactgccgagaaaaaatataaaaactttattttttccgtaggcaaggttttttatcttggaatggaaaatgagtttaattttagctatttggatgagctgattcattctaatatatccgatacaatttcttttgatgaggacattagcttgcttagcgatgaattcgatttttatgaagggggaatcgaacttgacagggacaatatggtgattgatggaaagggcaagacaatcgatgcatcaggcaggtcaaggatatttttagttacaggaaacaatatcactcttaagaacataatatttaaaaatggacacgcttttgacaattatttcatgtcaaacaatgaagggggagcaataaaggtttataaaggccttgatttgaaaatagaaaactgcaaatttatcgataatatttccgaaagcaagggaggagccataaataataaaggacatcttacaataagcaatggattatttgaatccaacaaatcaaatgaagggggagcaatatacaatcatcagaaattatccataatagatacttgctttaagggcaatgaaggccatattggaggggcaatatataataaagaagatttagagattgtctcaactaaatttttaaaaaacattgtcaaagaatcattatttaaggccaggtttattccaatcctccaattagaagatgaatcctttggaggggcaatttttaataaaaaaagaatggtgataaagcaatcatcatttaagaaaaatatgggattggatgatactgatggcgcatggggcggtgcaattcgaaccattggcgatgaagaggttacaataattcagacagagttcattggcaattatttaaaggacagcaattttggaggagcaatatcttcctataaaactccaaatctgattgattgcactttctcggacaattatcctaatgatttaaattag

SEQ ID NO: 39 - DNA, 1350 bp, Methanobrevibacter ruminantium
  source 1..1350: mol_type = genomic DNA
atgggaatggtattgaaaatcaatgtaaaaatcggagattccgttaaaaaaggtgatgtagtctgtattttagaggctatgaaaatggaaagtgagatttttgcagataaaagtggtgtagttgaaaatatacttgtaaatcctggagatattgtaaatcaaaacgatttgataatgataataggggattctatagatagagatgagaataaatcaaacaaagaaaacaagcccaaaccaaacaaagaagaccctaaagataggaaaaatgaattttccaaatccaagaatgataaaaagataaacagtccaaatgaaatgcttgataagctaaaaaataatataaaagtggataaaattctttttgttgacggagcaaacatttccattagccccatagccgaagctatctttaataaaaaagtcaaaggcattaaagcttactctgcaggtttatctgcaatcagtggaaataaagccgttccaaatgcaataaaagtatgcgaaaatcatgatattgacctatctagccactgcacagcaaatattgaagattatgatttagatgattctacattaattttaagttctacaacctatatcagaaatatcttaaaatattattatcatgtttataaagttgtaaccattaatgaatttgcaggattttctaatttagatattcaagacccgttttggtctgatttggatgcctttgaaacttgctttagcaagatcaatgatgcaattgatgaaatttttggactaaatagtttagaaaaggacaatatggcctttaactgcgaaatagaagaaaataagaacatacaatccaataaagaagaaaacaagaacacaaccataacctccaataaagaagaaaacaagaacacaaccataacctccaataaagaagaaaacaagaacacaaccataaccgccaataaagaagaaaagaatacacaatccaataaagaatatctaaatgaaaaatcctccaaaataaattctttcaaatatttagatgatttaatacatagcaataaaaagaacatcactttagattcagatattattcatatggaaggagacagcccaatcattctagatgtggatgatactctaattgatggcaggggccatgccatagacgcaaaaggaaaatgcggaatctttaacatcacagggaaaaacatcaccatcaaaaatattgttttaaaaaacggatttgtcgagtctgatggagtcatttgcaataagggcaaagttacgctggaaaatatatcagtgcaaaacaataggggctctaaatatgagggcaatgcaatagtcaataaaaaaatatcctga

SEQ ID NO: 40 - DNA, 1236 bp, Methanobrevibacter ruminantium
  source 1..1236: mol_type = genomic DNA
atgccaagcaaaataatcaaacgtgaagcttacattcgtgatttaaaagattatgttaacactgattttgttaaagtatatataggaattagaaggtccggcaaaactagtttaatgcataatatcatagacgaacttaaaagagatggcgtaaatgatgaaaatataatattcatgtcctttgaatcaagagaatatatccacatcaacaacagcgagcaattagatgaactcgtctataagaaagttgaaaatcttgaaggcaaaatatatctattttttgacgaaatccagcaagtaaagggatgggaaaaatccattaatagctatagggtttccattgacagtgacatatacattacagggtctaattcaaaattattgtctggtgaactggcaacactattgactggaagatatctcacaatccatgtttatccattctcatttaaagagtttttacaatataaaaatgaaattgagggtgttgaaataactaagtattcaattgatgaattatatgaggaatacttcaactttggaggcatgcctggtattctctcattaggcagtgatgagtttaaaagattggctctgaaagacatttataattcaatattatttgaagatgtggtttcacgatttaatattagcaatattgacctactacaacgtttctctcgctatatgattagtagcactggagaaatattctcatctaaaagcataaaaaactatttaaaaagcaatgatatctatacttcagaagacacattgctcaaatataatgaatacttaaaacaatccttcttcatttcaaaatgcaaatgtttccatctaaaaggaaaaaaagaaatgaaaatccttggaaaatattatttaaccgatcatggctttcatcatgcattaatcgaagataatatattgaaagtaactaaaatattagaaaacattgtttatgtagaactattaagaagaggatacaaagtaaatgttggcagaaatgaggataaaacagaagtagattttgtatgtgaaaaatctggcaaatataaatatattcaagtctcctatagattgacaagcgagcaaactctaaatcgtgaaattaatccattattaagaatacctgataaatacgagtcaatattgataacaacagaaaatcatgatttttcaaaagacggagtaaggcatctaaacattgttgattttttatgtggtgatgatgtataa

SEQ ID NO: 41 - DNA, 3135 bp, Methanobrevibacter ruminantium
  source 1..3135: mol_type = genomic DNA
gtgtctgaaaaatatacagttgcagaactaaaatacattttaaaggaaaacggcttaaaggtttcaggaagaaagccagatcttgttgaaagggttttgcctatcttaaatgctgaagcaagtgaagaggccgttgaagaagttaaagaagaagttaaagaagaaactgttgaagcagaaattgtagaagctgaagaaaaagctccagtggatttgactttcccagatactgaggaagcattaagctccatacttgctctgtatggactaagctatgacgatttatcaattaaagatatagaatttgccgatggtaaaatttgcataaacggtgaagctttcattcaaaacggtttaagcatgtcagattctaccatgtcaataataaatgcagatccaactcttaatctgacaatgaatattccagaagtcgcctatagtgactttgaaagcactatctttagatttaaagaccttgatttaaatcttattcctactgatgatagtcttgagtttaaagcggctttgaaaggcttggacataatgactgatttgaataatataatcctaaagggccttgatttcgcattcaagtctttcccagataggggtgtagaaataggtattgatatagacgatttcatttatcctaatttttataacacaagctttaactttgaaaaccttgatttcaatatggcaataggagtggatggacaaagcattgccatatcagttaatttgcctgcattagacctactaaacaaagactatagggtaaaattatctgatttaagtctaaatctagtgctctctgatttgcaattatcagaccttgacttatccatagcaatatcagatttccattacacaaactttgatgatgttgtcatttatatggaggacataggtgtatcacttgaacatattccagatacaaacagcttcaatgtccttattggcttgagcgctatggatgcagttggtttaaattcatttgatgccttgttcccaatgatggaaatcactggagtaaactttaactctaaggattcagactcactaattaactttacaggtcttatatctcctatagatcttactcaaattgatttattagagcttggcgcccttttaggttcaggatttgaccttgacgcctacactagaaatatggcatattatccagacattgcaagtgaaggagcatcagatttaggtattccaggattggatttaggtgccatagttgcaaactgtgactattcatgtttaggcgcaatcgagcttaatctaactggactccttgattcagcagatattgatttatctgatttaggcattgacttgtctgattatgatatttcttcaatcaaattgtctgaccttatcggtgctgtaggagattctgagtttgttatgtctgccattccagctgtcttaaacatattctcacttgacttaactgacgttgacgtctctggattgatagctgactttgacgaagagaactttgatatctcttctttacttgctagccttaatttatcaagcacagatattgctgctattttagatatcttagataaatcagatattgatttaggagccatatttgcaggctgtgatatttcatgcttagatgcaattacccttgacttgactggattcattgattcattaggcattgatttgtctgcatttattgatttatctgaatttgacttgtctgcagttagcttaactgatattattgccatattaaacagttttgaatttgatatgtctaccatttcagctctcttaaagatattcggccttgacataggagatcttgacttggaaggattgatagcaagctttgacactgaaaactttgatctctctactttgcttgcaagccttaacttatctgacttggatattgatgctattttagctatcttcaataatccagacttcgattgggctggcatatttgaaaacagtgacttgtcatgcttagatgctattacccttgacttgaccggtcttctagattcagcagagattgacttatctgccttaggcattgacttatctgattatgacctatcttcaatcaaattatctgagcttattggcgtatttggaaatcttgactttgacatgtctgatatgatatctggcattgacttcgaaagcattgactttgagaatattgacttggaaggattgatagctgactttgacgctgagaactttgacatatccaccttattggaaagccttaacctatccagtacagacttatctgccattttcgacatgttcatcaattcagatgtcgatttaggcaaggtatttgaaggctgtgactattcatgcttagatgctattgtgcttaatttaagcggacttcttgattcaataggcattgacttggctgatttaggcattgacttatctgattatgacctttctgcaatcaaactctctgagcttatcggaatcttaaatggattcgatttagatatgaacactttatctgctctcttgaagatatttggaattgacttagaagagcttgacttgtctggtcttatagctatctttgacggcgacaactttgatatgactgcattgttatccagtcttaatttaggaggtgtggatatttccgctattgtagagctatttgataatttaggctttgatttcgatggcatgtttgaaaacttggatatttcatgcttcgatgcaatcacccttgacttgactggactcattgattcaacaggcattgaccttgctgctttcggcatagatttgtctgcctatgacttatctgcaatcaagctgtctgatcttattggtgttgtatgcagttctgagtttatcatgtctgcctctggtgctgtcatgaagctattcaatataaatgtggatgaccttgactttgatggattgattgccagctttgacgctgagaactttgacatatctcctttattagaaagcattgagctatctggatttgacatttcagagatgttggaaatgtttgatatgaatggatttgacttatctcagttcttgaatcagttcataagctcatttatggagaatgctcttttggaatctggtgatgaatga

SEQ ID NO: 42 - DNA, 294 bp, Methanobrevibacter ruminantium
  source 1..294: mol_type = genomic DNA
atgctaaaaatcgatgaatttagaatggaaatggaagagcctaaaaggatctatacagaagaactaaagaaattcgctaaaaaatacgattttctaggggattttaccatagtggaagagcgagacattgatactgcagattatttcttttgtttcaataatctaaatggaacaagcgatgaaactctatattccacacgtgatgaaatctatgatcatatgattaaattttgcgaagataatggaatcgatgaatttagcaaaaatgcatacatcttttataagagcgattaa

SEQ ID NO: 43 - DNA, 501 bp, Methanobrevibacter ruminantium
  source 1..501: mol_type = genomic DNA
atgtctcaagaagaaaataaaatgatagatgaagtggaaatgagttctgtagaagaaatagggagggattctgtagaagaaattaaaattggctctcaagatgaaatagggatgaattctgtagaagaaatggatttagactctgcagatgaaatagatatggacgatgtagaagaaatggaaatgaagatagaaaactatgaaaatagaatcaaattgcaagatatattaatagaatctttaggagaaagatgtgagggagaaaaggagagaaataagcaacttcatgatagaatcatccaattaaatgaagagttaaagaaaaaacaggaactggaaatggtaagcgatatcaattattggaggggaattgaaaaagcccatatagaactgcatgataagtactataagaggataatccagcttgaaaaacagaatttcctgcttgaagttgaaaacgatgagctgaaggatgaattagagaggataaaaaatgtttaa

SEQ ID NO: 44 - DNA, 810 bp, Methanobrevibacter ruminantium
  source 1..810: mol_type = genomic DNA
atgggtttgttaagcctcaccatttcctattttaacaaatccgcaaatggagaatcattatgggcgccatttttagaaatgtttagaatgctttctgtagtcttgattctaacatacatagccaccaaatccaaaagttttaaagttataatcagaggccaacagtcccgtaaaaccataatctggcagattatcatattttccattctaggaattcttgcatcatattgcactatggatgtaaatggaatccctgcaaatgcaagaggattgattgtaatgatatccgcattgcttggaggaccatatgttggaatacctgtaggaataatagccggagtctggagatatggcatgggaggcattactgccttggcatgtggcgttgcaacaataatggctggaattgtaggaagtctcgtttatagatggaacgatggcgaattcctaaggccatataaggctgcacttttaatgcttctatatagcggctttgacatgtttctaataaccatattaacccctcaaccaaagggagttcttattgctaatgccctttatgctccaatgacatttggcgctgttcttggaatcttactcttcaccctatttttaactgagaaaaaagaggaagccgaaaaaagcgatgaacaaactgtttctgacaataggaatacagacacacagaatataaatgaaatctcacaagaattgaatgaatataaagataaagttaaaaagttagaacagaaactagaggaatacgacaaaaaatttaatcaattggaacagaaattaaaggacaaataa

SEQ ID NO: 45 - DNA, 306 bp, Methanobrevibacter ruminantium
  source 1..306: mol_type = genomic DNA
atgactaaaatggaatttgatttaacagatgaacaaattgaaaaagtgaaagaattagaaaagagcggaattagtcttggagaagctatagaccttctttttgaaataaaagatgaagcatttaatcaaatggacgaagttgacgaaaatattgaaattgtcagccaaattactaaatcaatgaatggtgaaaaaaaaatagagataatagaaaaagcatatcgaaattatgaaaaaacccctgaaatgaaaatccaagaggttaaacgcaaccttagttggggtagggatttctttaaatattaa

SEQ ID NO: 46 - DNA, 1545 bp, Methanobrevibacter ruminantium
  source 1..1545: mol_type = genomic DNA
atgaatgaaaccattaaggagcactcttggattcccttaatccttgtttgttttgctacctttatcatagctttggatacaacattcatgaacgtcagcatttcctcagttgttgctgacttgaacactgatgtgagtaccattcaaacaatctcatcattctatactctcatcactgcctcattcatgctcttaagtaccaagcttcaggatatagttggtaaaaagaagctctttttaatcggtgctggaatttatggcgtcggtaccttgactgcagcattaagtgccaatactctaatgttatttataggatgggcattgctggaaggtataggcggtgcattgatgacacctactgcagtttccatcataagcggaacctatcagggtgaaaagcttacattcgcccttgcaattgaaagcgcactggttgcaattgcagcagctatcggcccgctcttcggtggggtcgttacaacatacttcacttggagattaggatttgcagtggaatttataatcgtcctgatcgtatttgcactgcagggcaaaataccttatttcgaagctacaggatccaaaagcgaattggacattacaggtgctataatctcatttgtaggtcttgtcctctttgttatgggtattttgatgctaactgatgataccactttcagcatagctataatggctgcaggattaattgttctagcactctttgcactctttgaaatcaaaagaaaaagaaaaggcaacgtaccgttgcttgatgttgaattattaaaagacagaaatctccgtgtaggtactctccttaggctgttggttaaccttgcaatgggcggtgcattgtttgcagtctcagtctatctgcaaagcgtattggccttatctgcattcaacacaggtttgaccttgcttccaatgaccttaggtttgcttctctttgcattgacagccccaaagctatctgcaaaactgaaccacaagatcctcatgtcaataggatgtataatatcaatcataggatgtcttattttaagccagcagtttacaatggcgacatcaatgcttgagctaatgcctggactcttcgtacttggagcaggacttggttttgtaatggctttaggtgtggacattgcattaagcaatattccgcaggaaggtcaaaacaatgcatccggtattgttacaaccggtcagactttaggtcagtctatgggtacagcaatcattggtgtaatccttattctgggcatcattggaggaatcagcaatgcagttgatacctatgtgccggatcagtccggtaatgcgacattcgaacacgatgtctatgagggattccaatcaataagcagcataaacgatgttaaagcagagaacagcactattcagaatattgtaaatgtcattgttagagattccatggcgtttgtaatgtatgtaacgatggctctgatggccataatctttgtcttgacattgcggctctcggataaggagattaaaaaaccagataaacttaaaaaacaatga

SEQ ID NO: 47 - DNA, 735 bp, Methanobrevibacter ruminantium
  source 1..735: mol_type = genomic DNA
atgactactactaatgatcaagatgaatcaataagcgaacatataaaaaaagcgttctccttgaaggaagatacggcctctaatgaagagattcgctcccgccttttagatggaggcaaaatcacaggaacaaacatgcgcgttctggtatgtgctatggtgattgcatctgtagggcttaacatgagctcaactgcagtaatcatcggtgccatgctgatttcacctctgatgggaagcattcttgcctctgcctatgcaagcgtgaccaatgaccgtccccttcttggaaagcatttaaccggatttgcaatgcagattataataagcgtaactgcagcagccatcttctttttcctctctccagttaaggagccaacagtagagctattggctagaacatctccttcattttatgatgtgttaatcgcattcttcggaggacttgcaggaatcataggacagaccaggtcagataaggtaagcacagttatcccaggggtagctattgcaacagcccttatgcctcctctatgtacctgcggttattcaattgcaaacggaagatgggacatgcttctaggagcaggttatttgtttttaattaactgctatttcatattcctctcatcaagccttattttaagtgcattgaagattccaaaattgaaggagtatacagaaaaagaatggaaaatccataagtggagaatgagttacggaatactattttaa

SEQ ID NO: 48 - DNA, 3006 bp, Methanobrevibacter ruminantium
  source 1..3006: mol_type = genomic DNA
atgggatttatagataaattaaaaaaaggaataggcagaaaaaataaagaaaaaagctctaaaagagatacccaaaaggacactggattgaagaggaaatctccacctattgacaaggcatcttttgatggtagcgatgaggaatacaaattatttgaaagcataatgtcctatagggacgagccagtcgtccatagtatcttaagaaaaataagtgacgatcgcctattgattgaaattggaaaatcccatccgtttcttgaacttcgacgtgacgcaatcctaaagataaaacatgcctcaagagaagacttgattgagctctttgaccttaacgaggacagatggggcatcggattaagaaacgctatcgcaagcaagttcaccaaagagcaactaatggaaataaatgatgaaaggaaattgagagagataatacgatattcaaatgaggaaaatgcaaattgcatctatgacaagataaatgatgaggagcttctcattgatatcgtatgccttacaaggtatgaaagcatacgagacaagtttgtggaaagatttaaaaacgatccagaagtgatgagaagatgcctggaatccagcagaagccctgagcttaagtctaaagtagcccaatacataaacaatgacaaggaactaaagaaatacatcctatcccaaaatgattggaacaacaccgttgaatatgccttaaatgagatgaaggatgagaaaattgcaaatgaagcattatacgaattcgcccataaaggaaagaatcagctcaacaagtcaatagagttcatgagcgatgatgagaccctattgaatattgccttggaatattacaatctggattatgacagatactactttgagattggaatggcccttgatagaatcaatgacgatagccttttagtggacctgatgcataatgagactgatgagactcttcgcaggcttgctgcaaaatacattaaaagcgaagaagcgttaaaggagttcgtcaatgaccctaatgagaacgtgcgcaaaatagcaatcagagccacctgcaaaaacagcctggataaatttatggatctattcaacaatgatgaaatcatccttgacgatcatttcatattggatggggacggcatatatgaaacaatcaccataaatcgggacaatgtgacaattgatgggaaaaaccataagcttgaatgcatcaaccctaaaatcgagcttaggattgaagcaaacaatttcagcataaagaatatagagaccaatatgctgattcgccttaatgaaggctccttaaacatctccaattccatcatagacaagtccattgaaattaatgaggggaacttgactggagaaaactccacatttgacagaagaatcaaaaacattaatggaagcttgaatctgacagattgcaatattgatcaaatcttcaatgaatcttccctaagccttaaaggctgtataataggctccattaagaatgatgattcctgcaatatagataactgtacaataaacgaattcctatacaacaatggaagatgcaagattgaaaattctaaagtggaatcagcaagcagaaattatagcaatccttatgatgggggaggagccatttcaaatgggcagaacgcttcaatggaacttacaaaatgcatattggcaaagaattctaccgacaagaatggaggagtcattaggaatataggctcaataaacctatatgactgcatctttgaagacaataaggccggattatccggcggagccatcttcaatgagggcaggctaacagcttcaaggtgcaagtttaaaaacaatctggttgaatttccgagatatggctcatttagccgcgcaactggaagatatcatttcattaagcatggaaactccattttaaacctggcatttatggatctcttcaactgtcagttcatcactgataagataaatgacgctcctgaaatcattgcccaattcggtaaagacagctatctcaatattgaaaactgtcaattttcaactaataaaaagacttctgttgatgcaatagagggaggattgaactttaataatgcgaagtttaaagtttcctttgatgatgttgaagaaataaacctagcaaatgagggtcctgaagaaacaggttctataaataaaaatcttaaagaaaccagctctacaaatgaaggtcttaaagaaagaagatctacaaataaaggtcttaaagaaacaagctctataaataaaggtgaagaaacaacagtaagctctaaaaatgaagatatagatgcagaaagcattttagaaaacttcaagggctttgaatatcttgatgatttgattaacgacggctcaagtgaaataacccttgactgcaatatccaaatgcatgaactggagcaggcattctatgaagggggaatagaaatctacgaagacaatctgacaattgatgggcaataccatacaatcgatgcaaacaatctctctagaatattccatataaccggaaatggcattgtcattaaaaacatcaagtttaaaaacggatattactatcaggattattttgataattcaaaagatgggggaggagtattatgcataacccatagtgcttcagcaaaaatcataaactgtgaattttcaaataacgaatccagacaatctggaggagtcgtgaaaaacaattcagattccttggaaatcatagattccaactttagagacaataaggtaatctatcaaaaaggaggatgcataatcaataatgcctcattgaccttaagaaactgcagctttaaaaataacttttcaaatgccggatcatgcgtatttaacagtgaagattcatccttgaaaatatttgactgtgagtttaacaataacacttcaaggaaggactttgaagcgggaggagtgagattttcattggaggtgcctagcagcggcggagcaatcgcaaatgagggaagcctttag

SEQ ID NO: 49 - DNA, 1974 bp, Methanobrevibacter ruminantium
  source 1..1974: mol_type = genomic DNA
atgagagacattgaagaacttaaaaagacaccaggactgtcacttaaaagatatcttattctttttattgcaaatcttatcggattgtatctaatcagctttggattggatttcaccgtcaccaatctaggcagagtcataatattcatatttttcataagcatcttcaatgcagcaatatggcctctggtaacaaggatatacatgccccttatggtttggacctttggaatcggagcactccttttaaacggaggggtctttgccttcttcggcccatactttggcttagacatatcaggatggggaatagtccttgccccattaacaattgcccttattacaatcgtcctatcaacccttatggacgctgaggatgatggcacatattatcaggctgttcttagagaagcccaaactaaaagaaaaggagagattaaggattatcctgggctaatcattgttgaaatcgatgggcttgcatatgacgtgctcttggaagctgtagagaaaggagtcatgccaactgtcaagtcaatgattgacaacaaaacccatatccttaaaaaatgggagactgacctctcctctcaaaccggagccagccaagcaggtatcctacatggaaacaatgaaaacatcaccgccttcagatggattgaaaaggaaaacaacaatcagatgatgcagtgctctggagttacaaaggtaaaggttcttgaagagagaatatcagacggtaacggcttgcttgttgaaaatggggcaagcagatcaaacctcttttcaggggatacagacaatgtcatatttaccttcagcaaaataacagaccttagaaagctttacaatggcgcttggttttcaatcttttcaaatccaagcgaattcgcacgtatagtaattttagtcatagaagacatggtccatgagatctattcccaacttaagcacagcatactaaatatccgtccaagaatctcaaggggcatcgcatatattccaacaagggccggaacaaatgtcttcatgagggaaatcaataccgaaacccttattggggacatgctgattggagacattgacgttgcatattcaacatatctaggctatgacgagattgcccaccattcaggagtgagagatgaggatgtatggtttgcccttaagggaatggacaagcagataaggcgcttgatctatggaaacaaatactctccaagggaatatgagtttgtcatacagtcagaccatggccaaaccaatggtgcaacattcaagcaaagatatggccagtcatttgaggactttgtaaagtccttgcttcctcacgagaccaatatctatgcaaagatgtcctcaaacgaagaccactttgcagaggtctacattccatttaaagatagaatagataaatttaaaaacaggaacaagccagatgaggataagctgatttcagagtctgaagttattgtccttgcctctggaaaccttgcaatgatctatcttacccgatggagccataggctgacttatgaagagatcaatgagatgtttccagatatgataagtgaaatagtgaataatgaatatgtaggatttgttttagtccgctcatctgaaaatggtgatatggcaataggcaagaatggaatttattacctggatagcgatgagatagaaggggaaaatcctctcattggatttggagacaatgttacccaacatcttaaaagaaacagctcattccagtacacaccggacattcttgtaaacagcttttatgatgtggaaaatgatgaggtatgtgcatttgaagagctggttggaagccatggaggcgttggaggaagccagtcagagccatttattttatatccatcagattgggacattccagatgaggagattgtaggtgctgagaatatatataggatattgaaggataatttggctaagatgaaagaaaaatag

SEQ ID NO: 50 - DNA, 285 bp, Methanobrevibacter ruminantium
  source 1..285: mol_type = genomic DNA
atggatgtaatggatatgattaaggaaatagaaactggaaatgactattggcaggaaggcttggattatcatatggattgtaaagtaacagtgaacaatgtccgcacaagatgcgatcaagtcagcatagtgcaatgtgatatgtcaaagtatggcaagggcatcgagcttttgctggaacttcgaagaggagatttcataagctggatatatcttgacgatgttgtatcatttgatgtgcagatgatggataatgtcttaagggaggagaaaaagaatcattaa

SEQ ID NO: 51 - DNA, 258 bp, Methanobrevibacter ruminantium
  source 1..258: mol_type = genomic DNA
atgatcgatgaaatgatgaagatagaacaatttacaagccattgctgctttgtagatgaagagggcatgaattcagttgatggggacttcctcactgccatcgctctatgtgtgaactttatgtataatttcatagacattcaaaacattgaatccggcagcgaggatgaggatgacttgaactttcagctcatcatgaacaagatagaatactaccaaaagatggaagaaatatgcaaaaaatataaggaggaataa

SEQ ID NO: 52 - DNA, 687 bp, Methanobrevibacter ruminantium
  source 1..687: mol_type = genomic DNA
atgaataaaatcaacatcctatcagtatctcgccttagaacatatacagatggagatggaataacaagccttgtagcaactatgggatgtccattaagatgtgcatactgccttaatccaagctcatgggatggtacggcctatccaaaatccttgactgtggatgagctatacgaagagctaaaaagagacaatatctactttctctcaacaggtggagggatagcattcggcggaggagagcctctcttataccataaattcataaggaagttcatagaaaagtacagctccaccaaatggaaattctatttggaaagctccctatcatataagacagattccttaaaagatataatcgaccttatcgactacttctatatagactgcaaggacatggacaagaccagatatgagctatacacaaaaggagactacgatctcttcttcggcaatctaatctatctaaaggaacatgtggacaataacaaaataaagataagagttccaaggataaagggattgcataaatctgatgaagctgaatcaaaccttaaagtgcttcaagagatgggatttacaaatatagaaatatttgactacattgatgatgttgaaatccataagccaatatctgataaggccataagaaacaaaaaagactttttagaaagaataaaagaataa

SEQ ID NO: 53 - DNA, 480 bp, Methanobrevibacter ruminantium
  source 1..480: mol_type = genomic DNA
atgaatggcagggataaatgcgaacttctaaacgaagtccggcaaaggatagccaaagcgaacaatattgaatttgactttgaggaatgcacattcgaagggaactgcagcgggacatgccctaaatgtgaaagcgaagttgcataccttgaaagagagcttgaaaaaaaacaggacaatggcgaaaagatagacattgaaggaatattcacattaaaggaaaaagagcctactaaactattatgcaaagatgtctttgtgccttttggaaattttgaacctgtaagacctaaaatggagattctagaaaagagcccatattgtgaaactttcggcgatatagagtataaagattatgcttttacataccttaaaatcttttatttagggaatgatgaagagatagtgcttccatataatgagaaggaatatgatggagatataactgtttttgaaatcaaagaggacgaatatgaataa

SEQ ID NO: 54 - DNA, 552 bp, Methanobrevibacter ruminantium
  source 1..552: mol_type = genomic DNA
ttgtatcaatggtgtaatctatttggaaaaatccatcgtggacaaaattatgaagatattaaagaggataattgcaggatgctcttagatcttgttaggaaatatccagaacattctgatattatttaccttaaaaaagttaaagatatcggcacatcttcaaaaatggataattctcttgatgagcgtattaatcaaatggaagaagctcttaagccagtccatgatatggtggatgatgtttattcatgccaaataaatgatgatttaattaatttagatgattttgtgccttttgaattcctttctgaatatgcatataaaaaaaggttttggttgacatataatgaaaaaccggatatatttgagctagaaacctcttatagggataagatttatagttttgattctgttacagaatcagtgatatttgttatggatgagatgaaaaatttcattgataagtatcctcaatattctagattgattccggattacagctcttttattaaatataaagaaaaacttatagaggagtttgagggtgaataa

SEQ ID NO: 55 - DNA, 177 bp, Methanobrevibacter ruminantium
  source 1..177: mol_type = genomic DNA
atgaaaagtgaattagtgccaggttatgattttgaatacacttacgacggtgtgttgctgattgaatatgacacatatcattacaaaaactatgaaatcaatagggtttatttggaagatcacattgaaaagttaataaaattgcctgatgtttatgtgatttgcctggaacagtag

SEQ ID NO: 56 - DNA, 219 bp, Methanobrevibacter ruminantium
  source 1..219: mol_type = genomic DNA
atgaatgaaaataataagaaaataaaagaaaagagcgctgaagactattctgatttagattcttttttagaagaggtttttggccctactgatgatatagagtggactgaagagaaacgcaaacgttttgaggaaataaataataagtgccctttttctcctacccgtaatgaatggccgaatataaaaattcatagagaagaattaaaagaagattaa

SEQ ID NO: 57 - DNA, 2058 bp, Methanobrevibacter ruminantium
  source 1..2058: mol_type = genomic DNA
atgaccgaagaaataaatgaaaaaataaacactcaactcgaagaagagatcaaaggattcggcacacgtgtagtagaaatatttaaaaacacaaaatcaactaaaaaagaaaatgaagatcctgaagatgataacactaaaaaatcacaggaattcataactgtagcagaatttaatgagttcaaaatcgaaaccctcgagtttgtaactgaaatgaacaataaggccaataatcttattaaagcctctgaaaaattcggagaccctgaagatgactatgctgagattgtcaataaagtagatactttgttgcaaggattgcataatgaacttttaggcaaggaaattacaattgaagaccgattggacaagaggaacacattagtaagaatgtcattgaaagtgcatcagtcaaaaaggattctaaaacttttagacaaacagtcacagatgcgttctgcagaagaaaataatcttaaaaaagacttgagcaaatggttccacaaactggaaagaagaatacagaacctcatagacatctactatgaaaatgaactgttcttcctccatatcaacaaggttaccactatcgtagaggatatgaagccagaatacaataccatactcttgaagcatgggttgacagtattctacaatgcccgggaaactgccaccacattgtacactattcaacagaaaaaggtttccagtaagacaggcctctacgaaccaaaaatcatgcgagaaactgatgtcggattgttccgtaccaacccagaaatagaagacagcctaaggtacagcacatttcaagctagtaattccacattgattcgtgttagtaaaaatatcaccaacaacctagcagatagctaccataaaggattaggaatcgaggatgttgggcataagattactgaggaattcactggtttgaaaggttggcaagcaaagcgaatagcaaggacggagattaattccgcaagcaatgtaggaacattcagtgtttacgatgaacttggtgtagaataccatatgtggtggacaggcaatgatgcccgtgtaagagattcacataagcctttgcatagccatatagtagcagttggtaacactttcagcaatggcttgttgcatcctggagacaaatcaggacccataaatgagtggattaattgtcgttgcactagtgtgccctatattattccgttgggtatgatggcccctccaggagtaaaagagtttactgaagatcaactgatacctattccagattatgattctagtaaagatagaggaaaaatcattaattcttcatcaaatagttttaataatgtgttgaaagttccaaataataaattaaaaaaagaaggacataattttagaaaaaaagaactggaagagcttttagaacttaaaattcgtgaaaaatctctaaaacaacccattataaaatccgataacactccattagttgaattagagcatcctatactaaaaagagaattagacaattttgacaaatttttagaagataaagatattgaatattttcaaatgtatacttttgatggtagggaagcttcaaaattgtatattggtaaaatgcatgaggttgatgtgcctaatgaagaaataattgaagcagttaggaaaggagggaaaatctcagtacataatcatcctactaattttgataatatgcattctatttcagatatttatactcaaattgaaacaggaatagaattaaatatagttaaatcatatactaaaaaatatattgtagttgcagaagatttatcttctaaagaaagaaaatatttacttaatcaattagaaaaaattgaaaaaaaatataatgaatttatagaaaaagaaaaaaaaccttatttaagaggattggataaaatagatttaacagttgctgaaagagaatatgccgaagaaattatacatcaatatgtagtaattaacaattatgataaatatgaaaaagtgatgagttatttctttaaagcgaatccaagtattgatttatatgtttatgatatttag

SEQ ID NO: 58 - DNA, 498 bp, Methanobrevibacter ruminantium
  source 1..498: mol_type = genomic DNA
atgctacccgtattcataccaaacttaccggattgtgaataccaatatggggaaaagcccttgaccgcagatcaaataatccaattcgcaagggattatgaagaatggctgatagttgaccttgaacatgaattcctctatactggccaggtaataggaacagtaataaaatcacatgttaacacagaaccagtcaccgtgaaattcattgacagcacaccacgagaatatcctaccggcacatggtttgttacattgaaaattacaaaccaagatgtgattcaaggaatacataacgaacactataccggcggaagtgcaaccactatcgaaagagaagatactgacaagctaaggaaaatcttaaatgttccaataacatcaacaacaaagtcaaaaatcaaacgcatacccataagcgagattaaaaacccagtggtgatcactataagcattgttcattctccttgtgttcctcttgcaaattttgtagtttaa

SEQ ID NO: 59 - DNA, 1023 bp, Methanobrevibacter ruminantium
  source 1..1023: mol_type = genomic DNA
atggttgaatttgattcatttattaatgtagaaaaagttattgaagcaaaagatagtaattatgttactaaagaattatcttttgacgataaaaccatattaaacacaccatataagatttttaatgtgtctaaagtaaaattaaataaattagaattgcctcttaaaggaaatattattgaaactactaaatttatcaataataaaaaatcatatgatgcattatataatttacttgaaaattctcctaataatcaaaaatcaaaattaaatcaattttttaaggtagataatacatttaaatcatataaatcaattatatctttgactttctcaaaaaacccatttaaatctaataaatttactcatgggcacagtaaacccctttcattttctaatttcgaatatttattagattatatgtatgaatattcaactttatttgtattgattccagatattgattttaagtcatttgattctatggataattatatggagtatattgaaaaagcagtaaatgttgtttcttcatttaataataaacctatttttgttccattatctatgaaattggacaacagtaatcttgaaaaattattacatttttataaagagaataactatagcaatatttggtttaatttttattccaatcaaataaatactaaaatttctatcattcgttattctttaagattaatcaatcgtttatttaaaggaaatgcagtaacatatttttctaatatgaaaaaagaaattaataaacatcttgatgatgtttacactttaccatctgattttttagggccttttttcggttgtgattttctaggttcaaatagagagtcaggttttcctgggaaaaatattaaaagaaccgctaaagaaaaaagggaatttgaaagaaaaaatttaattaataaaaatcgtatttttgattcatcaagctattattattttagtattttagaatatccatctgatttaagaattaaattcaaagtcaattctacaaactaa

SEQ ID NO: 60 - DNA, 570 bp, Methanobrevibacter ruminantium
  source 1..570: mol_type = genomic DNA
ttgttttttgcagatttcctaaggtttctttcatatggttttttagaggaactaaaacaaagcaattgttataattttttagattattataattttgctattggttcaaaagtttttgaagaaataaatcaacaccttgataataacttaattaataaattacatttttgtccaaacaataattacaattattctgctttaattgctcctcttttatctaacgaagaaaaaaataaaaataaaggagaatatgaagtaataggtttatctttacattatttgtctttaaatcaagtgaaatacataattattgatgataaaagagcaagaaaatttgcaaaaagaaattttgaagaattacaagagtatattactggaacaataggcattattatattttgttcaaaagataattttatttcaaaaattgatgctgcaaatatattaaaagatattgaatttgcaatcgaaaatcatgatgaaactcaagggaatttcatttgtagtcttgggaaacaaaattataaaaaaataatcgatgatgcgattaaaatgttggatgtagagtaa

SEQ ID NO: 61 - DNA, 573 bp, Methanobrevibacter ruminantium
  source 1..573: mol_type = genomic DNA
atgactttatcgaatgcagaatataaacaaaaatatattgaatatttaattttattattattaggggactttaaaaataaattatctgtattgcatattcaaaaagaaatatatttgttatataactttgatgtagagttaaaaaaattattttcctttgtaaaacattataaaggaccctatctagatttaattaattcgtgctgtgaaactccattttatttagatggttgttgggaatattttgaaccgaaagaaaaaattagtggaggatttttaaaaatcactgataaaggttataaagaatatttaaaatttcttcaaaaaattaaagatgaaaatcaggaagaattacttcatataaataccgctataagtatgttaaataggttatatggttctttagattgtgaagaattattactgctgatttatactgagttcccagagtacactgaaaaatcagaagtgtattcaaatataatatctaaaaaaacaaatattgcaaaaaatttatttgaaaaaaaagttattagcgaggaaaaatataatgagttatcaggaatcttataa

SEQ ID NO: 62 - DNA, 2769 bp, Methanobrevibacter ruminantium
  source 1..2769: mol_type = genomic DNA
gtggaaccaacaatctcatcccgattgctaatttttattagaaatgatttaaaaaatgatataaatgagctacttggtgagccaaaatgtggtaaaggttctgcaggtataggtaatttagctcatatgccttggttagattttacattgcataatattgatgaaaacttaggtgctattaatgttgcttatttatttaaaccagatatgtctggattttatttaacatttagagctttattttatcaagaaattgagaaaaaacatggcaaatatttattaatttatttaaaaaataaatcaagacatattagagagtttttagaggaatctaacaaacttagagatgattttttatttaatatggacttctctgaagacacagctgtactaaaaaaacatagtgcaggaacaattgtagcaaaatattatgatgcaagtaatgtgccttccgatgaggaattaataaatgatttaaattattttttagatttatatgcttttgtcattgacaattatgaaaataaaacagatctttcagtagatgaatgggtcaaggttttagaaaataaagaattaattgatgataagatgtttagcattttagaaatcatgaatgaaatggataattattccgctactacaagccagatttctaaaaaaagggaagaattaggatttttggatgaaaagtcttataatagtattattatttctaattcaagaaaaattaaagaattcttaaataaaaaacctatttataatgacgatggtaccgaaaattattggacaaggttcttttatggaaaaaatgttgatggtgcttttgaatttaaaatgaaggatgaattagttgaagcttttaaaaaaactaatgtggaaaaacgaaaaaaaggtggggaagaagtgactaaaaactataactctttttatgatttccttttagataatggttatttgtttgataaaggaactattgagaattatttgctttctttaaaggttaagccatttgctattttgactggtaactctggaactgggaaaactaaattatctcaattgttttctcaatatatttctaataataatcctattttagtttctgaaatgaatagattatcaaaagatactgaagattttgtagaggttcaggttactacaagaagatcttcgtggaatatttttgaaaaaggtaaagaaatgaaccctggttggacaatatcaaatgaattttttagtaattatttgcctattgatcaatttagtggtgaatatcaaattgaagttgatggaattgaaggtaatgggattattagtcctgtaattcaagtatattatgataaaaatagtttaaaacttaaaaaagagtttgaaaaattgtatttatccgaattagaatcaatagaaaaagataaagaaaataaagtttcacacgaaattcaattagttggtttagaattaaatgttaattctcttgaaaatatggttaatactaattttacaaaatttaagggagatataagttttaaaaaagaaattacaacaacttctattaaaccaggagaattcattgttccttatgaaatatttgattatataccttttaataagaatcaaatggattgtaaaataatttcttgtggaagattttctaatgctaatatccatattaagtttaaattaagaaaattaagtaaaaatatccgagagtatttggaagagaagggtgtaggggctgaaattgatgttaaaattaaaaatattgacacttctttagaaagatttaatccagattggagttcagctaaaagatattcttcagagcaaattgcacaattaaacgaaaagaatattgatttaatcgactttaattctcaaaattacaaaataatccctgtaggtgctaattggactgaaaacagaaacatagtaggctattacaatgtaataaccaataaatatcaatccactccagcatatgacttaatcacacaggcacaaaagtctgatgaacctcacttcttaattcttgatgaaatgaacctttcccatgtagagcgctactttgcagactttttatcagctattgaaagtaaagaaaaaatacctctctatggagaagaagctttagaaatccctgataatctgtttatcataggaacagtcaatgtagatgaaacaacatacatgttctctcctaaggttctagatcgtgctaatgtccttgaatttaaaacatattctgctgcatcctatatgaatggcgatattaaactatctggtcctgatggaaacctatcatatttagaaaatccattggatggtaataatattcgtagtaagggaatagatgaattaagagagttatttgatggagttaaagtagaaaataaacctttctggaacattttatcttcagagattgaaaagttccaatctgtattaaaagtatctggatttgatttcggtttccgtgtaattaatgaaatagttcgtttcatggctgtagcatgggaatatgagaacaagcctgatgaatttagcaattgggaaagatattttgatgcccaaataaagcaaaagatgcttccaaaattacatggctccgaaaagatcattggagatacaattgatgagcttcacaagatctgcttggacagttccattgatgatgtggagatggctaaatatccagaatcctataagaaattaactgagatgagaaaagtgcttcgtaagcaaagatatgtttcattcattaactaa

SEQ ID NO: 63 - DNA, 1644 bp, Methanobrevibacter ruminantium
  source 1..1644: mol_type = genomic DNA
atggagcaatacattaaaataaatgctatcgataatgaatctaatcaattgggaacattcaaaatctcaaaagaatatgatggatacataccatctatagaaaactttaataaagagattattttagaaaaccttatcctatacaatgttccaatagttgaatattttgataataagactcccattcaatactataagaatgatagctttaatgcaaatattcttcttcttgaggaatatgagtatacaattgaatttgaaggcgatctgaatcttgatgtttatgaaagtttaaagaacagcaaaaacagtccattgaagttgctgtcaaacactaattctggctttttaaactttggaagctatgtaggcaagacatttatagacatttataaggatgaaggccttcttttcaaatgccctatagaggttcgttctcgcaagataaattatgctaaagactatgccactatgattggggatttgtctcgtttttcttctggtctaatctatgagcttaactcccctgtctatcagtcattggaagtaagtgacatcaataagactccatatgaggattttatgcttcttgagtatctatttgaggatgagaatcttccatccactgttgagtatttgtctcgcaatttgtatactttgcttgaggagtccagggaagaagttccaagctcccttgcatctaatattgggcctaatgagcttgttgaggtcttttctaacagtgataatttggaaaggtatgatggccttgataatggtcatttggattctgttttgtctagaactaaaggatatcttccattaaagataaatgaaataaagtatgtggacaatatagacactcctgagaatcgattctataaaaactttctattgtatatagatgacttgattgatgatttaataaaaaggatagatgaaggctactctttggataagcttcatgaatataaggaaacacttagctattatctctcttcacgctattttttagacatttctcctatggattatcctcctcttaattcacaggttttgcagaagaaagagggttatcgtgacattcttgaatattatcttttatttgagttcggtttcaagcttaactggaatcaggttgttgatgattttcgtggctatgagaagaaggtgtatcgtctttatgaatactggtgctattttgaactcttggatatagttggtgaattgacagatactgaaatacgttttgatgatctttttattgaagagaacttgaacatctcccttagggaaggggctatcaaaagatttgacttgaacttgtctgacttgttggacaatgatttgccttcatctgatgatttggacataaggatagacttgatgtataacaagaccttcaataaggatatggcttttcattcctattcagttgccttaaggcctgattataccttgtcaatagagtttgggggtaatgcttatcgcattcatttcgatgcaaagtataaattgaacatcaatgatgaatcctttaagaatgatgatattgtaaagatgcattcctataaggatgctattggggatacaattgcagcatatgtgctatatcctggagatagaaaagagatatttttatga

SEQ ID NO: 64 - DNA, 3537 bp, Methanobrevibacter ruminantium
  source 1..3537: mol_type = genomic DNA
atggagaaaactatgaaatctaaactttttatacttctaatcattatctctattctaataagcatttcatcagtttcagcaagtgaactccaagctgatgcatcaaatatagataatgattatcaaacaaacatggaatttgatcctatctgcaatgatgaatcaaatcaaaaccaggatttaaatctgaaaaacaataatgaacatattttaaaagaagagaacacaaaccccccagaaatagaagatgaaacatgctttacaactttatatcaggaaatcaatcaatcagatgatgagctaaacctcacacatgactatatattcaataaaagctatgacaatgccagcttataccaaatgtattacggcccattaatttcagtgaataagaccaattttacaatcaatggaaatggccatatcatcgacggaaatgaaatgggggcagaatttgattttgaaaacaataagggagaaattgtaattaatgacttgacatttaagaatttcaaccaaacagttttacaaatttacggaaagcttacattaaacaatgtcaactttacagagagctttgaatcacttgaaagcattatatttgtaagcaagggcgtcttgaatgtaaataattgcagtttttattcaaaccgcgcaaagaatatcataagcggatcccagtcaaatataaccgtaaacaattcaatcttttctggaaatggcaattatgaaagagcaatttcagccaacagatggcagctggtcatccacaattccagatttgaaaatttcactttcaagaacggtgcaataattgatttcaagggatattacctagatctagaaaactcaagtttcaataatatacattccaatttaagtggcggagcaatacttggaaaatacttccccgcctatataaaagtagctaataaaacccaataccttccatcagaccctatgataatcaaaaactgcagatttgaaaacatttcctgcctcaacgacgggggagcaattcactttgactttgactcaggatcccaaaggattgcccaaagcctaaacattatcgattccaatttcacaaactgcagcagcaaatatggaggggcaatatcaattctaggaggaggattgaatctcgaaaaaagcaatttactaaataactatgcaagcttcgagggaggtgcaatatactcctcatggaccaacattaacattacagattccagcataaaaaacaataaggcagaaaagaatgcaggagcgatatactttgacaaaggaaacctatcaatcaaatcctccgatatcatcaataacagcgctcttgaggaatccccaactaccgcaaatgcaatctatgcccatgacgttgcagcggatttcagtgactccacatttgacaatgggggaattgcagtctatgcagactttgcaagccattcaaatttcacaaacgtcaataagaatgatgacatattcctcatggacaatcataattacatcgtttcagttgaaacccctggaataaaactcaatctaacaaataatgaaataattgttgactccctcccatccaaattcaattcacaggattggggatggacaacacctggaaaagtccagggagacaatgacgactgctgggcatttgcaacaatagcctccattgaaacaggccttggcaaatccacaggagtgctctacaatctctcacagaactatgtgcagaagcttcaattgaaatattatgaagtgggggatttgagaaacagcctgacaggattcataaccagcggcttaggctatgcattaagctggtatggggtcttgcctacagatgcagcttatgatgaccgtggaatgattgcagatagtgatatgaatgttcctagaatccacgttcaggatgcaatgttcatatatacaggagaaaacaacacaatagatcaattgaaaaaagcgataattaaatacggcgctgtcactgtgcaatactgggcatatagagaaggtgaggaaatactaagcgaaggagaggacatttccattatggaacataacacccatttcatttcacttgtaggatgggacgacaattttacaaatgattttggcggagccccagggtgttggataaccaaggattcccttttcggatactcaaatacagaatacatcaatttcgcggacatagactattttgccattgtgcctttaagggttgcagtagcctatatctttgaaaacgacattgactatcatgtaaactatcagacagaccttacctgccttgcaggatttgaccaaaactatacaatctattcaaatgagttcacttcaaagtacgacgagctgataggagcagtaggaacctatttcaatgaatcaggaataaaatactcctttgacatatttgtaaacgacaaaaaggtccaaacccaaaacggaacaagcgaatatgcaggatttaggacaatagttttaaataattacatccctattaagtctggagaccagttcaaggtagtcttcaagagcaattcagttccttatcaggcatggtctagggtccattacctaaatggaacatcccttgtaagcgctgatggaagcacttggaccgactttgctcctttaaataagactgtctgtcttaaagtatacacactcaatgacactacaaaattagcagacgccaatgacatgattattgaatatggcgaagattcctatttcagcgtaagggctgcaacagagaataatatatctgtaggaccaggagaggaagtcactttcaccatcaataataatacaacaacagttaaaactaatgatgagggtgtggccaaaataaagataagcgaagctccaggaacatacaagataacaagcagctacaataatcaaagctatgaaaacaatataacaataattagcagagaaagaacaagcacaagaatcctatatcagaacatgagcacagtggctgtcaattccaaggtcgatggcaggataggcaaatactttgaagtaaacctaaccgacgatgaaggacagccgttaaataacatgccagttcaaataggattcaatggagcagtctataatcgtacaacaaatgctacaggcggtgtaaaactacagatcaaccttggatatgaaggctcatacacctttgcaatagcattcttgggagacaataaatatgcaggctcatttgaagttgcaatcatcaaagtcagcaagcaagctcctaagataaccgcacctgcaaagacatataaagccagtgcaaagacaaagacaatcactgcaacattcctatccgataaaggacatggagtaaaaggcaagaagatcaactttgttataaacggcaagacctatacaggcacaacaaatgataagggagttgctagcgtaaaggtttctttaaataaaaaaggaacatacacctgtacagccaaatttgcaggagatggaatgtataaggcaactagcactaatttcaaggtgaaaataatatag

SEQ ID NO: 65 - DNA, 1065 bp, Methanobrevibacter ruminantium
  source 1..1065: mol_type = genomic DNA
atgaaaggattggcaagaatcgaacaagatgtacttggctgggttgatgctgagctagacgaatgcggaccttatgatgctatctgtaagccattggctatggcaccatgtacctctgacgtccatattgtatggggtcatgcatacatgagcgatgcacctaaccgtgtagttggacacgaagcaactggtgaggtcattaaagttggggataaggttaaggacttcaagcctggagaccgtgtaatcgttcctgcaatcacacctgattggctgactgtgccagctgaacaaggattctcccaacactgttatggtatgggtacaggaatgagttttgtaacctttaagcatggggtctttgcagagcaattccatgtaaaccaagctgacgctaacttggctcacttgcctgataatgtaagccttgaacaggctgtaatgatttcagacatgatgaccaccggattctatgctgcagagcttgcagacattcaatttggtgatactgtagcttgctttggtataggtcctgtaggacttatggcattagctggtgctcaagttaagggtgcttctcacctcattgctgtaggaagccgtccagcagctatcaaggttgctaaagaatatggtgcacatgatattgtagactatcacaacggcagtacagtagaacagatcatggaattgaccgatggaaaaggagtagataaggttgtaatcggtggaggaggtaaggataccctctctgaagctttgtctgttcttaaggtcggtggtgtaattggaaacgtattgcactatgacggtattgaaaccatacctgtagacggtctttcatggggtcaaggacttgctgacaagaccattcgtggaggagtatgtcctggtggacgtgccagaatggaaaaattagctaatcttattgaatatggtcgtttcgactcttctaaattgatcactcataagtttgataagtttgaagacattgaagaagctatgattcttatgagagataagccaagggacatgattaagcctgcggttattttagatgaatag

SEQ ID NO: 66 - DNA, 1872 bp, Methanobrevibacter ruminantium
  source 1..1872: mol_type = genomic DNA
atgatatctaaactaaagaaaacaataatatcatttataattatgggagtggttagtttcgcagtcactttattgcccatatctggcggaatgtcaatgttagccccagatttaggattaatatatgttttaggattactattcggcccatatggtgctttaggtgtcgcattggcaatcgtgacattaaatttaataaacggattcacacttatggaaacactgccctttgaaatattcacctttggagtctcatatttaggatacaggctttggtactctggatttaaaaccgatacaattacaaagccaaaactagataacagctaccacatctccctatttttagtaagcatcatcatctgtggatttatctattcaacagtccaaggaatctcttttaaccttatattctgggttgatagattttatataatgatcctcttttatttcatgagctttaccacaatggcatttctctatggaataataggcatttggatctgcaacagatatgattgtttcgaaacaccaaaaaaatcaaaaagacatgttgacaagagaatatatcaggcaatattctgcatgataatcatcacatcaataatcctagccacatcatttataactactgatgatacaacggtgcgaatcatagagttgatagttttgggaatcttcctatttgcctatctgacaaagccattcgaatatgatataacaccgaatgacaaggatacaatcagcggaaggataatgcggaatttcattataatcacatttatccttggagttttgggaatagcaatttccatgatcagctacagtgcatatagtcaaagcgataacgtctacttagtattaatgtggggacctataataaccgatacggtattgctcctgttcctcattccttgcatttttatcttaagatatattgaagacaaagtagttcagcctatctcatcattttccaaaatcgaaggattcattaaggaaaatgagaagattgatgaagacggattggtaaagacctattccaagtataccgatgagaagacagagattggaacacttgcccgctcatataccgaactgataaagcacaataacaactatatcgaaaatattcgagaaatagaaggggaaaaggaaagaatcaatgcagaactggacattgcaactaaaattcaagagtcatcacttccagaaaatccaataaaaacaaatgactttacagtggaaggctattccattcctgcaaaagaggtagggggagacttctttgattactatatggtagatgatgaaaatctggctatagtcattggtgacgcttcaggaaaaggaatcccagcagccatactttcaatgataactcaattcatgatcaaaaactttttaaaacaaactttaaacccttcagaggttttatattctttaaataatcagttaagtgaaaataaccctgaatgtatgttcataacattatggcttggaatatataatacaaggactaaaaaagtaagatttgctaatggcggccacaaccctccattagtaaaagaagacaagaaattcaagtatttggacattgatacagggcttgttttagggataactggagacttcgactatataaacgaagagataatactaaaggacgagctgatagtatataccgatggaataacagatgccacagatgaggattccaatatatatggcgaagatagacttttaaaattcttaaatgagtttaaaggcgatgaagtccctataaaaccattgatatcagatgtaaacactttctctaaaggtgttgaacagttcgatgacatgacattgctatgcctgaagttgaataaataa

SEQ ID NO: 67 - DNA, 300 bp, Methanobrevibacter ruminantium
  source 1..300: mol_type = genomic DNA
atgaatgtaataaaaaattacaatggaaaagaattaacaatggcagtagatggccgtattgatacaataagtgctaaagagctagaggaagaaattaatgctgaaatgggtaattttgactcattaattatggatttaggcgatttagaatatacttccagtgccggtttaaggattttgattgcaactcaaaagaaattaaaatcagaggacataccatttgtcatcagaaacgtcaatgatgcagttaaagaaatatttaaaatgtccggttttataaaaatcctaaatattgaatga

SEQ ID NO: 68 - DNA, 8064 bp, Methanobrevibacter ruminantium
  source 1..8064: mol_type = genomic DNA
atggatttgtttaatttgtcttcggctcagaagatgctattgttttctgagataaataatcctcaaaatgattctttctatcttaaatttagaaaagattatgatttaggagattatgaatatgttaaatcagctatagaacttatttctcggaaatatttgaatctgcagattaaatatgatgagaatgctgatttcaaacaatattttgtagatgctgatgaagtaaatgtcgattcatttgatttttcaggcagtgaccttgatggaatcgatggtgatattgggggctctggtgtcggttcatttgatggtgatattggtggatctgatgtctcttcattcgatggagaccttgatgagtttataaagaactatttggataagccttttgacgatatattcgattctccattatataaatgggctgttttaaaaacatctgattctacagtacttataggggttgttcagcatatcttgcttgatggaacatcattatattcaatcgttcctagcgaaattgaaagatgcattgactctcttaaaagcaatgaggaattcattccaattgactattcatatgagacatatgtcaatgacgaactggaatatctcaattcaagccaatcacaggaggataagcaatattggcttgatagtctaaagggctatagtcaggactggtattcctttgatgactctgaacttggattctacgaaattcttttagagaaggtcccggatttcggatattctccattcgtcactgcactggcacttagctttttatatttctcaaagtctaaggagggcaacgaatcatttaaggatatggtatttaacacttcagttcatggaagatacttctcccaaggggatgcattgggaatgtttgtaaacacaattcctttaaggctaagctatgatggggatatgacctttgacgaattgcttgcctattcaaaatccgtcttaaaggagggcttaggccatgcaaagctccagttcagcgagtatacaactgacttaagaaatgagggcattgaccctgattgcatttcaatgttttcaatcgtatccaactccactgacatgaactctaagtttttaacccttcaaaaggacattaagttcccattgcactttaggataaacaagaattactctgataagaagggactccagtcaatcttcatagagtatgataaggcctgcttccataagagggaaatagcttccattgcagagggattgaaatatttaataagacagcttattgacgattctgctaaaagatgtgccgattatattgtccatgaggctgaatttttcaagggagaaaactattataacaatctgatcaattcatttgacaatccgacagcaatttcacctgatttaagtggagataaggtaagatttgtcaatatatccaagcatatagacattgacaagctaaagaacttatctaacagatatcatctctcaaaggaaaagctgctccttgcgattttcttatatgacttaagcaaattctcattttcaaaggatatattgatagcatataaccgtgttgcagcaggatatcacttcaacacagatttgactgttgaagagtatttgaatgacttcaagcaatcctttgaggaatataataattatcctcttttaaataatagaaaattaaactttgaaagcgaaatattattcttcattaatgattatgacgctaaagactataagcttgtgtttaattttgaaagcggaaagatcaatataagctatgacgaatcattctattcaaaggaattgatggaagctttcttggattcaatggatgtcctattgggtagatttgattcatctgatgagcctcttaaggagatttcaataagacgtgagcttgaattggatgagggattcgagattgagcttgcaaatgaaggtacagtaaaggaaatgtttgaaaatattgcaagtgaaaatccggataagacaattctttactgtgaagatggccagctcacatatgatgaattaaacagaaaagcaaataggattgctaatggattactcaagcgtggagtaaagattgaagataagataatgtttatgatgagaaggaacagtgacttgattgcagctgttctaggaattgttaaggcaggagctgccttcattccgattgatccaaattatcctaaaaacagaatccaacagattttagatgatagtgattctaagtttgtgattacctcatctgaaatagattatgatggggataataggattgatgttgatgaattgcttttagatggcgattattcaaacgaggataacgttgattctaatcctgatgttgatttgactccagatgattctaatccaaaacttgatgctgattctaatccaaaacttgatgctgattctaatccaaaacttgatgctgattctaatccaaaacttgatgctgattctaatccaaaagttgacctgaccccagataatttatgcttcctgatttatacttcaggatccactggaaagccaaagggagtaatgataactcaccgtggaattacaaactatatcgcaaatgttaaggaaaatgttcctatttatgaattgaaccataaatgcagcggctttgtatcaatctcaacagtttcatttatcgttttcctaagggagatattgggaactgtcctaaacggattgcctgtggtctttgccaatgacgaacaggcagttgacccattggagtttgctgaacttttcaacaatagcgatgctgatgctttcggttcaacacctaccagattgcttgaatacttgcagcttgaagagattcaggatcttgttggaaaatgcaaggtcataatcgttggaggggaaggattccctcctgtattatacgacaggcttagaaagcatacagatgctgacatctataattcatatggaccaactgaagtgaccatcgcttcacattataagcttatcgattccaatgaggtcactgcaggttgggagatgctcaatgtggttgataagattatggatattgatggaaaccagctccctccttatgtcactggtgaaatctatgttggaggtgctggaattgcaaggggatacctgaacaatcctgaacagactgaaaaggtcttcttgacattaaacgatattccatattacaacactggggatttaggtaaaaaggatgcaaatggcgaattatatgttgcaggacgtaacgatactcaaatcaagcttagaggattaaggatagagctgtctgaaattgaaggggcaattgcaaattatgagaatgtctccctttcaaaggtccttgtcaagaagcttaataatgtggagcatctatgcgcctatttcactgcatcctctgagattggcttgggagacttaaagcagcaccttattgattcattgcctgaatatatggtgccatcatatttcacacagcttgagtcattccctaagacacctaacggaaagacagactttaagaatctgcctgaccctgaaatcgatgctgatgaattcataagccctagaaccgaccttgaaaaggagctctttgacattgtatctgatattcttggaatggatgagtttggggtaaacactgatctctttagcattgggctcacttcactttctgtaattaagctgacctctgcaatctataataagttaaatgcacagatgaatgttactgaaatattgaaatataagacaattgaaaggatcgcatctgaaatcaagattgaagatgatgagtcaagggacattatggaattgtatccattgacttcaaatcagcttggagtctactttgactgcattaaggatttggagaacactgcctacaaccttcctaagaaaattgaatttactgaaggaattgatgtggataggctcaagtcatcaatcataaaggctattgataatcacccatatttgaagactcgaattgtaatgaataacggtgaagtctatcagcaaagaagggatgagcttaaagttgatgatttaatcgagatttcagatgatgagaacctcgatgacttcgtaaaaccattcaagcttgatgagggaccgttattcagatttaagatagttggagactcaatactccttgccgacttccaccatatcattcttgatggaacttccttaaacatactgtttgatgaaattgcaaagatatatgatggaaaggattatgagctagaggagctggacggattcgaatactcattggatgaagtcaaggtagagcaatccagcctgtacaaggaagcggagctcttctttgcagataagattaaggaatttgataatgcaagcctgattccacaggacatcaacggagacgagtcaaaaggcaaggctgcaatctgtgacgtattccttgaaaaggattcaattgacgatttctgttctaaaaagaacatcagccagaacaacctattcctggcagccacatcctttgtaataaacaagttcgtattcaatcgtgacactctgattgcaacaattacaaatggaaggttcaatccaaatcagcagaagacattggccatgatggtcaagacccttccattggctttaaaattaaattccgattcaacccttaaggactatatcgaatatgtcaatttagaatggctgaatgtattgtcctattcctcatatccattaaccgaaatctcaaatgagttcgatatcacccctgaaatattctatgcatatcatggtaagatcatagaggagattgagattggaggaatgactgttgaaaggcaatccattgattatgagggcttgaaattcaaggtcaacatcaatgtcgttgaagaggacggccaatatagaattttctgccagtacaatgaccagctatactctgaaaccttaatcgacacattccttgactgcatcaggattgtcttagacaagttccaaagatttgatgagaatacattgatgaaggacatttcaatcattgaaaatgatgattggagcgttgatgatttggaatatgatgagattccagaggacaggctaaataagatattcgaaagtcaggttgaattgcatcctgacagagttatcttatatgccaccgatggggaattcacttatcgccaattgaatgaaaaggccaataggattgcacatagcctcattaaaaaaggcgtcggccctgaagatagggtaatgtttatcttaaatagaaacagcaatgttgtagcttcaatattcggtatcctaaaagcaggaggggcattcattccagtggattccgaatatccttcagaaaggattgagcatgtcctgacagacagccagtcaaaattcatcattgtggatgatgtgattcggaagaagggcattgacctatcagattacagcgaaaacctattggatgttaatgagcttctatctgaagaggatacctctaatcctgaccctgatgtccatggaaataatatggcttaccttatctacacctccggttcaacagggcttccaaaaggtgtaatcttagagcatggaaacattgcaaactttgtctatcctgatccaagaaatgtctgtacatatgaactggtccacaatcttgaaaaagaggattataaggttctttcaacaacaactgtcgcttttgacgtattccagcaagagattatgggctcccttttaaatggggttcctatggtatttgccaatgacacagaatacaaggaccctattgaaatgatggacctaatccataggactggagctaatgtttatattgcaaccccttcacgtctgcttcaatatttggaaatcgaagcgatgcaggagacaatgtatggatttaaggtatatatccatgcaggagagccattctctgcaagattatatgatttgctttcccaaaactccaagggtaagttctttaacatgtacggaccgacagaaacaacagtttactgtaacggacagctgcttgaaagctcagacattcacattggaaaggagctcttcaatgtccatgagatggttatggacttcgattccaatcctttacctccaaatgtcatcggagaattatatattggaggaaagggcgtttcaagggaatatctaaaccgtccggagaaaaatgccgagtcctatgaagtgatcaatggaatcagattctatcattccggagactttgtcagggtcactgaagagggaaattattatgtctttggaagaatggataatcagatcaagcttagaggattgagaattgaaatcggagagattgaagttggcctttcaaaattccctggaatcaagtctgttgctgttgtcgtcagaaagattaagggcaacgatcatttatgcgcttactttacagtccatgatgagtataaggatgaaaagcgtggagaaaacggatattccattgacatcgatgatttgaaagcctcccttgctgaaaaattagtatattatatggttccgacagtctatatggagcttgaagagatgcctcaaactgcaaatggcaagacagacttgagaaacttgcctgagcctgtcctaatcacagaatacgttgcacctgaaaatgacattgaagcattctttgcaaacttgttcggtgaaatcttaggattggatgaggtcagcgccactgataacttctttgaaattggtggaacatcacttttagttactaaaatcactatggaagcattgaatagaaattataacctaagctatggggatgtcttctcaaatcctactccaagggcattgtctgaattgattctatcagatgagaccgctgagaaaaaatcagagttgtcttatgattactcagaaatcaatgcgcttcttaagaagaacaatcttgaaaacataataaatggcgagattcaagaaagcttaggcaatacattgcttacaggagccacaggatttttaggaatacatgtccttagggaactgattgaaaatgatatcggagacatttactgtttcataagagccaataaggtcttaagcggagaggaaagattgaagtcattgctattctattacttctctgatgaatattccgacatattctctgaaaggctccatgtcattgaaggggacattaccagtttcgatgactttgaaaagcttgtccatgaaagaattgacactgtaatcaactgtgcagctaacgtaaagcatttctcctctggaaccgatattgaggatatcaaccttggaggggttataaacggacttaagttcgctaaaatgaagaatgcaaaatatgttcaggtatctacatacagtattgccggtgaaagcataaacaattatcctccagttgatgttaagtttagcgaaaatgacctcttcatcggtcaggctgtggataatcaataccttaattccaaattcctggcagaacgtgcagtcttagaggctgccgtcaatgatgacttggatgttaagatcatgagggttggaaacctgatggcaagaagttcagacagcgagttccaaatcaactttgagtcaaacggattcattaatcgtctgaaggcatttgtgacaattggaaaaatgccatattcaatgcttatgaacaatgtggaattttcaccgattgacatgactgcaaaatccattgtagctctttcaaaaactcctaaggaatgtactgtattccatccatatgatcatcatagcgtttgctttggtgatataattgaaattatcaaacctttaggattggatatcgaacctgctgaagaggaagattatgaaaaggctttagatgaggctcttgctgataaggacaagcaagacggtgtttctggacttattacttcaataggatctggaaaggttaagaagatctgggtccctgttgaaaatgtatacactattcaggcattgtatagattaggcattaaatggcctttcgtatctgaggaatacatatataattttgtaaaatacttgaatgatcttgatttctttagtgtttag

SEQ ID NO: 69 - DNA, 1461 bp, Methanobrevibacter ruminantium
  source 1..1461: mol_type = genomic DNA
atgtatgaaaggaattataaattgttgagggcaaaattctctgaatttttccttcccacattatttacatcaatggcaggtaacatatgcctatttgttgatggtttgattgtaagttttttaattggagccagtaatcttgctcctattcagattgtagctccagtaatcacatttgtcaatcttatttattggatgatcggattgggaggaagcgtcctatgttctgttgcaaaggcagaatttgatgatgaaaaaagcaatagctacttttcagtatcaatcatatccctcatatccatcggggtattgattacggttataggactcttgttttcaggaagcattgcccagttcctatgctcttcacagcctgaattggtttcacaagtgtcccaatatttcattgcattggttattggaatgccattcttatgttatatgatgagcttatcttatttcataagggcggatggtatcccccaactgccattcagggctatacttatagcaaatattgtcaatatttgctttgacattatttacattaagtttttcaatttgggcctaacaggggcggcgcttgctacctcaaccggttatcttgtaggttccattttaatttcatattacttctttaaaaaggaacgtactttggaatttataaaattgaaagctaacgctttctttaaattcattaaaaagatagttacttcaggattttcttctgcgtcaactcaactctatctgactttaaaattgcttgtcataaactttttagttggcctttacgttggaaagtcaggggttgtcgcattcggaatttgttataacagtctgttcatactatacatattcctgattggaactgcacagacaatgtctccaatcgtatctgtttactttaaggaggaagactattctggagttgactatattataaagaggtcccttaagatagtggttgcttcaagtttggctctgtctgttttattcatattctatcctcaggccttgcttttcttgtatagtgttaaagacccggcagatgttcctgtagtattgaatgcattgagaatttttgcaataagttatgtaggaactgcaattacattcttatataccttctatgctcaagcaattcaaaagaacagattatccacaatcatttcattgcttgaaggatttctattgccaatttcagcagcagtcatattgtcttttgcaattggtggaaatggaatttggatttcatttgcaatagctgagctattgacaatattattcatattcgcttattcaagaaacatcaataaaaagacaaatggggaatacactggatttttcataaacaagcacaatgatgatgaaagggtatttgaatatacaatcaatggaaatattgaagaggcagtaaatctccttcagaggaagtcccaaaaattaccttatctggggtga

SEQ ID NO: 70 - DNA, 237 bp, Methanobrevibacter ruminantium
  source 1..237: mol_type = genomic DNA
atgcttgtaaatatcattaacattaatgatgtagtcgatacgattgatatcatcgttagaaagaatgttgataatattttaatttcagttaaggacactggggttgatttcaatcctgtggtggaaaatgaagagcttaaattcgataatatatctgtgttgaataaaattgcagataagattgattattctagagttttaggcttgaacagtacagtgataactataaagaattaa

SEQ ID NO: 71 - DNA, 1062 bp, Methanobrevibacter ruminantium
  source 1..1062: mol_type = genomic DNA
atgtttaacaactataaagacaaactgaccggagatagaaagatcctaatattgtttgtaatattagccatctttaacatagccttatacatcaacatattcaagtatatggttgacatcaaggacataaacatggcggtcatacacgactttgtcacaatcaactgtgcaatcataatcctaggatttacttcaaccaggctccccaatcttaaaaagcgtgacagttcaatttatgaaataagctatcttatcatcataggcctattaagcataaccatttcattctttaacaagtccatcaatggggaatcattatgggctccctatttggaaatgttcaggatcctatctgtcgtcctgattttaacattcctagccactaaaaccaaaagctttaaggccgtagtaaggggagaccgctcccgaaagacaatcatctcacagataatcctatgttcagtccttggaatccttgcatcatatttcacaatggacatcaacggccttccagccaatgcaagagcattggttgtaatgatatccggattgcttggagggccatatattggaatacctgtaggaataatctctggagtctggagatattcaatgggaggtcctacagcattggcatgcgccattgcaacaattctagccggaatcactggaagcatcatccacagatggaatgggaatgaattcatatccccagtcaaggcagggcttttaatgtttttttacagcggctttgagatgtttctgcttaccatattgaccccaagaccaactggactcatcgttgcaagcaatctttatggcccgatgacatttgcagcagtccttggaatcctactattcagcctatttttagatgagaaaaaagagaaagctgaaaccgatactgatgatggagatgaagataaaaagatagaactaatgtcggaagaattggaagaatataaaataaaagccaaccaaaccgaaggggaactaaaagagtataaagataaggttgaaaagctagaacaggaattaaatgaaatcaaaggcaaaatataa

SEQ ID NO: 72 - DNA, 2919 bp, Methanobrevibacter ruminantium
  source 1..2919: mol_type = genomic DNA
atggataaaaagatttttatagttagctttattctgctagctattttcacaataggggctgttggcgcttctgatgtatcagagctgacagcaaatgatttagatgataatgctttatctctaaatgatggtgaagatttgcttgctggagatgaatctggtgaatctggcaaggaatcttattttaataatgataataactataatgatgaaaatagggtaaatgcgaataatcttgattatggtgctggtgataatgatgcatctaaagacaaggtcctatctgataatgtttccgattatatctatgccactacccttagcgtatctgtcgatgacactcctcaaagccagtatcctaccgccactgtcagcttaaatgatttgagtggcaatcctgttgctgaagccagcgtttccgtcagtgtcgatggtgatgattatatgactgtaatcaccacaacagatggtacatgccctctttcacttgataactatctgtctgtaggcagtcataaggttggggcagagtattccggcgatgggacttatggaccttcaagcgcttccaccacattcaatgtattggaagaatattcctcttatctaaatacagatttgttcatatatacaggcactggcagggaagggggctatacttctgttacaggtaagctgactcatataaatcagcctatatccaatgctacaatttccctttatgtcgacgatgacttctattctaatctgaccactgataagcaaggcgaaatcgaggggatgttattcaatataagcgtaggccgtcatgagcttaggggagaatatgtaggtgatcgaggatttgaaccctcaaatgccaccaaatacttcaatgtcttgcctaaggattcagtttccagcaatattcaaatgacactgaatgcctctgatgctcaagtgggaacacaagctaatgcatatgtcttattggaaagacaatatggaggccctatggaggatgctacaatttccatcagcgttgatgacgtattttatatgaatgtgaccactaacgccctaggttatgctttctttgatttgtctgatgacttgtctgtaggcagccataagctttctggagaatatcctggcaatgagtatacaggctcatcaagcgcttcaatcactttcaatattttaccagtggacgattccagctataacttcactgttaccgaatatgcaaattacttagacactaataccacagttcttgatatttcatcaaaatactatgtcaacggaagctttaatgtttcagttgtctctccaaacggaactctgtccactttcactcaagactgcagtcctgatggccataataattggtcaatggctgattttggaattgatggcattggaagctatatcatttccggatctttaatctttaagaatgagacattaacccattttgacaatcagaccttccatgcaatctgcatcaggccgatatatatggaaagcactgaagccaacaatccgttggatatcctggtggtatataattcaagcgatgcaaccaaggtctctgtgaatggctccggcctatttgaaggacgaaaaatcactgatggtcctatagtctggaatcttacagacttaaacatcactgagcttggagactataacatcagcgttatgtcatatgacagcaaaggcaatctcattgacagatttgactataatctgaccattggccctaatggggacgactataaactctatgcaaagatagatccaaactcttacagtactgatgatgtggctgtagcattatattgtccaaatgcatcatggggaaatgacatagaggttcatatttatatgggcaaccctcttgaagttctcacctttttcccagatagcgttagtcctacagaagcagcgtcttttaagaaatacacattagctgatttgagaattgaaaatagcaatgattatagggttgagattaaggactttgctctcaaccaattcccagggatttcattcaacataaaagtctgctatagcaatatgattctcgtcagcggaaacggaagctttgagattgactttgatggtgcgtcagtcaatgcaaccctaacagattcaaatggaaatcctatttcaaatgctagcgtttcagctttagttaatggagtagagtctaactgcactacagatgataatggtaatctaataattccatttgaaggcaatacaactgtaaaattgacttatattgataataatggagttgaaataaaaggcaccgggaagtatgtcaaggaatctgtcattaagaatagaactgaaaccaagattatctatcaaaacatgacaaccactacagtcaattccaatgtagacggaaggataggcaagtactttgaagtaagtctgcaggacgccgatggaaacccaattgcaaacaagactgtattcataggattcaatggaaaggtctacaaccgtaccactaactctacaggtggcgtaagcttacagatcaaccttggatatgctggaaaatatacatttgccatagcattccttggagatgatgattatatgggctcatttgaagttgctttaatcactgtaaacaagcagactcctaagattacagcaagctctaaggcttataggcctaattccaaggctaagtctttagttgctacattgaagtctgcaaagggcaatgcaataagcggcaagaagataagctttaccattaatggaaagacctattcaacaactacaaatgcaaaaggacttgctacattgaatgtttctttaagtaagaaaggaacttactcctgtactgctaaatatgcaggagatggaatgtataaggcaactagtactaagtttagtgtaaaaatagcttaa

SEQ ID NO: 73 - DNA, 1464 bp, Methanobrevibacter ruminantium
  source 1..1464: mol_type = genomic DNA
atgactgtaaaagtctttataagcagtaatcaaaatgaattctttgaagaaaggaagttaatcaaaaaagagctcgaatctgattccatgtttaaaaactatgttgatgtttttgtttttgaagaaaatgaagcaagatccttatctccacaggaaaatttcatcgaaggattatataattccgatgtatatatcggtcttatcggatcatcttatggcgatataaaggacaatggattatcctctacagaatatgaatatgagattttcagcagacttaagaacaaacagaatatctatttttttataaaggattccaatgaaagagaagataaggctctggatttcattgaaagaattaaaagcgatacaagctttaaaatttttcacaatactgtagagctcattgaagagataaaaaggagcctaaaggcacatataaatcagagtctaagcaatcaggaatttgactttcaattgttagcagaatccagttgtgacgatgttagcaaggaagctttagatttgctttttgattccattgattatcagcctatactggatttattaggtaatcgtgatatggagagcatattagaaatcttaagcttgggaaagaaagatttgtcaggaacttttcgtttaaacaatgccggtgccttatttttagcagaaaacattgaaaagtttaacattgagcatgaagtgaaactggttaggtttaaagggaataccaaattggaaatgattgacaaatgctataccaccagtcctttctttattcttttaaaggagtttgaacatttctattggaaaaacattaaagtgggctctgtcattaacggcttgcgacgtgtaaatattccagaatatccctttaatgccatcagggaggctatgataaatgctttggcccatagggattatagctttaagggcagtttcattcaattttatatctatgacgataggattgagataattagtccgggaaatcttttgtatccattaaaggtttctaatttgaagaatattgaagtccctgtgcaccgaaataagaatatttgtaatttgttctccaaaaccatttttatggagcacgttggctctggaattcagcgcatgtgtgatgagatgagaaagtctggcttgagggaacctgaatttataaacggcgagggattctttaaggtaatattttggggacctaatggaaaattgatctatccggaagaggctgtggataataatgttttggacctaactaaagtagggttgaatgataggcagataagagcattgtcaagaatagttaatgaaaaagtaaaatattcctatgaaagatattctaatgagtttgatgtgtctaaatcaacttctaaacgagatttaaatgatttggctaagaaagggctagttattgaaaataaatccaatagaagaaattattattttgttgaataa

SEQ ID NO: 74 - DNA, 528 bp, Methanobrevibacter ruminantium
  source 1..528: mol_type = genomic DNA
atgatagacgaatcaatactcaatttatttaaagacgaaaaaataaggtccatttgggatgataagacaggagattactactattcaattgttgaccttatttcaatcattaccgaaagcaaaaatcctgataaatattggtctgatttgaaaagaaagatgaaaaaggatgaatacaacctattgaataaatatatagttcagatggaaatgccctcctctaatggcaagatgcgtttgacagatgcaggggatattgaaacggttttgcgaataatacaagcagttccatcaccaaatgcagagccttataaggaatggctagcccaagtggccaacgaatgccttgaagagtatataaatcctgaattagctattgaaatggcaataggcgcttatcgcaaaaagggctatagcgaagagtggatcagtcgaaagctctttagcatggagataagaaatggccttaagaaagagggttttaaagaaaagacaaatagggagcatgttttagatagtttagcttaa

SEQ ID NO: 75 - DNA, 1230 bp, Methanobrevibacter ruminantium
  source 1..1230: mol_type = genomic DNA
atggtgaaaagagaattatatatgaataaaatcaatagcttcattgataaggatttaataaaaataataaccggtgtaagacgtagcggcaaatcttacttttttaaattaatcattaatgaactaaaggaaagaggagtggctgaagaaaatattcttttaatagattttgaacttcctcaatacagacatataaaaacaagtgaagagttagatgagattgtattggatttcattgattcacatcctgaaaaaacatatctcttttttgatgagatacaaaatgtttccgagtgggagctgtctgtaaattcatattataaattatcaaaaagcgatatttacattaccggttccaattttaaattattatctaaagaattagctagctttttaacagggcgttatgtttcaattaacatgtatcctttttcatttaatgaatttattgattataaaaaggagattgggtctctgcctataaatagcaatgaattaaataccgagcttgaaaattatttcgatgaatattttcgctatggcggttttcctacagcgatttcttctaatgaccataaggagataatattgaatgatttatattcatcaattattttaaatgacatcgtcacaagatatgagataagaaatgtaggcctattcagtaggataatcaagtttttaattgaaaatgtaggaaatttgatatctgccaattccttgtataattatttaagaggacaaggtatggaaattaccaaaccaacaatatacaattatctaaattatttggaaagtgctaatatactatctaaaattacaagggaggatttagtaggcaaaagagaaattaacggttctgaaaagtattatttgatagaccaaggattttataggtcccagttggagattaaacaagaaaatactggcagaatcatagaaaatattgtttacttggaattacttaggagaggttacacaatcactataggatgcattggaaaattggaagttgattttgtatgcaaaaggaacaatgagaggatatatattcaagttgcatattatttaagcagtgatgaaaccattgaaagggaatttgaacctttaaggagaatatcagataactatccgaaatatgttttatccatggataagacagaccaatctcgtgaaggcattaaacatttaaacataattcaattcttaagatcttctgaagatatttga

SEQ ID NO: 76 - DNA, 6606 bp, Methanobrevibacter ruminantium
  source 1..6606: mol_type = genomic DNA
atgatgaaaatgactaaaaagaatctttttttaattagtttaatactactaattattcttacaattggtgctgtcagcgcagctgatgatttatctgcatcatcagatctgacagttgaagattctggagaagccatagctacggctcctgaagaatctgttctgattaatgaaaataatggagattcgattgctgataaggggcttagtgatcctatctcaaatgaaactgcgaatatcgcaatagatgaaaagactacaaatgataaagctatttctgaagaggataattccatttattctaaagacaaggctaatgttcttcgtgaaaatgaaacacctgttattttgactataaatgctccaaatatctattatggtgaaaccgctaatgtaactgtttctgcaaggtatggggctgggcctttagccaacagtagcattaatcttgctcttgatggcgcagctggtgaaaatattttaatttttgatgacggtattgctcaaaagaattatactggtttagctgcaggcaatcatgctgttgtagcatcctttagcggatatggtccttatccttctgcaagtgcttcaaaaagctttgaagttttaaccccgacagtcaatatagagatagaagctaatgatatctattatggggaaagagcttatgtcactcttcatgtaacctatggaaaccagccttttgccaataatactatccaagtatctcttgatggccaaagcagtacaagttttatcgtagaggatgatggcaatattcaagtgacttattccaatttggctctaggcagtcacactgtttcagcatactttagcggatatggtccttatccatctgcaagcgcttcaaaagacttcaaggtttcaaaaaaggaaactgctgtatcattgagcgtgtccaatcctcagcttgataagggtgatgagcttcgtttcactcctagcgtaatttcaaacggattttatgttatggctaattcctattccattatggttgatggcatgagtaattattcttattggactgaaaacggcacttatttcctttcaacttcctctcttagtagtggaaatcatactcttactgtaagttatgctggagatgcgagtttcttgccttcatctgcaaatgccactttcacagtcaattcttacaaggccactttatcattaatgatgattgaaacagagctttatccgggggatgattgttatattttcattgatctctatgacagcaatactcatcagtcaattgcagctaatattacagtaagcgttggcaataattcttatctgtatcctattcgagtgaattcaagctttaatcttcctactgataatcttgctcctggagtttacaatgtaactgcattctttgatggaaatggtctatatgatcctgaaactgcagttggaaccttgactgttctttctaagaaggaaactactttatcattaagcatatccaatcctgttcttagtattggggatgagcttcgtttcattcctagtttaactggagatgggtcttacatttggggtgcttcctatacaattaaggttgatggcatgggcaatcagacttgtaggcttgttaacgatacttatttcctttcaacttccgattttgcgattggtaatcatgcccttactgtaagttatgctggaaatggtgaatacatgccttcatctgcaaccggttatttcgaagttactcctaaaaaggccaatttatcattaaacatgttatcaacagagctttatcctggtgatgactgttatctttacatttatttgactgacagcaatactcatcagtcaattgcagcgaatattacaataagcgttggcaataattcttatccgtatcctattcgagagaattcaagctttaatcttcctactgataatcttgctcctggagtttacaatgtaactgcattctatcctggaaatgatctatacggtcctgaaactgcagttgaaaccttaacagttatggaggaaaacgctacaatcaaaacagaaacctatctaagcataattatggcttctggagataaatatcttggagacaatataccattctcagttagccgaactccatctggagtttcactctttggagataattacatctttagcattgacggagttgagtctcaagatatattctatgagaatttctcctatttcattgtaactgagaacctttcccttggaaaccataaccttacagcatattatccaggagatgagatgtacttgccttcatctgcaagtcagaacttcacacttatctctaggcctaaatcagatgtcttattaagcatagaggcaaatgacactttcattggagaggatgcgactattataatcaatatgattgatgaattaggcaatcctattgatggagctaacgtttacctttatatggataataaggaatttgctcttccgttagtaaatggtgtcgctcaattctcctactctaatttatcattaggcacatatctagttagcgcattatttaacggaactgaatactataatcctgcaaacgcttctgcaagctttgaagttctaaatgcaaacctaactgtaaccaaggataacttcttccaattcttcaataataacggagtattgaatacaaatgcaactgacttaaaatttgtaggtgaatttaatgatttaggcattacaagcataaaaatcaacaagccagtttccattgtaggtgaaaatgcaaatataatcaacattccagtgattgtctcttcagatgacgtatcccttgcaaacattgcatttgcctacaacggttcagagcctataatatatgcaaacaatgtggctaatctagaaatcataaacaatgcattctcctataaatccccttcagataaaagctatgcagtaaacattacaaaatctgaaaatgtaacaataatcgacaattcctttaatgtagtgggtggaaacaatacctatggtattaatatagatgcaattggctttgaaatcgattccaacgatatctatgttgaatccacagagtattatgcctcagcaatcaacatcaacggtccaagttcaggaaatgttttaaacaacaccattaatgcatacgctcctatgatggtctatgcaatcaatacagacccatctagcggaacccttgaaacaagctacagagacaatgtaattgaaggagaatcctactttgcaatcggtatttacgacgattcagaaacaatcaccggtaacgaaatcaaattgactgctaactatgcaataggaattgtagctctctctgaatctaacattgaagacaataaaatcaagttagatgctacaaatgtcggtgacgaggatgttgaagatgatgaagttgacgttcagactgcaggaattgtaatcaagaacaatgttcaagttacaggaaacaatatcgattcaagcgacgcatccattgcagttgtctcaggaagctccaccattaacaataatgcattgaatggtcatgtaaccgttggaggagacagcagcgacaataatatcgtaaacaatatcatcaacacagaatcagaatatgcagttgaattgaccacaacaaccggaaacactgtatacaacaatgagatccatgcagctgatactgtaggtaacgatgctgtaaatgctgaaaatataggtgcaaacactgtagaggaaaataacgattgggtaaacatcactaacttgatattgacagtgaatgatgattcaactgaagtcactgcaaaccttactgacatttggggaaatcctataagcggcatcataaatgtttcactaaacggtgcagatccagccgaatgcacagtaaatgaaactggattatatgtgattccaatcacccaaaactcaaccgtttacgcttcttatataaatgtagacggcagtctttcctttgataagataaaagtaattgtatttaacttccctgtagaagttcttcctaatgctaccattgcattgactgaccttgatggcactgttgttgctaatgtgactgaccttgagggtaatgctatagctaataaattgcttgcagttaccgttaatgatattccggttcttggtgctcaaactgatgatgaaggtatttattctattgatgtagtaggcaatgccactgttgttgtaagttacattgatgctaatggaattactgttagcagttcaattcaaataattaacaatgttgaaactgaaaccggaaccataattattcgtcctaatgctactattgcattgactaatgttgatggcactgttgttgctaatgtgactgatcttgatggcaatgctttagctaataagttgttaactgtcactgttaatggtgcttctaagcttggagctaaaacagatgaaaatggtatttattctatcgatgttgatggcaatgccactgttgttgtaagttacactgatgctaatggaattactgttaccagttccattaatgtggttgttaatacagtaacagagactgaaactttacgtcctaatgctaccattggtttggaaagggatggaaatgttgtcattattactttagttgattctgatgataatcctatttctggtgctgatgtggttgtttatgttaatgatattgaaactttagttgatcctactgatagtgaaggtaaaaccaacgtatcctttgaaggaaacgctactattgaagttatttatcttgatgataatcttatagctgtttctagctccattgaaattattaacaatactgaagttgagattgagagtgaaactttacgtcctaatgttaccattggtttggaaagggatggaaatgttgtcattattactttagttgattctgatgataatcctatttctggtgctgatgtggttgtttatgttaatgatattgagactttagttgatcctactgatagtgaaggtaaaaccaacgtatcctttgaaggaaacgctactattgaagttatttatcttgatgataatcttatagctgtttctagctccattgaaattattaacgatactgttgaaggcgaaaccattattatcaatcctgacgctaccattaagttacatcatgttgataataaggtcattgttaatttgactgaccttgaaggtcatcctttagctgataaggtgatttacgtatatgttaattatgaagagatagaaggtgctaagactgatgagaatggtctttattctgttgatatagaaggcaatacatctgttattgtcacttatgtcgatcctgttggaagaagggttaccagttccattgatgtggttgtaaatactgaaactgagaccgagactgttgttattcgtcctaatgctactattgcattgactaatgttgatggcactgttgttgctaatgtgactgatcttgagggcaatgctatagctaataaattgcttactgttactgttaatggtgctcctaagcttggtgctcaaacagatgaaaatggtatttattctgttgatgtagatggcaatgctactgttgttgtaagttgcactgatgataatggcataactgtcaccagttctattatagttgtcaacagcactgagatagtggaagttgaaaagatagtaaaccaaacagttgaagttgaaaagattgtctatgtaaaccagactgtagaggttcctgttgaggttgaaaagatcgtttatgtaaaccaaacaaataataacactattgaggttgagaagattgtctatgtaaaccagactgtagaggttccggttgaagtagagaagattatttacatcaacaatactgtagaggttcctgttgaagttgagaagattgtctatgtaaatgaaaccgacaacagcaccattggaactgaaaagattgtctatattaaccaaactgttgaaaagatagtttatgtaaatcaaacagttcctattattccaaatagaactgccactaatattatatgtgataatatgactactgaggcagttgctacagttgacggaagaataggtaaatactttgaagtgactttggtggatgctgatggaaacccattggtcaataagccagtcgccattggattttcaggcaagatctataaccgtataacaaatgagacagggggcgtaaagctacagatcaaccttggatacaaaggttcatacacctttgccatagcattccttggagatgatgactataacggttcatttgcagttgcaaacgttaaggtaactgatcagaatgctaaacttacagcaagtggaaaagcctataaggctagcgctaagactaaagcagtatctgctaccttcaagtctgcaaatggaaatgcaataagcggcaagaagataagcttcactgtcaatggaaaaacctattcagcgactacaaacgataagggagtcgctaaggtcaatgtttcattgaataaaaaaggaacttacacttgcacagccaaatttacaggaaatggaatgtataagacaacaagcactagtttcaaagtaaaaatattttaa

SEQ ID NO: 77 - DNA, 9162 bp, Methanobrevibacter ruminantium
  source 1..9162: mol_type = genomic DNA
atggtgattatgaataataaaaagctttttattgttagtttgattatactaactattttgacaataggcgctgtcagtgcagctgatgatggcctggccacatcagatgagataacagtggatgattcgtcagtagccgtttctacggcttctgcagagtcagatatttatgaaactaatggagatatagttgctgactatcaaagtgattctatctcaaatgtaactgtggatgatgataatactaaagatgagataatacgctcttctcctgctaaggacaatcttcttcttgatgatgatgacgatcctggtgctgtaaatgatgatgatgaaggggatgacgatgaagactaccttgatgatatctcagtgtctatcacaaatgaatatgacgtaaccgatcaggatgcggttatagtttccatattcgttccagatgttgaagaaggagaggatggcattgaaggatattttgtcgtttgtcttgatgacgatgatgagatattcttaggtcctttcaatcatacaatcactcctgatgactatgggactgatgttacttttactgcttctgatttagagattacagaagctgcgaattattgggtacgtgttttctatgttagcgatctggctgaacctcttatcgataatgatgaggaagatggatacaatatgatttttgatggggattgtattgcaagagattacactcaattttatgtaatcgtccctccagatggcagaataagcatttttgacactagtgctatctataccgtttactgccctccaggaagtgaaggcacagtcaccttaactctaagggatgaggaggatgtagagacttcatttacccaggaaattgaagatgctgatgatgaaaatcaattatattgggatttagattatatgggattgaacactatagatgccgccggcaactatgaggtaacaatcactcttgaaaatggcactctcatttgtgaggatgatataagaattatggatcctatagaaattcctgaagtctcttacatcaactctacagactatgaccatgcaactttagtcgctctcattaagattccaagtgagcttgatgatgatttggaagaactcattgatggaacagtcattattcaaatagacgatgaaacagtcttcgaaaagacattaagcgaatttgtcgaaggagaaagccctgatgacccattttgggtttacccaaaaatacattggagtgatgaactagacacttcagttaaattatactatgtcctcaacaatcaattggatatagatttagagcctggaacatatgatgtgacagtcaagcttgaccttgacggatgggatgaagtctcaagtactgaagaggttcgcttggtagaaagcaatgtagtcatcgatgaggacattggcgcaagcattgaaatctttgaccaagaggatatcctcaatgataatgaggtaagaatcatcgctatcactgtaaccggcgataagagtggaagagttaatttagcagtagaaggatgtcctgaatgggaatgtccattagatgaattggagaatgaaggcgacatctattatattaattccggctttgatattgaaagcggtgaacatgaggttgtcgtctcctatgtcctaaatgatgatagatctgtttcaaacagcgctatccttaactttatcgtctatccaagaattttcatttgtggaaatggcggtgaagacatagtaaactatttcgctgatgaggatagtgcaattcacatatatcctaagggagatgacgtctccaccataaggattgtggtaacaattggagatgaagttgttctagattccactatagatgatttaggattaagccctaagataaacgattggggagaaacctattatacagtaggtcctgctaatttcaacaaaaagcttgaatttggccattatgagccagtggttgcttattattatagtgatgcatatgagcttagcactgaggatggggaactttcattcattgacattatcggaatggtccatgtagctgacattgaagatgatgaaactccagtactggctgtttgctctgaccgtgatggtcaaattggagtatatattcgccaatatactgaagatggcgaccaagagttagagccaaaatactttgaagttgaaaaacatggcttcataatgcctaccatagaccaattaggccttgatgaaggacaatatcacattgatgttgcatatgccgatgacgaatggatctttggcaacgatttaatcgttgtaaacagttccgaatactttgtgctctatggctgtgactggctatacactgaagagagtgtagtctatgtatggtgtccggatgatgctgaaggaatcattagcctcactaacaatgatggaacaataaatgtcgatcatgaaattacagatgaggataagggcaaatatgtcgaattcaccttagaggaattaggcataagcggacctggctggtatgaaatcagcgtaagggtaaatggcaatgaaatcgatcatattggatttgatgttccaagccctatctacatgcctaattataatgtatatcttccagaggaaggatacgaacctgattattcaatgattattgccaaacttgaactcaattcagaattagaaggcaacattaccataaaccttgatggaaccattgtcttcaataaggatattgaggatatggaagctattaaagatggctccaaatggatttacaccatctacacttctgatttggatgaagcagaagaaggaatgcatgatgttactgtcaccttcaacgatttaaatgaagaaagatccatagaattccttaatagaacaactgaatctgatggtaacttaagcatcataatgcttggaggaacctattgcattaactggaatgatgtaattgctgaggtcattgctccaactaactataatggcagacttgtcctaaggcttcaaggtgaaataatgcaatcttgggatgaattgcattgggtcaattgggataactacaatgacactcacaatatctattatatttatgtagataatttagataaaatgtgtattgaaaatccaggagaatacactgtttctctagagtactattcagatagggaagatgagaatccatcccttcaaaatagcgaggaatatagatttgtgagagatgaagagccttcaggtgactttgaatgggaggtctatcattgggcagactatgaagatgaaaacagcctgctcgttacagtcagatataatgataatatagttgacggcagaatagaaatcaacattgaagatccaaatggcataactttaacagattcaagggatgtcggcgaaggatatgaggacacttggcttgtttcagacttgggaattcaagaatatggagtttacacaataagcgcaaaacacattttaggtgatgatgaggaaatcatatttgaaaatgaacctgtatatgtaactaaaatacagattagaggtgaagaggaagtttatgtagacgacccattattcgtattggccatatatcatgccggcgataggactacagtatatctaaatggcgcaggaattgaaggcagaagattgcctaatggaggtcctcttgtatggtatctctctgatttgtatatcaatgaacctggggagtatgactgcaccattcaattgtttgatgaggatgacaatttatttgcacagaccgaatattacttaaatgttattgaaggggatgacggctatagattgattaaaaaccttgattgggactatttcacttcaagcactcctgttgctgcattatactgtcctgaaggttctgttggagacatatcaattgacatttacgctccagatgacaatgatgatgattaccgcagccgtgatatagtaaatacaatactagattccattggctctgaagacgttggtggcttcaagatatggactttaggcgatttgggaattaacgaaggtggctggaactatggatttgtccttaatgacgctgatggtgacaccattaccgatgaaaatggtgaaaactgtgaatttggcttcggagcagtgctctatcatggaatcggcattgccatatgggatcaaaatcctgttgcccttgataacgaatggcttgtggatatctactctcctttagacaatgacggtgatgtaattcttatgattggagatgaggtctacttcagtgacactttgcagaacttagcgatgtatcaatatgatgaagatatagagcaaggctgtgcccacttccactttggagcaaacagcttcaaccgcacaatagaaacaggccattatgaagaggtcatagtctactatgatggatttgatggatatagtacagacagtactgctttcgattgtccaactgtcttagactttggcaagcctatgaactttgactggtctgtcaaaggcgcttattatgaatattatgataataatgtgattaacgtttggtataatgaggagataaatggcggtcaaataaaaatcattgcaagagctgaaaatggcactgaatacgaatctgtaaaagattataatgacaatcgcaataacgagtggaccatcactgactttggcataagcgaaatcggaaaatacaaccttaccttgatatacattaatgaaggcgatgaagagattgtccgtgacgataaggtattgcaggttctaaccttcgaccctcgttttgctaactgggtaactgtggaccatccatatgacgtccttgcaatataccaagctacagaagaaatcagggtctatgtaaacggcgaaggcccatatgaaggtattaaaatgcctaatgatggtcctttatcctgggatcttgaggctttaggaataagcgctgcaggtgaatatgagattcttgtagagtcctatgacggagaaggcaatctcctcagcagctttgaagatgtattgtatgtaagtgatgagatgaatcctaatgaatacagggtagagtatgcaaatgattgggacttctactctttagacagtcctgtatttggattgtattgtcctgaaggaagcgaaggccctataacaattgaagtctatggtcctgatgataatgatgctcttttaaacacaatcaatgataatatcgaatctggagatattggcacaatcaagagctggactgtcggagaattgatcactaacttaaatggctgggactacagatttgtaatctccgatgcaaatggcatcattaagaatggaaatgatgaggatatcggagaatttaacagaggaatcaacttccatgactctatagattatataagtattaatgaatggtcttaccttgatgatgaatggtttatagacatctttgcatacactggaaatgatggagatgttgccgttgagtttgatggtgcaactgtatataatggcagattgagcgatcttttattcttccaatcagatgaagatatgcaaaggggcattgcccattaccacatccctgtatcatatctctctaatgaaggaaatccaattgaagcaggcctgtatttaaatataatcgttaagtattatggtgatgacggctataacactacaggctatacattacaatcatacattgatgaaaatggtttcgattgggctaatgtaaggttaagcgttggtgacgatcctaatacaatcattctcacattaaccaactcccattgggaacctttagcagataaggaggtatatatttctgtaaacggaggagaaagacaatggggattaactgatgagtatggtatagccattttcacaatagatggtggaaattgcacagttcgtggagagtatgagaatgcagagaatcaatggtccgcctatgaaatgactctatgtgtatttggggagcctatatatccaaatgctacaattagattagaatttgttgacggtgaggttattgtaactctaactgatggcgatggtgcacctctggctaataaaggtcttggtctagctatcgatggtatcgtagttattggccctagcactgatgattatggtatttatagaatgggtatagaaggcaatgcaactgttgaaattagctatcaagatgaaaatggaattgttgtttcaagttccattactatagtcaataatactgagactgaaactgtttatgttggccctaatgccacaatccgtcttgaaattgttgatgataatgttattgcaagccttagtgatggagatggcgcccctatagctaatgagtttattgatgtctctgttaatggagttcctgttaatggtgcaatgaccaatgccagcggtctttattccatctctgtagagggcaatgcaactgttgaggtcagctatactgatgataatggaattacagtttcaagctcaattaggataatcaacaatattgagactgttcctgagcctgttaatgttcttcctaatgctactatcggtctttcaaaagatggtgatagtgttgttattagtttgaaagatggttctggtgctgctattgctggtgctagtgtgaatgtttctgttaatggtggagatgtcactttagttggtcctactgatgctgatggtaaggctagtgttgaaatcagtggtaatgctactgttgtggccagttatgttgataataatggtataactgtttccagttctattgtgattaattctgagactgttcctgagcctgttaatgttcttcctaatgctactatcagtctttcaaaagagggtaatagtgttgttattagtttaaaggatggttctggtgctgctattgttggtgctagtgtgaatgtttctcttaatggtggagatgtcactttagttggtcctactgatgctgatggtaagactagtgttgaaatcagtggtaatgctactgtagtggccagttatgttgataataatggcataactgtttccagttctattataatcaccaataatacagaaattgtggtaattgaaaagtctcatactgctgatgctcttttcaatgtaattattcaagaggataaacttggagtatggctatacaataacaatgaggaagagcttgcaaataaaaacattacagttgtatttgatgatgatgaagaaggacaaaactaccttactgatggacaaggatatacatctattcctatcggcgatcattctattataaaactttcatacactgatgaagatggcgctagcgttttctacacagttcatctttttgaaaccggcgaggtagtcgatgctgattatgtagtcatatacataacccctcttgacgatagctcacttgaagtaagtgtctctgtcaatggtgaagaccttgaggaaggtgaaattacatattatcttggtgaagatgccgaaggaataaccgttgacctagaggatggtgtatatgtcattaattatgacaacactgtaaatcagacaattgctgttgaatacattgatgacgatgatgtaagttggtatgcctactatgaagtggtcgtatacaacaatactgtcactgaaacagtttacctaagccctaatgctactatcagcttatctaaatctggtaatgatgttcttgttagcttaactgataatgatggtaaagctattgctaatgctgacttggatgtattagtaaatggtgccaaatccactgctaagaccaatgcaaaaggtgaggctaccattgctattaatggaaatgctactgttgttgtaagctataaggacgctaataatatcactgttacaagttctatcactgtagtgaatgagactgaaacagttgtgattgagaagaacaataccataattgagtatgtaaatcaaacagttcctcctaatgctaccgtttccctatcccttgttgatggaaaggttgttgctgaagtaactgatggcgatggtgttcctttagctaataagcttcttgctgtaactgttaacggcgctcctaaacttggtgctgagaccgatgcaaatggtatctattccattcctgtggaaggcaatgcaactgttgttgtatcatgcactgacaataatggggtaactgtctcaagctcaatcactgtccttaacaatagcgagactgttgtagttgaaaagaacaatacaatagttgaatatgtaaatcaaaccgtatatgttcctgttgtttcaaactcaagctttgatatagttggagatgaaaatggaataagcgcaatcctgcttgatgaagatggcaagcctattagcggtgctgttgttgaacttgatgtaaatggagcaaaatccaatataactagtgataagaatggtgaaattgtgattccaacagataagaatggaaccataaccatgacctatactgatgagaacggcgctaagcttatctacacaaccaaggtgattactcaaacagagataatctatcaaaaccaaaccatagaggtccctgtttatatcaatgtaactcctaatagagcttcaacaaaggtcatttacaacaatatgtctacaacttcagtcaattccaatgttgatggaagaattggagaatactttaaagttcaattggttgactccaatggaaaggcattggctaataagactgtatacattggattcaatggaagagtttatgtgcgtcagacaaatgagaccggcggagcacagctacaaatcaacctcggttatcaaggagattacacatttgctatagcattccttggagacgatgattataatggatcctttgaagttgctataattaaggtaagcaagcaaagcgctaagcttacaactgctgctaaaacatataagacaagcgctaagaccaaagcattaagctctacattcaaatctgctaaaggtaatgcaataagcggaaagaaaataagtttcacagtaaatggaaaaacctatactggaaccaccgactcaaaaggtgttgctacagtcaaggtatctttatccaagaaaggaacttatagtttcactgcaaaattcgcaggagatggaatgtataaggaaactagtgttagctctaagctcactttaaaataa

SEQ ID NO: 78 - DNA, 849 bp, Methanobrevibacter ruminantium
  source 1..849: mol_type = genomic DNA
ttgaggaacattttcaatgagggtgaattggataaggattcagtatgtgcaaaaattgcacatactgccagtgatggtaaaatctataaaaccaatttttacaatctcgacgccatgatttctgtaggatatcgtgtaaatagcattaaggcaacaaggtttaggcaatggtccacatctgttttaaaggaatatatggttaaaggatatgtcttggatgatgttttattgaaaaatggcactcgctttggcaaggactattttgatgagctcttggaaaagattcgtgaaataagggccagcgaaagaagggcatatcaaaaggtgactgacatattctcccagtgcagctatgattacaatcccaaatccgaagttgcaagagaattttatgctaagattcaaaacaagcttaattttgcaatcaccggacatactgcagcagaaatcattagtgagcgagcagatagtgaaaaagagcatatgggtctaaagacatggaaaaactctcctgatggaaagattcttaagtctgatatatcaattgccaagaattatttaagcgaagatgagataaaaagcttaaacagattggtcaatatgtatttggactatgctgaaaaccaggcttatatgcataagctaatggggatggatgactgggctttaaagcttgatagctttttggagtttaatgattttgaagttttggataataagggccatattagcatgaatgaggctcaaaagattgcagatgctgaatttgataagtttagagtaaaacaggataagttctatcagtctgactttgacaaattattggaagatgttaaaagattaaaataa

SEQ ID NO: 79 - DNA, 3561 bp, Methanobrevibacter ruminantium
  source 1..3561: mol_type = genomic DNA
atgaagtttaataaaaataggggcatatctgccatatcaataattttaattctatttttaagtatttctatggcatctgctatagaaataagtgcagatgatgctgatatggattctggagacttatccgtttgtgaagtcagcacatctgattgctacggcgagactctaatcagcgctgatgcatccggtgctgattcaagtgatgaaattataatcaacgaaacaattgcagatgaaaagacagactatcgcagctcaatccttgctgatggtgagaagaaaaaccttcatgttgaagtctctaatgatgttttcacacctgataacgattatgagttcatgctctatgatgaggattttaatcaaatcggaggatatttggatatatatcttaatgatgaactaacatactctgattttaccgttgatagtagtgaaagttcttctattagcttaagtggtctagagtgcggattaaataagataactttcatatatgatgaagatgatgtttataatcgcctcaatcaaacaaaagaattttacatttatggagaaaatcctgaatttgtcatgatacctcattacgataccataacattaaatggcaattattcttctagagtatatctgaaggaatatgatgaatggggatactatgatgaggataatgagggcgatattgaacctatcgatgataaattcaatgtatacatatataaagaaaatcctggtgatgaatatgaacttgtttgggaagatgagttcgaagctaatggaaccattaatttcgatgatgccatcaaaaccactggaaactatttgattagatatgtctttaatggaagctccgattatagctatgctccatacaactcatctaacattataagatgtgtcaatgtcataaccgattttatcattaatgatacctactttattccggataagggtttcggattctcagtttatctggttgataatgccactggagacataatagataaagaatttaagcttatggtttattatattcttgatacttcaaatcctgtaagaatcgttgaagaggaaatggttaaaggaaataaaacctacacatttgattgcagcgaaattccagagaatattacttatttattcatcggatgtatttttgatggggatagggatgaatattcctctgcagataaagagtatgctcttgaattgactgatagtagaatagaaacttctattaacgctaacattggtgattctgtcataggaaattcaagcagtttccgcgtatatgtccaagatgaggagaattggggacaaatcgatgcaactttagacatttatcttaatgaagaatattcccaaactgttactgcatatgcctatcttgaaaacgaagttcttattgagaatcttaaaaaaggtgaaaatactcttagaatagtatataacggaactgatatttatcaaaattctgaaaagtcttataactttacagtatctgataagagagctaacattgaagttgacgttagcaacataatcgttggagatgtgacaaaaatcactgttaatctgactgatgaggatggcaatattctcaataaggaattcaatgtctctatttataagggcggctcttattatgatgaagacagtgaattaatatactcccaagtttatactggatctgccaacatatcacttccagaccttgaaattgatgattattatgttagagcagaatttgtagatgaaagctttgtctattctcaagcagaagatagcgagtacttcaatgtttattctaaaggcagttacatagaccttggtaaaacttattggcctgataatgatgatgtggttttaaacataagccttaggaattatattgaagaaaatattaatggagaagtccttttccaattcaatggcactgattatccattgacctgcactgaagatggggcaatcttaaaccttggcaaattgcctgtaggcaaatatcaaatcttcgctaaatttgatggtgatggagaatatgaagcttccaatttaaccgatcaattaagaatagttaaagcaacaatcattaatgtggaagcttgtgatgtcttaaaaggccaatctgaaactgtaaacatcacattcactgacggcgacggcaatccattggatgtcaaaatgttagatattaacatttgggatactgatggaaactggctggattatggacaattgagaaattccattgaaattaagaatattcaaaccgattatattatccgtgctatgttaagtgatagttatggagagattggttattctgactattatccttcaagcgcatatggattcatcagagtcttaaacggaaccgaccctactgtaattacagttacaaacactgctaacattgatttggctatcgatggccctaaagtgattatcacccttacagatgaggatggaaaagctatttctggtgctaaattaaatgcagctgttggaaatatggaatctattctaacaactgacagcaaaggccaagctgttttggctataggtgcaaatgacactgctaaagtgacttatactgatgagaatggtgctggtgttagtgcttccattgtaaacaatgtgattaacactacagttactgaaatcgttgaaaagaacataactgttcctgtaactgcaaatgccaccattgatttggctattgatggatctgatgtagtcgtaagccttaacgatcttgatggtaatgcaattgcttctgctagcttggatgctactgtcggcacaactaactctaccttaaccactgatgacaaaggtcaagctaaagttgcaatcggcgtaaacgaaaccgctaaagtgacttatactgatgagaacggtgctagtgttagcgcttccattgtaaataatgtgattaacagcacagttgtaatcaacaatacagttaagagaaatgcaactaagatcatttacaataatatgtctactgtctctgtcaattctgaggttgatggaagaataggagaatactttaatgtgactttagttgactccgatggaaatgcattggcaaataagactgtatacattggattcaatggaagagtctatgtccgtcagacaaatgagacaggcggagcacagctacaaatcaacctcggttatcaaggagattacacatttgctatagccttcttaggtgatgatgactacaacggatcatttgaagttgctatcattaaggtaagcaagcaaagcggtaagcttacaagctctccaaaaacctataaggctaaagctaagactaaaacagtttcagctacattcacttcctcttatggaaatcctatcccgggcaagaagataagtttcatagtcaatggaaaaacctactcagctaacaccaatgataagggagttgctacagtcaaggtttccctatccaagaaaggaacttatacctgcaatatcaaatttgcaggaaatggaatgtacactgaatccattgcaaaatctaagataactattaaatag

SEQ ID NO: 80 - DNA, 1461 bp, Methanobrevibacter ruminantium
  source 1..1461: mol_type = genomic DNA
atggagtataaaaagatgcttgccgaaattgatttttcaaaggatttgattggtttttttgaagataaaaacttatgcataattaatgaatctcttcttgatggtactttcggtctttcaagggatattttgtttgataaacgtattctctttaacaatgattctctaatcgatagttttctcttaaatgctaaagcttataatttgaataatgaattttttattttattaagcaatatcattagaaatgactttcaagaagccatttccaataaatctaataatgaaattttggattttgaagaaactcttgagaaagagagcccattttattctggaatacctgtatccaaagaaatgtttgtaggtcgtaaggatagcatacataagatattaagaaacttcccacatatttttaagggacagactagacatttctttttaactggggataggagaatggggaaaacatcccttattgattttataggagaatatatgaaatcatatggtgttgtaagtgtttatatttccaataagggtaatgattctgttgaatttttagcttatgagattgttgaagggcttattgatgaattaacccttcctgatgaatcccttaaaacaaagattgttgacttctttcaagatcatgtggaaagtgtggagtttaaaggaacaaaaataaagctaacggtagataaaaatctatctgtatcttttaaagaagatttcattaatcatttaaaatcaatctatgatgaatttggaatggataaaaaaggaattctgatagttgttgatgacattaatggcctttcaaattcagaggagtttgttcattggtataaaagaatggctgatacaatacaagtttctcatataaatttgcctgtttattttttacttgctgggtatcccgagaaattttataatcttacaaggcttgatgagtcttttggaagcatttttgcttacgataacttggatagattatccaatatggaagttttggaattttttgaaagttcttttggtgaaaaatccatgcttattgataaggatgccttattctacatgattttgttttctcaaggtcagccattaatgatgcaagagctaggagaatcagtattttgggaatgtcctaatggccatattgataaatatatagcaatcagaggaatcataaatgctgcaaatgttttagcaagcaggcagataaaatatactttaaatatcctaagtgaagatgataaggcaattttcaagtctttaatttcagatggaaagttttttttcaattcatcagatatctgtgatgagggatttttagagtctatgtttgatttaagtctgattgaagtttccaaaaaagaggattatgacttttgttttaaaaatactttggtctttatctatttttgggtagaagcaatacaaggtcttattgagaaataa

SEQ ID NO: 81 - DNA, 609 bp, Methanobrevibacter ruminantium
  source 1..609: mol_type = genomic DNA
atggaaactaaaaacctaatcataatatgtgttacattaattattcttgtatgccttggcctatttctcatatcccatatgaacggtcaggaagaaacccatataaccattctaacaagccaataccttacagaaggagacacattaaaactaaagctatgcgataaggatggaaagggaatagccgatcaaaagattagcttaaagatccaatcaaaggatggaaactttaatgacgatatagtcattaaaacagatgagaatggtgaaagccaaattcaaaacctgcaaaggggaaattatactctcatagccaaatacgatggaacaagccaatatgaaggctatggattaacctatgaattcattgtaagccctaaggaagttgagcaaagctctaaaaccactagcacaactacaactgccacatccaataatggagattatgcgagtgactataaggcagatgatgttatagatggttgggatccttcagaacatgaggtttctagagagtatttaggagagggtgagtatagagtcaattatgatgatggatattctagagtgattgacagtgatggaaatgttttaagctatggatattag

SEQ ID NO: 82 - DNA, 2523 bp, Methanobrevibacter ruminantium
  source 1..2523: mol_type = genomic DNA
atggcaatggtatctgcttctgatattagtgcagatgattctgtatctttagatgcagcagattcagacatcgtaagcactgattctataagtgttgactctgtaaacacatattctgcagattcagctatatcttctaatgaagataaagacaattatcacccttccaatctaaaggatgatgataataagatttcaaaaatcaattatgaacttaatgacaccgtcttttatggagatgatgtcataataaacgcaaatcttacagatatggacggaaacataatcgatgagtttttccaagttacagtttatgatgaaggcaatccattgcagtcaaacagcttgaaaggcaaggggaccatgattgttcctacagtctcattgaccgagagcagttattatgatgttgccctaagttttgcaggcaatgaggaatatgcttcctgcaatgaatttacaagctttaacgtgacttttaaggaaaattcatatcttgccatttctaattatgattcatattctaaaataaattcaactaaaataaacttcatcatatatgatgtggatgacgaatatatcaacgacacagctgacatttaccttaatggagaatattatacaagcgtccttacaaatggaaatgagaatgaagtgaccattgaaaacctccaagtgggagagaatactgttttagttaaatataacggctctaatatatataagggctcagaagactctgctaccataatgggatatgaaaaggatacctccattggaatcgatgctccagatgtccttattggaaacgatgcacggataaagattaatctaactgatgaggacggcaatattgtaaatggcagagtggatgtggaaatttacgaatactatactggtgacgacgaatcttatgttccatttaaagacgattatgtcgtgaatggagaggcaataattgttatttatcaatccaaattgcgtgcaggcgttacatatttcataagggctgattatgaaggaaatttaacttatttcagatcagttggctctgactactttgattgttttaacagaagcactgaaatagtaatcgatggaagaatcgcatctgatgataaggatatcactcttgagattggtctttttgaccaaagacaagtgatgattgcagggcttgtcaatctaacagttttcgacaatgaatccaatgtggtcattgacacaatttctgttgaaacaagcgctgatgattatgtcaatgtgacaatcggcaaattgccttatggccattatatgatcaatgcaagctttgaaggtaatgaagagtatgaaggatgcgaattggaagctaatttgcatgtctttaaggcaaccaacctaaccattgaagttcgtgaccaaatcaaaggagaatcccaaatagtcaacttctctttagtctcatctgatggcggattaaatgaaagcgcaagtcttatcataagaaatatggaaaatgacttgatttatgatggtataatcaactttacagatggtaaggcttcctataacttagacaaccttgaagaaggtcttattatcttagcagattataacaatggaatggacttagtaggaccatttgaaacagtctatgattcagcttccaaatttgcaactgtaaggattataaaacagctcaatggaaccattgagtttgagcctgtcaatgattccatcattgtaaacttaaaggacattgatggaaatccaattgcagaggctcctcttagtgtggatgtcaacggacaagtatttgaattaattaccgatgataacggtcaggcaatgcttgacaacattccaaacaatgtcacaatcgaggttaaatacacagataaccaaggtcttgtagcaagcaataagattgttgtccttgttaaggaacaaatcaagcaaagggctgcaagcaagattgtctgcaagaacatgagcactgtagctgtagctacacctgacggcagagtcggtgagtatttcaatgtcaccttaaccgatgcagatggaaatcctttagtcaataagacagttatgattggattcaatggaagggtatatacccgtacaaccaatgagactggagaggttaacttacagatcaaccttggttataagggatcctatacctttgctatgtgtttcttaggtgatgaggattataatgcatcctatgaggtatgtgtgattaaggtttcatctcaccagcctaaattgaccggaagcgctaagacctataaggtatctgcaaagactaaagcgatatctgcaacattcaagacatctaatggaaatgtaataagcggcaagtctttagttttcattatagacggcaagctttataatgctaagaccaattccaaaggagttgctactgtaaatgtttccatctctaaaaaaggaacttattcctgtaccgtaaggtccagtgatgatggaatgtatgcagctaccagcactaagtttaatgtaaagatagtttag

SEQ ID NO: 83 - DNA, 840 bp, Methanobrevibacter ruminantium
  source 1..840: mol_type = genomic DNA
gtgtttattttgaaatttgaaattaaaagaagtttaatattcatttcaatattagcaatattgatcttatctattggaatggcatctgcttctgaagaaatttctgattctgtttcaactgatatagcatctgaagatgttacaagcgaaattcaaacagataatgtagaaattactaatctagatgaagactcttctttagatgatgctgatttagaaaaggatacaggcgataaagtcaaaaaggcaaagaaaagaattaatactaaaatcatctaccaaaatatgagtaccaccgctgtagttaatgaatatgatggcagaactggggaatactttaatgtaactttagtggatgaagacgacaagcctgtagttggcgaattgattcaaattggattcaacggtagaatttataatcgtaccactgattcaaacggtggagcccaacttcaaatcaaccttgcttattcaggtccttatacctttgctatctgctatttaggtgaagatacctatgaatcttcctttgaagttgcagtaattaatgttgctgctaaaaagatgactttaactgttccttccaaaagctataaggcatctgctaaaaccaaaacattaactgctaccttaaaggataataagggcaatttaattaaaagcaaacagatcagcttcactgtaaacggtaagacatacagtgcaaagaccgattccaaaggtgtagctactgttaaagtaagcctttccactaaaaagacttacagcttcacagcaaaatttgctggagacaagtcatttggtgcggttactaagactggtaaggttactattaaataa

SEQ ID NO: 84 - DNA, 14478 bp, Methanobrevibacter ruminantium
  source 1..14478: mol_type = genomic DNA
atgcaagcaattattccagttaaagacaattttctaattttagtgacaaatatgaagaaaagtgattttaaacgtatattcatatgtttagttcttcttacttgcttgattggtgcagtaagtgctgctgaagacgtttcagtcgatgatgttagcacagatgctgtagcagttgacacaatcactgaagatgcaagtgaccctacagatataagtacggtcagcgagccagtctccaatgatgttcaagcaaacacaagccaagaactaaacaaagaacccgctaccaagtctacaaatgtcttgaaagatggcacatccactaacatttatgtggcgactactggtagcgatgaaaatgacggtttaactcaatctactgctgtagctagtcttgctaaagcagttgagattgtaaatgctaccgctggtacagattttactattaatgttgcaaacggtgactataatattagcaaaatcgaaagtcctgcagctaaaaacgtaaatcttattggtgaaagcaaagaaggagcgattcttcacgcttctgatacatatggtatcaacgtttacgaagataacattgcatggactattgaaaacttgactatctgtgatttcaatagtactaccagtacaagtgcggctgtaagatgctttgctatagacagtgttttcaatataaacaactgtatattcaaaaatatcggttctaaaaacggtgctatttacataacttccactggaacaaggacaatctccaatgttcttatagaagactgtttcggtacttattcaagttcatcttccataattcacttatatggtgaaggtccagttactttggataatattgaaatacgcggttcctatatggatccttctgtaggtacagcaacatatttaaggtctgttatctatgccgaccaagctcaaaccaatgttactttaaagaattcccgaattgttgacaatatcggtgctatgggttcattgatcgaagctaaaggagcatttaaagtcattaacaccacttttgaaggtaattatctcaatacttcttctaatggtgtaaatggtggtactttcatgttctatagtggaaccagctccaattctgcatccaacattgacattagccaatcagtaattaaggacaatgtccttgctggtggaagcatcggtctcttcaattgcgtatatggtactcacaacattgaccacaatgtaatcatgaacaacaaatatgcaaatggaaacgacgttccattaggtagcttcagcggagctgcaatcagcactgacgacaactactggggaaccaatgaaaggcctaacaccaaaacaactgaatgggttatattaactgtagatactcctgaaatggcatttgttggcgtatcagaagccatacctgttaatttaaacacctataaaactacaaacaatgaaacaggtgctgtggaaggcatgcctgatgttgactttggcgtaacatatgctcttaatcaagcaaatccatctactgtaaccgttgcaaatggtcaaggaaccattaactatcttgcaactgttgatggaaatgaaacattaaccttttccactggagatgctttctcctttgatgtgaaggcggatattgcaagtttaatctatgtagatggcctaaacggcaatgctacaggtcctggtgacagtgaacatccttataagaccatagcacaagcaattaatgtagctgccgatggaaagattatcgttatcaaatcaggcacttacacagaaaacagtttaataattgcaaataacattactttaaaagctgataaaaacgcagaagtaatcattgatgcaaacaacgaaggaagaatatttactgtacaaaaagacgctataatcagagacttaaccttaattaatggaaagtccactggcaatggaggcgcaatatctcttgatagcggcttattaactttaaacaatgttaaaatctacaattcaactgcccaatctggcggtgcaattgttagtttatcaggttctcaattatcagtttccaattctgagttcattgacaataatgcaagcaatggcggtgctatatatgtagcaggcgttgctgatattacaaacaataagtttatctccaatgatcctgaagatggaggtgccatatatgtagcaggcgttgctgatattgaatccaacgaatttacttccaaccatgctactaatggtggagcaatctacattgacagtgaaaacaatcaaactatcaaggataacactttcacttccaacactgcagataagggagaagccatttatattaaaaacgctaatgtgagcttatctggaaacacaatgggtgaaaatgattcaatatatcttgatggtgcaagcttaaaaaccactcttactttcttaggcggaaaaaccattgctgctgaatttggacaaactctcaatttaacagctacccttaccgatgaagatggaaacaatataaggggcggaattgtaacattcaccgctaacggtgaaaccattgcaactattgacttatccactgacgctcaattgaaaacccaatatactgttcctaatgatgccgctggtgatataacaatttccggttcatacagtttagacaatggcggagctgtcatatccggtaagatacaccctgcagttcctcattggttcattgaagggggaagcggatacgaaacattggctgatgccattgatggtgcaagcgctggagacattatctactacgaccttccagaggactacactgaagtgattagcagcaagaccatcaacaaggcattgaccattaaaaacaatggtaccggtgtcgttactttagatggtaatcttgataggatacttagcataagctctgcttcagtcaatttggaaaatctgattttcattaacggggccactgccactaacggaggccttatctatttatccggttcagcatctaatgaccttaatataagtggatgtacatttaaggattctaaatttaccactacaagtacttacacatatgctgtagccatttatgctaatggcggaaacattaatatcaaggacagtgaattcagaaacttaactgctcctaaaacaggaatgatctatcaatcttcaagttcaggtgctataactatagaaaactctctattcgataacattacaggcgcatatgatggaggcttaattaactcaaatggtgatgtatccctagttaaaaccaatgtgaccaacattttcggttccacttctacaagtgattatggtttaatttacattaggtcttatggaggctttttattcatatctgagtgtcaatttataaatataagtaatgctggtgcccatcctgtctattacagaggaagcggcggttataacattacccaatccttatttatgaatattaactcaaataagataatagatgcaagtgcaaaaggttatgtaaattataatatatttgcaaacaattccaataattatgttttatatggaagttcctcttcaaaaatttctgcagattataatttctttggaagcaatagcaagcctacaagttatgtaagcaatgttaattacacttactggactattgtagaattgtcctctgcaagcgatacagcatatgtaggaaatcctacagacattgctatacagtttgtaggaaccgatggaagcgaaaaccttactcttgaaggcataatgcctgaatacacattcactttaaatgttacaaacggaactatcgttcctaacactgtaactcttgaagataacgaagctaatgcagaattcactccaacaagcgtgggaaaggtaaacattacagccactccaggtcctgcccaattgactcttaatgtaatcgacccatccatattgctcgttgtatccacagatggttcagacactaatccaggtactttaaacagtccatataagaccattgcacatgctttaactcaagcgaatgcaacaagaaacgtcatttatctcttatcaagtgatgatgcttacgcagaacatggattaacagtttcagacaatataactatccgagctgaagacaatactgttacaattgatggcggacaagagggacctatattcactgtcacaggcactttaagcatagaagacattatcttaagcaatgctaaggttgatgaagataatggcattggtggagctatctatctaaatggcggtaatctaactgtcaatggcgtggttttctctgattgtattgcagcttacggtggtgcaattgctacaactgcaggttcaaatttaaccgttattaactctgtattcagtgataataaggctaaatatggtggagctatctatgtggctggtgaagctaatatctcaaatagcgaattcagcgacaataataatgagattacttatggcggtgccatctatgtaaacggtactggccctgtagttatctctgcaaacgaatttgataacaataaagcaaacaaaggagaagcaatctacattgaaaacggtgctgtaaatgtatctgaaaacacaatccctgcaaacgaaacaatttatcttgcaggaggcagcataaactctgttctcatattccttgctaatggcactataagtgcagaatttgaagaagaggttaacttaactgctacccttactgatgatcaaggaaatgccattaagggaggtattgtaacattcactgctaacggcgaaaccattgcaaccgttgacttatctactgacgctcaattggaaacccagtacactgttcctaatgatgcaactggagacattctcatttccggttcatactctttagataatggtggagtagttgctacaggtattgttcaccctgcagttcctcactggttcattgaaggcggaagcggatatgagaccttggctgaagctgttgatgcagcaagtgctggagatgtaatctacggtgatgctggaacttatgatgtaagtgatcttataattaataaggctgtaaccattaaagcaaatgaatcaggttctatcgtcttaaatggtaatggtaaccaaatattcaatacccgggctaatgtcattttagataatttgacattcatcaatggttcagcaagttccaacggtggatttatttatgtatacagcgattccttggtaataaacaattcagtattcaaggatttaaaagctactggaggattaggctctgcaatctatgttgctactggaagctcaaacatcacaattgaaaattcagctttcgacaatattaaggcagctactggtttaataaactgcagatccaaaacaacaacatttactctagtcaaaaccaatttcactaatattgatgtaagcactaatggattattctatttatacgaaggaggacttcgtgcatacgaatctcaattcataaatgtttcaggtggagacggtgcagtagtttacttctatggtcaaagtgataatatagttacaaaatgtctattcgacaatgtaacaaccacaaaaaccactggaattatttattccaacagtaaatctgctaatataacttataatgctttcttaaatgtcaattatggagtttactcttcatcatcctatggtgaagtcattactgcagattacaactattggggaagcaatgacaagcctggcacaagccttgtaaattcaaacagcaaattaaataactgggtggtcatgactgtaagtccagacactcttgacagcttggattcaggcgctactcaagcattcactgtagacttcactcactacactgatggcactgcaaactacacaatggctgacaccattccagagcttacagtctctgcaagtgcagtcaaaggcagcttagaccaaagcgaagttgaaactcaaaacaatgtcgcaacattcacttacactggaagccaaaacggtgaagaaaccgtaactttcactaatgcaaatctaagcattcctgtaaagttcgttgttggtgaaggatactttggaattgtttatgtagctaagaacggcagcgatgaaaataagggtagcgaagatgctcctgtagcaactattgcaagagcagttgaaattgctcaaagaggttctggccaaatcattatcactgaaggcgtctataatgaaaacaacatcactataaatagcgaaatccctatttccattaaaggtcaaggagatgtggttattgatggtgaaggattgtcctcattaagcattttcactattaaatccggtgaagtttcaattgagaaaatctcattcagaaacaataaggctaaatttggtgcaggtgtaaatgttcaaggcacttccggttcatcattattggatgcaaatgtcttaatcaatgaatgtaactttgataatcttagctcagatgcttcaggcagtcaaggtggagcaatatatgcaaaatacttaaaaggaaacctagtaatcaacaattccaactttacaaactctattgtaaaaagtgggggtggagctttaactgttgcatactgtgcatatgaagatgctcttgacttggtgatttccaattgtaactttgaaaacaacactgctaataatggtggtgctgcatacttaatggctaatacaatcaatattgtaaacactagctttattaacaacaatgctacatacagccctggtgcacttgaattgtataattgtactggaactatggacaattgttctttcataaataacagtgctaaaaatacagctgctgcatttaaacttgaatttgttaaagatcaacctataaccagtttaatagttactaactccatatttaaggacaatgttggtagagatgaagtcgctcctgcaatattcgttgacagggcaagcttaaacatctccaattccattctattaaatcctttgaatattaataccagcacagttaccggatacggtgctgtacctggccaaggggtaaccgttgcaaacagtaactggtggggaaccaatgaaaatccatctaacttaactgcaggcagtggtgacaatgtcaatactacaatagacaattgggtaatcatgaatgtcagcccaactgaagctatcggatacactggtgaagctctagaaataactgttgactttaaatacactatgagtgctgatggcactattgaaacattagcaggtactttaccagaagagtttactgtaaatgctaatgcggctaatggtactttagataaaaccacagcagataccagcaatttacaagctaaattcgcattcactcctgaatttgctggagaaaacatcgttaacatatacacaacagaatccaataccgtacctgttacaataatggtaactgaaaaatacgcaggccctatctatgtaactaaagacggtgacgatgaaaatgaaggttcagaaaacttacctgtagcaaccattgcaaaagcaattgaacttgcccaaggcaaatctggcttaatcttcattggtgaaggtacttatgttgaatccaacctcacaatcagcaaagacttaaacatcactgcacttggagaagtgatttgggatgctaacggtcaaagggcattctccatgtctacaggtagtgtatccatttcaaacattacattcataaacggtaactacacccgcaatggtcacttgatctactgtgctggtgacagtctcaaattcgatgaatgtaagttcttaagcaacggtggaaatgtaactggtaccaacggagtcatctatgtagaacttgcaagtgcaaacttcaacaactgttacttcgaaaacaacactgcaggtactggaacaagctatggtttgatttccgctaaagattcagttattatagtagatggctgtacatttgtaaacaactttaataaaaacggctgtatttatgtaagcggatctaatattgggtccatggctgtcataaataataccaaattcattggaaacaatgctacctctgcaagcggaggttctggtggagctatctatgcaagcggttcaatggcttaccaatactctaacggtactgtaagacctggtgctcaatctgctgtctatgtaattgactgtgactttatcaataacactgctttcggcggtaaatactacaacgctgaaggtggagctatctttgtaaatgcaaatgcaacattatatgcatctaattcaagattcatcgataatactgctcttgattatgaagaaactaataaatcaggtcgtggaggagctattgcggccacaacaggtaatgtacaaatttcaaattgtatattccaaggcaacactgctaacaatggttctgttatcgccatgaaatttgcaaacaaagaccttacaactgtaaatgtcttaagcataagcaactctgtaatcatgggccctggcgaaaaattaattgtctctgacttcactaacggttctttagttgccaacaacaactggtgggcagcgaatgaaaacccatctgatagggtaagcgaaggaatcactgtagacagttgggtaatcctaactgcagatccaagtgaaatcactggaactcttgatgaaattataccaatcgttgctaacttcagacacaccaacagcactgatggaactatcggtgatttggaaggagaattcccagaactagaagtattcggaatgactttagatgaaggtgaaattactgaatccaaccttactgtagacaatgtagctaccctttactacactccagaagaaactggtgaaaccactgtatatgctatttcaggcaatgcaatggttccaatcaaagtaactataaccgacactcctcaacctgttgcagatgttatctatgtatcaccatccggtgctgataccaatgcaggtacatatgaagctcctgttgcaaccattgcacacgcagtggaacttgcaggtgctgaaggtgcttcaggtttagtcgtcattgaagaaggtatctataacgaaaacggcattgtaataaactctgctatacctattaccattacaggtaacggaactgttataatcagaggaaacaaccatgtcgttaacggaaacggagctggaagatttggcgatgtaagcgaatccacaagcataataattgtaaacacaactgaagctgttgttattgcaaacattgcatttgaagacaacattgcagcaaacggtggtgcaatactcattgcaggaaccagcagttccaacttattcgatgctgatgtattggttgaaaactgtagtttcaataacttgcaaggaagaaatggtggtgctatctatgcatactacgctattggcaacctaactgtagccaattgtgaattcacaaacatcaacgcaacttgggctgctttatgcgcatatcaagctgcttatggcgaagggctcactgtagagataaaagattcaagctttacaaacaactctgcaaacaatgctcctgcactttacttgcaagcaactaatgttgtaataaaagattccaactttacagacaacaatgcaacctaccaccctggtgctatctacttgcagaacactactgcaacaatcgacaattgtattgttgcaaacaactctgctaaatacgataaggcagctattgcaatccatggaggcaatatccaatacaacccagtaattgtaaaaccttctgaagtaacaattacaaactctattattgaaaacaacatcggtagggataaagcagctcctgctatctacttggaaaactccatcttaaacatgtcttactcttctgtagtaaacgaaatcaacattaacaataccgttactgcaacctatggagatgaaaaacctggacttgttttaatcaacaacaactggtggggaaccaacgacccaagcactaccatattcggtacaaacatcactatggacaattgggtcatcatgaatgtagaagcaaacgctactgaaatccttgctggagaagaagtaaaattaactgttgactttaaccatgtaaacactaccgctggtgagattgaagaattaaccggtggagttattccaagagaatcctacagtgtagcactttctgtagataatggtactgttgcacctgaaacattaaccattgctaacggagctactggcgaagcaattttcactgcagctaatgctaatgcattaataactgtaacaagcgaaaatgcagttgaaactatattgattaatgttggagaacaaccagttccattcactggagttgtatatgtctccaaagatggtgatgacgctaatgaaggttctgaagatgagcctgtagcaagccttgcaagagctattgaaatcgctacagctgaagaaggatctggtcaaatcatcattaaggaaggcacatacattgttgacggatacaacattaccaaagacttaaccattactggtgaaggagatgtaatactcgatgctcaaaaccaaggcaacagattattcaatatggcctatggtactactgtatccaatttcgaattgcataaccttgttcttgctaatgtaactgctatgtatggcgcagttgtttacagctatgcagctaatgcagtcttagacaacattacagttgctggaatcaaccatgaaatggctaggctcatttcaaactatggtaatttaacaattaaagactctgtatttgcaaacaacactgtaagcggaataatcacccactctggaaacaataatttaaatattgtcaatacaatatttgaaggcaacaatgtaacatatgattcatctatcatgggtgtggtttatgtttcatcaggcagaggaaacataacaatcgaagattccaaattctatgacaaccttgtacgtcaatccacagtacgcggttacacagatactaacattacagtcaaaggtactgaattcattaacaacactgcagacaactctccatattactgctctggcggagctatttttgcacaagctaatttggatgtaacagaatccatattcatcaataacaatgctagaagagaaggaggagcaatttatattggaatcaatggtgtggcaaacatcaccaaatccgagttcatcaataacacaatctatgataatgagtactatggagatgcaatctacactaaaggtacaactgccatcaattactgtatattcttgacaaatggcacaagatatgcagtttacaatggcggatccaaagaagtaaatgctcaatacaactggtggggcactaacgacgatcctcaaggatttgcttactctgcagatgcatctaactggattattatgactgtaaccgctccaagcactcaagatattcaagcaggagacgaatatgaattgactgttgacttcaaccattacactgatggcagtgacattttagaattgccagatagcttagctcaagaattgactgtagaattcacttctaccacaggcacatttgacaatcctgtagtaactactgaaaatcaagtggctactgcaaaatacactgtagttgcaggtgaaaacagtatcacagtaaaatccactgatgctgtatggaacactagtttcactgctggagaaaaggctaaggctaagatgaatgtttcaatggaaaacaatacaattattgtaacccttaccgatgaggaaggagctcctattgcaggcaaaaccattagtgtgctcattaacgaagacacattatccaacgaaaccaattcaagcggtattgctgcaatttcacttggcactttagatgctggcacttatccagctacaatcagcttagctgacagcgaatatcaagctccagagctaactgtatttgtacttgtagaagagactcttgtagacaaccctataggtgcagtcattgaattggctcttgctgaaaatggcacttccattgaagtgaccttgaaggacattaacggtcagcctattggcgatactattgttagatattacattggaagcactgatggagctctccttcctattgatgcaaacggtaaaggatcatttgacattgacaatacagtcaatcaaaccattaaggtcagctacactaaggaaggcactgaatggtcttcatattatgactttattgtaaacaatgaagtaactcctgttcctgttgccaataacgctaaattcgatgtaattgttcgtgaagatagcattgatgtattcttatacaacgataacttagacgatttcgaaggcgctaagattatggttactatcggtgaagaagatccagttgaatatattgctggagagaacggaaatataaccatccctatcaatggcgataccactgtagagctttcatacactgatgaaaacggagctactgtctaccacactgttaaagtttccactagtggtgtggatccttctgctgaaattgaaattatcgtcgaatctcataacgacacttctattgaagtaagcgtaactgttgatggtgatgatgtcagtgatggtgaaattacctattacattggtgatgatgacgatggaacagttgttcctattgaagatggaattgctatcataccattcgacaatactgtaaatcaaaccatcgaaatcacatactcagatggtgacgctacagagtcagtatactacactatagttgcattcactcacgaagttcctgttgagcctcctgtagctaatggcagctttgatgttgaaacaactgatgatgctattgttgctactttagttgactctgatggtaaacctattgctgatgcaactgtttctgctatagtcaatggcgaagagcaaaacttcacaactgatgcggatggtaagctaagcgttcctattgatggcaatgcaactgttgagcttagctacacagatcctgaaaacggtgctgtcttaaaatatgtaactgatgtggtaactaaagaagttcctattgaagttcctgttgttgctaacggcactatgagtgtagaaacaactgatgatgctgttgaagctaccttagttgacagtgacggaaaccctattgaaaatgctactgtcactgctgtaatcgatggtgaggaacaaaacttcacaactgatgcagatggtaaggtaagcattcctgtaggtgaaaacgctactgtagagctttcatacactgaccctgaaaacggtgcagttgttaaatacagcactaaagtcgtaactaaagaagtggaagttcctgttgacgttcctgttgttgctaacggaacattaactgttgaaacaactgacgatgctattgtcgctacattagttgacagcgacggcaaaccaattgctaacgctactatcattgcagttgtagatggcgaggaaatggaaatacctaccgacgaagatggtaaatgcagcgttcttatcacaggaaacaacactgtagagttcagctacacagatcctgcaaacaacgctacagtttcatactccactaaagtggtcactgaagtcgaagaagtaatcgttcctgttccagtagttgctaacgctacaatctccttaagcactgaagacggcagctcaatcgttgcaaccctaaaggaccttgacggcaacgcaatagcaaacgctacacttgatgctaatgtcaatggcgaagaaactaagttaactacagatgcaaacggaatagcaactattcctgtatctgcaaacacaacagcagtagtctcctacacagattctaacaaagctactgtaacaagctcaatgagcctaacagtaatcgaaaccatcgtagaaatcaacaagacaattgaagttcctccagtaagaaacgcatctcaaatcgtttgtgaagacatgaacacaattgcagttgcaaaagatgatggaagaatcggagaatacttctacgtaaaactagttgacgcaaacggcaatgcattagtcaacaagtccgtacaaatcggattcaacggcagagtatacaaccgtacaactaatgaaacaggtgatgtaaaactacaaatcaacctcgcatacaaaggaacctacacattcgctatcgcatacctaggcgatgacaactacaacggttcatttgtcgtttcaaagattacagtaaaacaacaaagtcctaagattactacaacttccaagacttataaggctagcgcaaaaacaaaagcattgaccgctacctttaagacagcaaatggaaacctaatagctgataagactattaagtttactgtaaacggtaagacatactctggcaagaccaatgcaaaaggtgtagcaactgtaaaagtaagccttaacactaaaggaacttacagctttacagcaaaatacgcaggagacgacacctttaaggcaactagtgcaagcggtaaattaactattaaataa

SEQ ID NO: 85 - DNA, 8031 bp, Methanobrevibacter ruminantium
  source 1..8031: mol_type = genomic DNA
atgaactttaaaaaacttttaatgatttcattaatcttattatttgtcttatcagtaggatttagcacagcaagcgctatagactctgataatctattagatgaaaataataatattaatgttaattatattgattctgataattcagattctattttaatttctgacaattcaaatgatgctaaatcaaataatttaatattaaataattctataaataaaaaagaattaaatgataattctaattctaattctaatttagagtgtgattcttcaatcaatgaaaatttagatttagaaaataattacaaaattaatgaaaaatctgcaggtcttaaagacaatacaaatacaatatacgtatctgtagacggaaatgatgaaaatgatggtttgactctagaaacagcagttgcaaacatatcaaaagctgtctcacttgctggagaaggatacaccatccacatatccagcggtacttatgaacaaaacaagtccacacaactgtctcatgcatttaactttattggagaggatggaacaataattaaaagaataggcacagcaaatgcctttacatacacttcagacactaaaaagacaataagctttaaaaatataatattttcttcaaccactccaaatccaagcaatccaatattaagcatggctggaggcgccgatttgcaaatagacaactgtacatttacagatgcaattgcaggtagaaacggccttatcagatatttgggatcaagtacaggaaagattacaaacaccaatttcattggattgaccggctctacaagcgcttcatccagctatatcactgcacttgcccaatctaaggtaaaggttgagaattgtacctttgcaaatatcaatgaaccaggctttttaaattcacttgtttatgtcaataacaatgagactaatttaacattggtcaactgtgtttttaataatataaccggcaatttgaatgctgttgttaataatagagggtatatgcagattaaaaattgcagtttcactgatatttcattaagcggaaacagcccaagaggaattgtatggtcttcagaaaccatttcaaaaaattcaatcacttatataaactcatctgtattcattaataattctgtaaatacagaagtggttgtaaacagttcagtcattcaagccaaatctcctactatagttgaatacagtgcatttttagacaatgatgttgtttttataatcaacaatgacaatgacactgatgtaactgcaaattacaattggtggggaactaatgagggccctaaaaactgcagtgtaaatagagaatcttctgctagttctaatccttcctcctctagtgaagaaaagatatctctagtctcagatggagttacagttgacaattgggccattatgacagtagatctagaaacttcaggcctgattgcaggtgaagactatccaatcataatcaatatcaataaatacatgaatgaaaggggagagatagactcttcagtagaatatggaataagcggtgccgaaatattattaagctctcaaatagggaccttcaattccgatttcataatttacaatgaagataatggaaacataattcaaaatcaggcgaaagtctatacaaataatggagctgtaacagttttctataaagctaccgaagaaggttcagatacacttaatatcagttccggatatgaagaaatagtatacaaccttgaattcggacaatcaattgaatataatgacatttatgtttctaaagatggaaatgacaacaacgatggtcttagtaatgaaacctctgtattaaccattgcaagggcattggagataggagaaaatctaaattcaaatataagaattcacataggcagtggaagctatcatgagagtggatttgaattaaatggaacttacacagttcaagatggtgtcttgcaagttaaaagaaccacatactcattcatcggatatggaaatgtggtaattgacggagatggccaaaacaaaagcctattcacagttcgaaacaattcagtttcatataaaaacatcagatttacaaatgttgacggtgccacatacggtggggcaataaatggtgacaacttatatcgaaggactgcgtatattgatttgacaattaataattgtacctttgatgacctgcatgttaaatctagtggaggcgctatttatttaaattacgtcagtggaaggatctccataaacaataccaaattttataatcttactaccaattcaagttggggtggggccataagcgctgaagaggcctttgatcttgcaagagttaaggtgactaactctgactttagggacaattatgcaaacaatgcccctgcaatgtatttgagggtgagcaatgtaacagtcttaaatagcaattttataaataacagcgctaaatattatcctggagccattcacttttataatgcctctgcaattatagaaaactgtgtcatagcaaataactctgctaagaaggattctgctgcaataaagataagcgaaggcactaatgatgttggaaataagataatcatcaaatcatgtatcattgaaaataatagcgctcgagatgagatttcccctgcaatctatgttgaaaagggtgcattggacatatcctactcatctgtcgttaatgacttgtccattgcaacaagaacctattactctaatctatatggtctccaacaaggcgttgctatagcaaataataactggtggggacttagcaatccatttggagaaaatgagattggaggaaactattcatcattattaggtggcgtatttaacggatctaacattactgtagacagttgggttattttaaatgcagtcttaaatgatacaggtgttttaaaggttggaaacattgtaaatattagtattgactttaatcatgtaaacactacaagaggagagatagagctcttgtctggaggcaagatacctaaagagtacactttacgcttaaacgcaactggaggtatcgtttatccaaactatatgaagacagttaagggagaggctaattccaagtttacagttagggatttggataatcttggagatgactttgcatcctgcggatttgatattatatccgacaatgagattacccatatagtctttgaaataaacaattataaaggggtaatttttgtatccatgtctggaaatgatgattgcaacggctctatggatgctcctgtaagaacaatcaataagtctatagagcttgctcttgatgaggagtttggttctcatgagatatttgttcttccagggacctatgaggcatatggcatagaattagacagcacataccttagcattacaggttctggcagggacagcacaattctggatggagtaggatatacaggaggaatcttcaatatatttgaatcagaattgactgttaaaaaccttaccgttataaatggagtcaatacagtctcctctggtggcgcatttacaaatatgggcaatttgactttagagggtgtcaatgtctcaaactgtcaagtaaggaatgcaaatggtgcagcaatctattctgtcggcaatcttaatcttataaactcaagctttgttaagaacacagcattatcaggcaattatgcaaacggaggggttatttatgccgatggatattccacttcccttccatatcctccaagcttgaacataactgactgtgaattcatttcaaatgcagcacaaggatcaacattcggcggaggagtaatctatgcacagtaccttgacggatataagtcaatcaaaaactccaaattcatcaataacactgcagaattcggaggagcaatattcctgcaggactccgaaggggatttcataattgacaatacaagcttcattggaaataaggcaacaggccaagcaggttccacaaatccatactatggtggaggagccttgaacctgattggaagaactgacggccgagagggcaatttcattattacaaacagcctttttataaacaattctgcaaagaacagccgtggaggaggagctatcctagatcggaatgttgatttgaatataactaattctgtatttttaaacaatacagatacaaataagagcgttcaagtatttaaggacactaccgtttatttccctagcggaggaagaataagcttggaagacaattggtggggagctaatgagttgagcagtttatctacagttgctgctaatgtgactattaacagatgggtggttatgaatttatctgttgagttgattgatgatcttgattcatggggtcttaatttaggaaatagtttagatgatggcttaaacactgatttaggaaatacactaactgaaaataatcttaataattatctagtaaaagttcttttaaatgagtacaacgatggaactctaatagacaatcctaattactatcctcttctcagattatacactttagaatcttctgatggagaaataaatccttcctttggcattctgcaaaacaattgtgcaactgccttattaagctctagcaatagggaaaatgtgattagggcaactattgatggagaaactttggaattcaatacaattgacctttacacaaaaacagttcttgatattgaatttgactctccaattaaggcaggggaaaatcttactgtctatcttaaccttacagacatagatgataatccgattaatggaactgtaattttaaacatctcttctgatttgtatgaaacagtagaaacagtgaatgtaaatgagggcaaaggatttaaagagttcagcggattgaaagtaggtgtttacacagttttagctaattattacggccaatcaatttatttagactcaaatgatagcaaagtccttgaaataagtcctatatccagttatttggatttagaatctaaggagattagtatattccttggatttggaaatctaactggaactttaagtgatgataatggccctatttcaaatagaaatgtttcattgattattgatgatgatacaatattaaatggattaactgatgaatcaggacaatttctaattgatttaagcagtttgaaagttggaaattattctgatttggaattggtctttgaaggtgatggtgatcgcttgtcatcatccgaccttgttaatataactgttaagaagattgttcttaatttgaatttgattgtcgaagatgattctattgttgttaatttgagtatagatgattctgttcttgattatttaggtgtggatgattcattagatgatataagtcttgaaggattgacagtattggctttcattaatgagactgatagagtctctgatttaatcaataaatctgcaattacagatgataatggaattgcaactattgacattagtgatcttaatcctggcaatttcacagctttagttagcctaaaagaaaatgataattttgaaatagattcaaataaggatataaacttctcaattgatagatataaaaccaatttaactgctattattgatgaaaataatagttatattcttattaatttaactagtgatataggtcttgatagtaaaactgtaagtgttactattggtaatgagtcttttgatgttataactaatagttctggcctatatggtcttgatattagtgatttggcccctggatattatgattgtttatttgtatttgatggtgatgactattatgattcttcatctgattctttaaatttcacaatcgaaaatcgtatgagtgaattaactgcaattattgacgataattatgaatctattctcattagcttgacttgtgatggcattggccttgctggtaaaactataagtgttactattggtaatgagtcttttgagcttataactaatgattctggtctttatagtcttgatattggtgatttggttcctggatattatgattgcttgtttgtctttgctggtgatgactattatgattcttcaagtgattctttgaatttcaccattgacaagtattcaagtgatttaactgctctaattagtgaagattctatccttattagtttgtctagtaataatctaggtcttgataataaaactataagtgttactatgggaattgagtcttttgatgtaataactaatagttctggtttctatagtcttgatattagtggattgggtcctggagattatattgattgtctgtttgtctttgctggtgatgattattatgattcttcaagtgattctttgaatttcacaattgacaaatacgacactaaattggatgctaaaaataccattggcagttttgctttagtaaatctcgatgctaaattgacaagtggtgaaaatgctcttaaagacaaatccattagtcttcatattgcaaataagaccttcactaaaaagactgatgatcaaggtaaagttgtatttgacttatcttcatttgatccaggtaattatattgctctattgagctttgctggtgatgaatattacaaaaattcaactgtttctgttgaagtcattataaacaagttgaatgctgatttaagcagtgaatttaaggataaaaaattatatatttctttaagtcataaaggcgctcctgttaaatatatgaatcttgctatagagataatcgattcatcaaataagagtacagtatcaaatgcactaacagataatgaaggtcatttcattatggatttaagcgatttaagtcctgatagttatgtttctatcataagggcaattggagataagatttataatcctgcaagtgatgaaatagaatttgtcattgggggagatactccatctaaatccactagaactgctgcagacttacaaaaacttatagatgatgcaagtagtggagatattatagatttaggtgaatatgactatcttaatgtttctaatattaatattacaaaggatattgttcttattggaaacaatacaagcatttcaagttcaggagatggaaatccaatattcaatattgctacagggttaagtagtgttaaaatcagtggaattgactttaatgcatcaaatggggatgtgattgttaaggcaattgctcaaaacggaactgattcattgtcaatcattgttccagctattgaaatcaccaataacacagtgatgggagacaatatagttccagaatccatcactatattagaattggattcagataggggagttcttgctccgaataatgagatttatattgccaataacactttggaaatcggaatgaaaccgtttgaatttaaggtcaagagctttgaaaatgattcaagtgctaatgtgcctatcggcggtgggttgaatggcaaaaagacttccatcatccattatgagaatatggacactgtagcagtcaatatggatattgaaggaagagttggaaagtactttgaagtcaatctaaccgattcagatggcaatcctttggcagataagaaggttcaaataggattcaatggtgtagtatacaatagaactacaaacgccacaggcggggtaaaactgcagataaaccttggatataagggaacttacacatttgccatctcatatcttggggatgatgaatacaatggaagctttgtagttgctaagataaaggttagcactcaaaagacaagtcttacaagcacatcaaagacctataaggcaagtgcaaagacaaagactctcactgcaacacttaaagactcaaaaggcaatttaatagctggaaaaacagttaaattcactttaaatggaaaaagctattcagctaagacaaatgcaaagggtcttgctagcgttaatgtaagcatctcaagcaagaagacctatagctttacagccaagtatgcaggagatgatatgtatgcatcttccagtgcaagtgctaagcttgtaattaaataa

SEQ ID NO: 86 - DNA, 10176 bp, Methanobrevibacter ruminantium
  source 1..10176: mol_type = genomic DNA
atgaagattaaaaatattaaatatctactgatatctttagttcttctcatgtttctaataggtgcagcaagtgcagcagatgatgctgttactcttgaaggggatgctgcagctgttgattcaattagtgaagatgctagcgctcctataactactacggttagtgaagatgctagcataggtactacttttagtgatagcgctatcgaaagcgattctattcaatctaatgatgatctggaactaaagaatgtaactgacgttaaacaaaaggattcctctgatgctttaaaagacggagaatccactactatttttgtatccactgggggtaatgacaataatgacggcttaagtttggaaactgctgttgccactgttgaaaaagcaatcaatataacaaaaactggtggaactgatttcaccctcttgatttcaaacggtgattataacattgaacaaatcaccatccctgtcggcaaatatatttctattattggtgaaagcaaggagggcacaattcttcatgcttccggcgattatggatttgacatttcatacggatgtaattttgaaaacctgaccatatctgacttaaacagcacttcctctacaagtgctgccataaggattattatggataattatgatattaatataaataactgcatatttaaaaacattggttctgcttatggggcggttcatgtttattccaatggaaaaacctccatttccaatgttcttatagaagactgctttgctaccaaatcagatgactcttccataatccatgtttctggaaaaggtccggttagtttggataatgttgaaataagaggctcttatatgctgcctcctgcttttccatggagtaccccttatttgggagccattatctttttaagcagcgctgatcctgatgtgactctaatgaattcaagaattcatgataataatggttctatttattccataatcacatctaaagggaaaattaaaattatcaacactacaatttccgataactgccttaacgcttcatatgcaagcatattttccagtggagtaaattccaatactgcaactgacataactgtcactcagtcagtcattgcagacaatattcttgctaataatgctgtaggtctcttagacgcccgatttggtgtctttaaggttgaccacaatataatcatcaacaataagaatgcaaatggcaatgatctgtcagtaggcgacctttctggagcctcttcattctccattgacgataactattggggtactaatgtaaggcctaacgataaaacaagcgaatgggtcatcttaactggagatgtagctgaatgcgcatttgtaggggtttgcgaaaacattaagattttcttaaacagctatgtgactgaaagcggcgaaataggtgttatagatggcatgcctaccgttgagttagctgtgggatatgctctcaatcaagagaatccatctgctgtgaccattaaagatggagtgggaactatcagttaccttgcttctattgctggagaggaaactttaatcttatccactggagatgtctttgaatttaatgtaagctctgagattggttctttaatttttgtcgatggctctgttgaaacatctggtgacggtacacaggaaaatccggtaaagaccatcgctgaagctttaaatatagctgcagacggtaaaatcattctcattaaaaatggcacttataaggaaagcaatttgcttgtggataaggacattaccataaagccatatgatggcgccgatgtaatcatagatggagacaatcaagacaggatatttacagtcacttccactgctaccataagtgatttaagcttaaccggaggaaatgccactggtgatggaggtgcaatctatctgaatggaggcaatttaactttatccttcttaaatatctctaactgtattgcaagtgacaatggtggtgctatcgcaactgctgccggatctgatttatatctttccaattcaatcttcactgacaatttcgcaagcaaaggccaatccattttcattggaggggaagctgaaattttgatgaatgattttgtagctcatatggatgtattaagtcctgatgcatctttcaatgccattagtataaacacagactctcctgtaagcatcgtttcaaataactttaatgacaatggcgcaattaagggacaagcagtttacattaaggatgctcctgtaagtttgtctggaaacattatggatgatgaaatcatttatcttgaaagcggaagcgtaaattccaatctcatttttatggatggaaaaacccttaccgttgaaccgggagctgatgttaacttaactgccactctaactgacgataagggaaatctcatcagaggaggagagctcactttcactgcaaatggtgtggctgttggagaccctattgatataagcggcgacaatgaattaagaattccttatactcttccttctgactcagagggagatattattatttccggttcatacagctttgacaatggcggaacaatcgtaaacggtacaattgagcctgatattccatattggtttattgaaggcggaagaggatataaaaccttaaatgagaccgttgagaatgcagttgctggagatgtcatctatggcagtccaggcacttatattgcaaatggcattttcattacaaaagaccttaccattaaggccaatgaaactggagatatcatattggatggtaacggatctagagtatttaccataaaaaatcaagccactctaagcttagttaacttagacttaagcaatggaggatctgaaggcggaggatttgtttatatatatgcggaaggtggaaatcttaacgtcatcaattccactttaagggatttgaatattgttggctatcctgagtctttcgaaggaggagctataaaaacttatgcttcatccacaataaatattgaatcttcccattttgaaaatattaactcttcagcttttgctccaattctttctggtttaggtggtgttaagcttagccttaccataaaggattccagcttcactgatattaagggcactgccatgtatggcttaatgaatgctccaggtaaagtgaatattgaaaggtctaattttacaggtataattggaaataccactaagcaaactggacttatctttgcagactccacttctaactatttaattaatgaatgtctcttctctaatatttcaacagattctgttatccgatttaagaataatggaaatataactgttaccaaatcagtattccagaacattcaagacacagggggagctctttatatatataatccagggtctgccaaggtaaattacaatttattcatagataatacaaatcttaatgccgatagcaatagggacatctattcctatggctcaaatgtcgatttgtcctataacttctggggaaataacagcaaacctacagaaagccagatctatgatgtttcaaaagctccttactggactatagaggaattgtccatgaattccgactatatatttacagacgaaactgcagatattgctgtacagtttgttggaaccgatggggaagaaaatctcactcttgatgatgtaatgccagaatatagctttaatctggaagccactaatggaactcttgatgcaaatactgtaactcttgtggataatgaggctattgtcacattcacccctccttctcttacaggaactgtaacagttacagccactccaggccctgctgaattgacatttgatgttattgagacttcaaaattgcttgtagtgtccactgctggtagcgatgaaaatgcaggtagctttgaaagcccttatagaaccattgcatatgccttaactaaggcaaacgaaacaagaaacattatctatcttatatatactggtgaggactacaaagaacatgacttgactcttgctggaaatctgactattatgggtgaaaatgatgaagtgaccattaatgcaactatcggcaggatattccttgtaactggcaatgtaagcattaaatctttaactttgtctaatggttttgatcaggactatggtggagcaatctatgtagatggaggtaatttaactctagattatgttaattttaattctaacagagcttacggcttaggtggtgctattgctactagttcagaatctaatttatatatttccaattctatcttcaccgacaatttcgcaagcttcttcggaggtgccattggaactgcttctggctctaacttaagcattgataattgcatattcagtgataataaggctagttacggcggtgccatctatcttgctggagaatcccttatcttaactagcacatttgatggcaatcatatcttgctggatgatggaagaggaggagccatttatgtaaacaccacagactctgtagtgatctcttcgaacgaatttgaaaacaattttgcatatactggagaagtgatttacattgaaaacggtattgtcacattatctgaaaatacaatagacggtgataccatttaccttgcgggaggtagcgtaaactccaatcttgttttcatggataactccactttaaaggtagaattgggagagacagttaatttgactgcaagccttagtgacgattgtggaaatcctataagaggaggaagcataatatttacagtaaatggcgaagccattggagaccctattgacataagcggagacaatgaattgaagaccacttacacagttccaattgatgcaagtgaagatatgatcatttccggttcatacagcttggacaatggaggaatagttaaggcgggttcccttcacccttccgttcctcattggtttattgaaggtggaatcggatatgaatatttatctgaagccattgatggagctgaagctggagacgtaatctactacgaccttccagaggactacactgatgtgattagcagcaaaaccatcaacaaggcattaaccattaaaaacaatggtactaatattgttaccttagatggggatggaaataatgtctttacagtaagcgctgatttggatttgattaacttaaactttgtcaatggtggaaataccaaaggcggattcatatcacaaagttcaaataaccttaatattatcaattccagctttaaaaatagtgcttccagtagctccgcagctgcaatcctaagctcaaatggtaatctaaacattgaatcctgtctatttgaaaatataagttccagcgcttcaagcaatggtggaattatctgttattctggaagcagcggaaatttaaacattaataattcagcattcaataacttatcaggtaaatatgacggtttcatcatatattccagcacttttacaaatattgcaaactccaatttcacaaaccttttaggtccaactagctctggctattggggaggcatttataacagcaaatccttgaatcttacaaattgccaattcataaatgttacaggccctaaaggtgcagccatctattcaacaggatcacttaatgtgacaaggtctgtctttgaaaatattattacaactaattcagtaatttattcatacagttccgattcctttataaattataacatctttgcagataacaataaggccattgattcaactagagcaaatgcagattacaacttctggggatctaatgatagaccaagttcagatattgtgagctcaagcatataccatgactgggtcattgtagagctttcttcatccaatgataccatattcttaggatcaactgaggatatttctataggatttttggcaactgacggagaggaaaactccactctagaggatgcaatgccaagctatggctttgaattgactgtcacagatggaaccattgaaccttcccttgtaattcttgaggataatgaggcaaaggcagtttatactccttctgctgtaggaactgtaacaattacagctagccctggttctgctgaattggaacttaatgtaatggacaaatccactatgcttatagtgtctgctgaaggttctgatgaaggagacggcagttttgaaagtccatatgcaactattgcacatgctttaagtcaagtaaccgaaactagaaacattatctatatcctatcctctgataaggcttataaggaaagcggattggtcctttctggaaacgtaattattatgggtgaagacaattcagtaaccattaacggtggaaatgaaagcaggatattccttgtaactggaaatgcaagcatcagtgacttgatcctatctgaaggaatggctgatgattacggtggagcaatctatgttgatggaggcagcttggccttaaataatgtgattatttcacagtccaaagcatctcttggaggagccatctatatcaacacaagctctgatgtcagcataagctcaaatgtctttgaagataacgaggctgaaaagggagaggcgatatacattgaaaacggcgctcttaccctaactgaaaatgctatgggtaatgaaacagtttaccttgctggaggtagcgtaaactccaatcttgttttcttggcaaacagcactctaaatgcagagtttggaaagaacatgactataactgccactctaactgatgattgtggaaatgttatccgcggaggtgctgtggtcttaacagttgatggcgaaactattggaactgttgatttaagtggaagcgatcctcttgaaattgatttctatgttcctcaagatgcaagtgaagacatgcttgtttcaggttcatacagctttgacaatggaggaactgtctccacaggagctatccatccttgcatattttactggataatagaagaaggtagatacggatttgaaaccttggatgaagcaatagacgcttcccgtgacaatgatgtaatctattatgaccttccagatgattacgaagaaatacttaatgacaaagtcattagccataacttggtgattaaaaacaatggtactggaattgtgactttagacgctgacagaagaagaatgtttgatttaagtggagatttggagctgaataatttagtctttataaatggggctactaataaggatggcggatttatctatcaaaattcaggaagccttaatattataagttccatatttaaagactctctttcatcatacagcggtgtggtagtcttttcaaatgggggtgacataagcatcgatggctccagatttgaaaatctgacttcaaggaagggacctattgactttgagtcaaatagcggaagagtagacattagaaattcagtatttgaccatataaccggcaactatgatggatttgttatctattgcaaatctgatttgaatattgaagattgcaatttcactaatctcaacagtacaagggctacaagtacaaattattatggagctatctgtcatgaaagcggcagcggtgatttaaatataagtggctcttacttcagtaatatttatggccctactggaactgctgtctactacaaaggttccggtacatataacataagtaaaaatatctttgaaaacatcagctccggagcaaatacttgcataatctatggcggaagctctggaaacattaactataatgtattcctggacattaactgtggcattaccacaagcggaggaaatattgattataattactggggaactaacgattatgccggccttggcataaatggaaccgtccctaataattggataattatgaatgtggtagcaaatgattccgatgtgattgctgaaaatgaagttccaataactgttgacttcaatcattacattgaaaatggcgagattaaggaattggaagacagtttggctaaggaattcactgttcaattcacttcctctacaagtgaattagacgttgatgaagtgaatacaaccgatcaagtggctattgcattctgcactgctgttgtcggagagaacaatatcacagtcaagtcagataatgcagtagtcgaaatcaccttcaatgcaagcgaacctcttgaatctcatatgtctgtagatatggatgatgacaacaatctcattgtcacaatcacagatggagaaggcaatggaattgaaggcaagacagtatgtctattcattggtgatgaagtcttaaatgccactaccgattcagaaggtaatgcagtaatcgctcttgatgaagtagatgatggtgcttacactgcaaaaataagctttaaggatccagagtataaggatatcaatgaaaacacttttgttgttataagaactaatgagcttattgaacctgtagcagcaaatattagcattgaattatctattgaagatggcaaggtcattgctaatgtcactgatcttgatggagttcctttagcagaaaagcttcttacagtaagcattgacggcgttcctgttcttggtgctaagactgatgagaatggtatctattcaattgatgtcagtcctaatgcaactgtgactgtttcctgcagtgatgttaacggtgctgttgctagtgcttctatcacttatgttgaaaacaacaacactgaagaagtggttgttattgagcctgtaagcgctaacattactattgtattgttagttgctgagggtaatgtcgttgcctatgtgactgatcttgatgacgttcctttagttgaaaaacttcttagcgtaagtatcaacgacatccctattcttggcgctaagactgatgagaagggtatttggtctcttcctatagaggctaattcaactattgtagtctcttgcagtgatgttaacggtgctgtagctagtgcttctatcacttatgttgaaaacaacaacactgaagttgttgttgagcctgtaagcgctaatatagttattggattatccatagttgatggcaaggtcattgctaatgtcactgatcttgatggcaatactttagcagataagcttcttagcgtaagcattgatggcgttcctgttcttggtgctaagactgatgagaatggtatttggtccattgatgcagaagctaattccactgttgcagtctcttgcagtgatgctaacggtgctgtagctagtgcttctatcgcatacattgaaaacaacaagactgaagagataattgtacctgttcctgttcctgttcctgtagttgcaaatgctacaatatccttaagcactgaagatggcaaatcaatcattgcaaacttaaaggaccttgacggtaaggcaatagcaaacgctacccttaacgctaaagtcaacggtattgaacaaaacttaactacagatgcaaatggaatagcaactatcccagtatctgcaaacactactgtagaagtttcatacacagattccaatatggctactgtaacaagctcaatgagcttgactgtaatcgaaaccatcgtagagataaacaagacaattgtagttcctcctattagaaatgcaagccaaatagtctgcagtgacatgaacacaatttctgttgctcaagaagatggaagggtcggcgaatacttcaatgtaaaacttgtagatgcaaacggcaagccattagctaataagtttatccaaatcggatttaacggaagagtctacgaccgtacaaccgatgaaaacggaagcactaaattgcagattaaccttgcatacaaaggaacctacacattcgctatagcatatcttggcgatgataattataatggttcatttgttgtttcaaaaatcaaggtaactcaacagactccaagcttaaagacaagctccaaaacctataagactagcgcaaaaacaaaagcactgaccgctacctttaagacagttggaggcaagccaataagcggtaagacagttaagttcacagttaacggcaagacatacagcggcaaaaccaatgctaaaggtgttgcaactgtaaatgtaagcctaaacaagaaaggaacttatagctttacagttaaatacgctggagacgatatctttaaggcagttagtgctagcggtaagttgactttaaagtaa

SEQ ID NO: 87 - DNA, 1323 bp, Methanobrevibacter ruminantium
  source 1..1323: mol_type = genomic DNA
atggaaagtcaaagtatattaatcaaaaatgcaagcatattaaatccaattggtgatggaaaaacagaagagtttaggaaggatcttttgattgttgatgataagatatctcaaattgatgaggatatagatgaatccaatgcagataagattatagacgctagtgataagatattgatgcctggatttgtcaacacacatactcatatttccatgtctttgcttagaggcatagcagatgatttggaacttgatacatggttgaatgaccatatatggcctatggaagcacatttaagtgaagagtactgctatatcggagctcttcttggtgcatgtgagatgattaagtctggaaccaccacattttcagacatgtacttctatatggatggagttgcaagagctgttgatgagattggaatgagaggggtcctttcctatggaatgattgattttggaattgaggaaaaacgtgaaaacgaatttaaggaaaacatatccttgattaagaagcataacaacactgcagatggtaggataactgctcgattcggtcctcattctatctatacagcttcagttgaccttttggaacgtgtcagaaaggaagctgacaagtacaatgtaggcattcacattcatatgaacgagacattgaaggaaatcaatgactctaaggaaaaccatgatggaaaaaggccttttgagctattggacagcattggatttttggctgatgatgtggtagctgcacactgcgtatggcttgatgatgctgagataaaattgattaaggacaatggagtttatgcttcccataatccatgtagtaatatgaagcttgcatctggagcagctcctgttgctgagctattgtctcaaggcatttgcgttggccttggaactgacggtgcaagcagcaacaataatcttgacatgtttgatgagatgaagtttgcagcacttcttggaaaggcctctacacttaatcctaaggtattgactgctgaagaggtggttaatatggcaactatcaatggtgcaaaggcactcaatattgatgcagggaccattgaagtgggcaaaaaggcagatattattcttgttgatgcaaatagtcctaacatgactcctatgagcaatacactttcatctaatcttgtatattctgctaatggatctaatgttgatacaactatctgtaatggtaggatccttatggagaatagaaagatggtgactgtggatgaggagttaatattatccgaagcaaaaagagctattaaagagatgaaagagttaagagaggctgatgaatag

SEQ ID NO: 88 - DNA, 1656 bp, Methanobrevibacter ruminantium
  source 1..1656: mol_type = genomic DNA
atggaaagtaaaattatcaaatcagatgttttgattataggttcaggaggagctggttgcagagcagctatagaagtatccaatgagggcaaagaagctttaatagtttctaaaggactttcattccgctctggttgtacaggcatggctgaaggtggatacaacgctgcacttggacttgttgaccctgaagacactatcgaagcacatataaaagacaccttaaaaggtggagcataccttaatgaccctaaattagtagacatattggttaacgagtcaccaaaacgcttgagcgaccttgaagagtatggtgcattgttcgacagacaagagtctggagaattaaaccaaagaccatttggaggccaaacctatagaagaacatgcttccagggagacagaacaggccatgagattatgactgcccttaaggaggaaatcctaaagagaaacataaaaactatggatgaagtgatgattacacagcttatacttgaccctgctgaatcctttatgccaaaggtcatcggagcagtaggacttgaccttaagacaagtgaaacaatcttcttccaggctaaggctgtcattcttgcaagcggaggtgctggtcagctataccctgtcagctcaaacacaacccaaaagaacggagacggacttgcaatagcatggaatgccggagcagacctaatcgacatggaagaggttcagttccaccctacaggaatggtctatccagattcaagaaagggagtccttgtaaccgaagctgtaagagcagaaggaggaaagctcataaacagcgaaggtgaaaggttcatgggccgctatgacgatagaatggaacttgcaacaagagatgttgtagcaagatcaatttataatgaaatcatggaaggaagaggaaccgagcatggaggagtataccttgatgtgacccaccttgacggagaactaatagaggaaaaacttgaaacaatgctagagcaattccttgatgttggagtggatataaggaaagagccaatggaagttgccccaactgcccaccaccatatgggaggacttagaataaacccagacgcaagcacaaatgtggaaaacctatttggagctggagaagtctgtggaggagtccatggagcaaacagactcggaggaaatgcacttgcagacactcaagtatttggtaagattgcaggatcatctgcagcatctgcaacagacattgctgagttcagatacaataatgaagcagtagaagatgaagagaacagaataaaatcattaatcaaggaaggctcaataaacccattggatatgaaaaaggaaatccaaaacctgatgtgggagaaagtatccattgtcagaaatgagcaaaaccttaagtccgcccttgaaagacttcttgagatgaaaaatgaacttaatgaccttaatgtagatgatagaacccaattcaatgagtctctcataacagctcttgaagtcacaaacatggttgagatatgcatccttatagttaaatcagcaatacttagaagggaaagccgaggagctcacttcagagaagacttcccagagactaatgacacttggaaaaagagcatagtcatgagcaaaagcaagataaggtttgctaaaagataa

SEQ ID NO: 89 - DNA, 642 bp, Methanobrevibacter ruminantium
  source 1..642: mol_type = genomic DNA
atgaatcaagaagaaagattaaaaggaagtccaatagaaagagtagaaacagcattagaagcaataaaagcaggaaatggagttatcgtaacagataacgaagacagagaaaacgaaggagacatgatcttctccagcgaacatttaactgaagaacagatggcacttctcataagagaaggaagcggaatcgtatgcttatgcctaacccaagataaggctgatgctcttgaacttccattaatggttgaaaacaatacaagtacctatggtacaggatttacaataacaattgaagctgcagaaggtgttacaaccggagtatctgcagcagacagagtaactacagtaaaagcagcatctgcattggatgcaaaaccaagcgatttacaccacccaggtcacgtattcccacttagggcaagacctggaggggtccttgaaagggacggtcatacagaggcaacaattgaccttatgagacttgcaggacttaatccatgtggcgtattgtgtgaaatcacccttccaaatggaacaatggcaagaatgcctgatgtaattgaattttcagcagagcatgacatgcctgtagttacaattgaagacataattgcttatcgtaaggaaaatgacatctaa

SEQ ID NO: 90 - DNA, 2064 bp, Methanobrevibacter ruminantium
  source 1..2064: mol_type = genomic DNA
atgaaaattaaaaagagttttgtcattttatgcttaattatctgtttatttactattgcaagtgttgcagctagtgatataaatgatacaaccataagtgatggtgacaatctaatcaaagaggcagatggggacttattaagccttgaagatgataataatctaaaagaattaaatgaagagtcagataaaaatttactagtccaagaatctgataatgataataataatccagagtcagataaagatttactagttcaagaatctgataatgataataataatctagaatctgatgagggcttattagtacaagaatctgatgatgatttaaataaaaaagcagacggtagtttgtttagctcaaaatacggagataacgctgctcctataaaaattaacactagctacctaataaaagaaataaacagctacctcgagaaagacaactacactgccctaaaggaagaaataaacaactacctgaagaaaagcaataacaatgccataaaagaggaaataagcaagtatatcttgaaaaatagctataaggccttacaaaaagaaataaacaactatctagaggaaaacaatttcagcaccctaataaaagaaattaacaactatctagaggaaaacaactacccttccatcgaggatggaattaaaagctatcttcaatcaaacaattacagctctcttcaagatgtccttagcgatgtaataagcaagataataaattcatctaaaaaagaatcagagccaattgacgatggaacttttaccgctttgcagtataaaatcaattctgccccaaatggcgctacaataagcctagataaggattatagctatgatgaaggattcagcacaagaggcattgaaatcaagaaaagcattacaatcaatggaaacggacacaccataaacggactgtccgcatcaaggatctttctcattcattttggattgactggaaacaataaggtcacattaaacaatatagtattcgccaatggaaagacagacctttatggaggagccatatttaactatggaaatctgacagtaaacaagtgcacattcaaaaacaactatgcaaaaacctgcggaggagccatcaattctgtaggcgaaatgattttaaaaaattccaattttaaaaacaacactgcaggaggagatgccggagcagtattttcatttaaaataggaaatagcacaaatatctttaaagacatctataaagataaggtcattgatggaaatatggactttattatagattatatattgaacataaacataaactatggatgggacagcataaataattgcagctttagctcaaatgtggccaaaggccgtggaggaggagcaatctatgcatttacccacataaagattaatggctgtacattcaattccaataaggctggcgaacatggaggcgcagtatttgcaaataaaaacctaaatatttcaaagtccaagtttacaaacaataaggcccctaaatatggaggcgcagtttatttcagatgccatgaattaagcggaagctatgtaaataagacttgggtttccaaaatgaaatattatacagcaacaatcaaggattcaatctttacaaaaaacactgccagcaaaggaggggcaatatatgaatttaatcatacagtctctgataaaaaacgtcttaaagtaagcaaatgtaattttacagacaataaggcatcacttggcagagatgtattttccggaagctgttcaaactgcatatacttctatgtgaaaataagcactaaaagcgttacagttaaaaagactgctaagagctttactttaactgccacaattacaaatggtactaaaaagcttaaaaataaaaaggtcacatttaaattcaatggaaaaacctataccactaaaaccaatagcaatggagtggctaaagtaaaaatcggtaaagcagttattaaaaagcttaaaaagggaaaaacctattcagttcaaatcacttatcttaagaaaagtgcaaagacaactgtgaaggttaaatag

SEQ ID NO: 91 - DNA, 384 bp, Methanobrevibacter ruminantium
  source 1..384: mol_type = genomic DNA
atgagtttaaaaagtaaagcaaaaaagatcggtaaagcagtaattttcgtaaaattgtttgaagatttaatggcaaataaggacaaaagggaagaagacattgctaaattaagaatacacattgaagaatggaaagctgaagctccagatgatttaaatgctattttagcagctatattaatgaaagctccagattcttcaccagatgaaatcaaagcagaattcgaacaagctaaagccgaatatcatgctgaagatgaagatattctcccatggtttgaaagccaaatagaaaacattacaaaagagggagaagaagctgaagaagaggctgaagaagaagcagtcgaagtggaagttactgaagaagagcctgaagaataa

SEQ ID NO: 92 - DNA, 237 bp, Methanobrevibacter ruminantium
  source 1..237: mol_type = genomic DNA
atggataataaatttataatattgctttgcttagtgactgtttcagtttttataagtgcttcatttgcttttggcaatgttctaagcaatgcagataacggatctgtgcaaacttacaatagtcataaggatatttcctctccaaatatggattataagcatcctggtgaacttatttatgggggctgtggtggaaatcaaaatattcaaaccgatgggcatatttgcgagaaataa

SEQ ID NO: 93 - DNA, 165 bp, Methanobrevibacter ruminantium
  source 1..165: mol_type = genomic DNA
atgaatttgatatcagtcattatatatctcataattcttatttttggagtatgggtgctttataggggctataaaaaaggaatggagtttggaaagttccagtatgcatttattgtttgcttaagtgccctgtttatttgcttgctttatagcctatttaattaa

SEQ ID NO: 94 - DNA, 747 bp, Methanobrevibacter ruminantium
  source 1..747: mol_type = genomic DNA
atgggccctgaagatacaatatatgaaagccaatcccttgaagatacaatatacaaaagaaaatcagtacgctcttatgaggatgctccattggataacgagacaataaatgaaataagagattttatagaaaatgcaaatcctctcaatcctaatatagaatggagctatgagattcttcctaaagaaaaaataagcacaatgatgagatggaaggctccacattatattgccatcttttcagaggataaggaaaactattatcaaaatataggattcatattccaacaggtggacttgtttctacaaagcaaggggataggcagctgctggataggaatgggaagtccaaaggattataagaatccacatggtcataagtttatcattttgatttcatttggaatgagcgaaagaatctacagagaaatgaatcagtttaaaagaaaggatattgatgcaatatccgataataaggatgaaagactgattccggcacagtttgccccatcttccatgaatacccagccatggtacttcactcataatgatgacggtagcttcgacttatacagggtaaaaaggggagtccttagaaacaggtttatgggaagatggaataagattgacactggaatagcccttgcacatctttatgtggcaaatagggacaactttagcttctatatgaaggacaatcctaaagaattgaaaggccatatatatgatggaagttttgaaatttag

SEQ ID NO: 95 - DNA, 672 bp, Methanobrevibacter ruminantium
  source 1..672: mol_type = genomic DNA
atggacaataaactatttttacaggcatttagcaaatttttcattggcctaattataatatgcgcacttctttttattcccgctggaactctcaactacccgaacggatggctatttatagcattactcttcatcccaatgttttttgctggaatcatcatgtttatcaaaagtccagagcttctaagaagacgattgaatgctgatgaagaggaagaagagcaaaaaatagtgatcttaattagcgcaatcatctttcttcttgcttttattcttgcagggctaaactttagattcggatggtttaagctcaatagcttgattataatcattgcttcagtcatatttctccttgcatatatcatgtatgcagaggttcttagggagaatgaatacctctctcgaacagtagaagtgaatgagggtcaaaatgtggttgacacaggactctatggcattgtgcgtcatcctatgtacacttccacaatattcctgtttctatcaatgccattggtattggatagcatattttcatttatagtcatgctgatttatccaataatcataatctttagaataaaaaacgaagaaaagcttttagaagaagagcttgatggatatgtggagtatgaaaaaagggtaaaatatagattaataccatatttgtggtag

SEQ ID NO: 96 - DNA, 990 bp, Methanobrevibacter ruminantium
  source 1..990: mol_type = genomic DNA
atgaagtggaagattggagatgtagaaatagacaatcaagtggttctagcccctatggccggagtatgtgactctgcatttagaaccatagtcaaatctatgggttgcgggcttatagaaaccgaaatggtttcagataaggcagtcatgtatggcaattggaaaactaaggaaatgttatatatgacagactatgagcgccctatctctcagcagattgtcggatctgatattgaatctctcacttttgcttccaaatacatccaagacaatacaaatgttgatatcatagatatcaatatgggatgtcctgtaactaaggtgacaaataggggcaaggctggaagcgcattgctaaaatctccggataaaataaaatctattgtagaatctattgtagactctgtagacattcctgttactgcaaagattagaagtggatgggataaaagctgcataaatgcagttgaaatagcaaagattattgaagatgcaggtgcatcagccattactgttcatcctagaacaaaggaccaggcttattctggaaaggcagattggtctataattaaaaaggttaagcaaagcgttaatattccggttattggaaatggagatgtaagaacttgttttgatgcaaaaagaatgttggatgaaactgattgcgatgcagtgatgattggaagggctgcactaggcaatccttggcttattagagattgtgtaaattatctggataatggggacttgcctatggaagttacaatagaagagagaatggatatgttaaaaagacatgtgaatctattgcttgaaaataagggagaagagtttgccattcctaagatgagaacacatgctgcctattatgttaaaaaattacctcgcactattgagctaaagcagatgatatttaagatgaatacaaaagaggatctttttaatctattggatgattatgtggattcattagatgaattaaaaaggtaa

SEQ ID NO: 97 - DNA, 939 bp, Methanobrevibacter ruminantium
  source 1..939: mol_type = genomic DNA
atggaaattttaaaacctgaagagttaaaagagaaatttaatgacccatggattgctccatatgaaaaagtcataaccatggctgatggagataaagtagaacttatagaataccatccatgccctagcggttcaaactggctgttataccaataccaacacagcagcgaacttatcatagatgctaaaagggatggaaacaagcacacctatctttgtaaggtaggcaaaaagccattagaccttaaggcaagcataaatgctgctggaattgaagaggttgcaattgacgaagaaaagaatgaagtcaaagtcacccacggaggtctagctggcgctggagtaggtgctggaatgtgcagaggcatgggagaaggtgtcaaatacatagagcttcttgaagtcggaggaggaagcaaggaaggaaaagccacagtagtaactcctaaatacgaaaagcttgtaatcggaatagacgatacagacgttaaggatgcaggtgcaacctggactatggcacataatattggtcttcaattaaaggaagaaggctatgaataccttgaccatattatcgttcaattattccctcataatcctcataagactcaaaactgtgtttctatagcgcttacatttgctgtactcaaagaagaaaaagaaaatctaataaacaggcttattgaaatactcaagcacgacacattgtctgataagactgcaatagccatccttgaaggaattggaatcccacctaagcttagggaatatgctatggctacaaaaaccggcatgatggatgttgaaacagctgaaaagctagcagaagaacttaacattccacttcttgcagttacaggagaacaaggcaaagtaggggcacttgcagcacttggcctttatgatgatgttgatgaggctgttaaggtttattattaa

SEQ ID NO: 98 - DNA, 432 bp, Methanobrevibacter ruminantium
  source 1..432: mol_type = genomic DNA
atggtaaaatataatataggagcagttgttgctgaatttaattatgatatcactcacatgatgttagagcttgctaaagctgaagctcaagttcgtgactgtgaaataacaaagattgtaatggtccctggcgtatttgacatgccacttgctatcaaaaaacttacagaagcagaccaagaaggaagaatcgaccttgactgtataatcactcttggtactgtaattgaaggtgcaacagatcatgaccaaattgtagctcaacatgcatcccgtaagatagctgacttatccttagaatggggcaaaccaatttcccttggaatcagcggtcctggaatgaccagattagatgcacacagaagagttagctatggtaaaaacgctgttgaagcagctgttaaaatgtgtgacagattacaagacatataa

SEQ ID NO: 99 - DNA, 1200 bp, Methanobrevibacter ruminantium
  source 1..1200: mol_type = genomic DNA
atgtctattaataagtcaaaatctaatttaagcctaaaaaataaacttaaatctttatttagtggcaattccaataaaagcagatatcaatccaaactaataaggggggacttcgattcactccatgacttgaatatagcatatgtcttgaagggctttcctacactttcacagacttttgtttcaaatgagcttagatatttggttgaagatggcttcaatgtagttgtattctgctatatggatcctgcagacttggttgaattggattttgatttggaagtaattcgctttgatgagtcagatgaccctactgggaaattggagcaattactattggactatgagatagacatagtgcatacccattttgtctatcctccctgtacagaatatacatttcccgtttgcgataggctgggaattccttttacagtatttgcacatgctgttgacatcttcaaatatgatgtcgataaaattaatagggttgatgagatatccaaaagcccattctgcaagggaattcttacattgagcaactatcacaagaatcatttgattgaaaggggagtggataaggataagattcatattacaaggcaggctactgactatgagatagaggagcttgaattgaaagagaggaatgtgagaaatattgtaagcatttcccgttttgttgaaaagaaaggaattgatgtcttgattgatgtggcagacattctaagggatgaggattatgagttttccatctatggatttggaggacttgaaaaggcatatcaaaggcagattgatgagttgaatctagataatatttccattaaggggcgtttggacggtcctcaagaggtaaaagaggtctttgataaggcagatatattggcgtctccatgcagaatagctgaaaatggcgatagggatggaattcctacggtcatatttgaggcaatggcctatggagtgtgtgtattgactacagaggtttcagcaatccctgaagttattgatgatggaaggaatggttttattgttcctccagacagtcctgaaatatttgcagataagattagggaaattgctaatttgtccccagaggaacgctttgaaatagctaaacaggcacaagtggatgttcaggacacttccagtgttgatgaaactatgaaaacactttttttaacttggagtttgtaa

SEQ ID NO: 100 - DNA, 1188 bp, Methanobrevibacter ruminantium
  source 1..1188: mol_type = genomic DNA
atgaattatgctttaatggtttacaactatacaacaaacttaggcaatgagatacagacaattgctgctagaagattcctgcctaagatagattactatatcgatcatgagaagataaatctcttcaatgaggaggataatgtaaagatgattatgaatggatggtatcttgactgtgaaaaggcatggcctccatctgaatcaatcgatcctctccttatctccatgcatttcaacaccacttcaagcaataaggaaaggttaaaagctcttttaagcgatgaaagcatagaatactttatgaaccatgcccctataggttgcagggattattcaacagttgagtttttaaatgagcagggaatagatgcatacttttccggatgccttacattgacattggataatggcaaaactaaagaggaaagggaattggataaaggacaggattatattgttgtaaactctgaaattgcagatgagatcatttcttttttaaaggataagacagataaaaagatctataggattcagcaagacatgataccatcatttgacacatcatttccagaatccatgccattatggctttataaccttagctccttttatgattatgaggaaaagctgtttatggctgaaaatcttttaaggatatatgagaatgcctcttgtgtaatcaccgacagattgcattgcgccttgccatctcttgccctagagactccagtgatgctattgaacaataggggatttagggaaaggtttgatggattgagcaatttattgctggagagtgacattgatagctatgaatccaattataatatctttgatgtggacaatcctcctgaaaatcccaaggactatttgaaaatacgtaaggatttgattgaaaaatctaagaaattcaccggacatatcaacaattcttattactctgatatttcacagagggaaatatttgaaagaaataacttattattgtctagaaatgccattggaactagggattatattaggaatgtcttaaaaagaatgaggcagcatgagaaggacatttccaaaaaggaagagatcattaaaaatcaggaagctattattgataagcagaaaaagatgattgatgagatgaaggggtccaatagctggaagataacttctcctcttagaaagattagaaaataa

SEQ ID NO: 101 - DNA, 996 bp, Methanobrevibacter ruminantium
  source 1..996: mol_type = genomic DNA
atgaccaaaccaaaagtttccatgattttatcagcatataatgaagagagattcatcgataaggccatatgcagtctaacaaaccaaagccttaaagacatagaaataatcataataaacgatggatccaccgataaaacaccagaaatcatagagaaatatgctgaagaagacccaagaatcactgtaataaaccaatcaaatattgggcttggagcaagcagaaataaaggaatggcaattgcccaaggagaatatgtgggatttcttgatggagatgactggtacagattagatgctcttgagatagcatacaatgaggcgaaatcaaaggatacagacataaccatgtatcagatgataaattatgatgatgcaacaggacgaatatacgaaaacgactggtttaatctaaacaaccttgatgaaagctttgatggtatagtatttacacctgagaaaacaaaagactttctatttgacttatcagtaagttcatgccaaaagatctatagaaatgattttttaaagtcaataaatgcaagctttccagaaggaatctattttgaagacatgcctttcttcttttatgtctatcttaaggcagagagaatttcaataatcagacatcatttttattacagacgaaagcacaatgcttcaatcacccatgtggtagatgcaaattatctggatactgtggaagcgggatgcgaactaatgagaagattcatagacaatgggttctatgatgactataagttcgaccttatcgcatacaagataaatggtccaagaatggctcttatggacataactgaagatgctaaggaaccgttgttcaatctaataaaagaagactatgagaagataaaaaatacagaatattatcaggattatcttgataatctaggtccaaagaagaaaaagttctttttagatgtaattaagtatgacaattatgaggaatttaaaaagaacaatccagaatattag

SEQ ID NO: 102 - DNA, 1551 bp, Methanobrevibacter ruminantium
  source 1..1551: mol_type = genomic DNA
atgaaagacaataacaaaaaagaacaagcagaagacctattaatagcaaacaaattccctcctatgaatgatgtaagtggaatcatacttgcaaaaagagccctgcttagcggcaagagatatgatgtttgccatacagtgattaaagagccccttgataatgactttaacgaaattgcagaagagattatagataacagaatcattataaagaatttcgaatatgaaatgagtaaaaaggagcttaatgagacctttagaaattatataacagagggattgaaaaaactggaagagacaaatcccaactataaaacaataactacacgttcctggggattccagcctaattttttagctttggaatataaattaaagcacccagacacattctggactgctgaattctcagatcccttaactgtgaacattgaaaacaagccaagggatagaagattcaagttagacaataaggaatacatcgatagaatcaataatgaaatcgacaaggtcaatgaaagaaccggacaaaatctggagcatattaaggaaagcgacttcatatacttgatatgcgaatatatagcatatgtctttgccgacaagatacgctttacaaacccaaaccaaagggagataatgcttaatcaatgcccttatgatgtaaaggacatggtcatggcaaagtctgaaatcaatcctcaccctacccttgatgagaaatactaccacatcaaggaagttgactataagattgatgatgactgcataaatataggatactttggaacttattttggaaagagaaactttgaaacaatcttctatgcctgcgaaagcctaaatgaggacataaggtcaaaagtaaaattccatctcttcctaaaccatggagataacctaaaaagacttacaggcaacttaaagataagcaagaacatcatagtgaatgacaaggtttcattgcttgaatttttaaatctatctaccaaattggacattctccttgtaaatgatacagagacaaagggaaactttgagataaatccataccgcccatctaaaatagctgattatattggaagcggaagagacatatggggaatctgtgaaaaggacagcataatggatggattagatgaaataaaatataaatcttatattaatgacttctattcagctaaattgaccttcaatcagatagttaaagattctagtaagatagatgatggattgaaagaaaatccattcgaggataatgattatttagctaaaagagccagtgcaatgagtgaagatgagatagttgaactgataaatgaaaataattacctaaagggtagaaccaatcatttaaatcatctttttaatggaacaagaggaagaggcttgtttgcagatgaggcaaagaaactgaacttgaaaaatgaaaaattagagatggaaaataagaaactaaagaaagaaaacaagaagtataaaaaggatttgaagtatcttaagtcttcaaaaggctctttaaagtaccaaattaaaaagatagtgaaataa

SEQ ID NO: 103 - DNA, 987 bp, Methanobrevibacter ruminantium
  source 1..987: mol_type = genomic DNA
atgtacgaaattgcagtaattcctggagatggaataggtaaagaggtaatggaagcaaccataaatgttttagaatcattggatgtggactttaactttacttatggtgaggctggagacgaatgtctggaaaagaacggagtggcccttccaaatgaaaccatccaacttgcaaaaaatgcagatgcctgcctattcggagctgcaggagagactgcagcagatgtcatcgtaagactaagacaggaactgaacctctttgctaacctaaggccagttaaaagctatccaaatacaaatgccctctttgaaaatcttgactttatgatagtgagggaaaatacagaaggaatgtatattgcaaaggaagaggaatatacagccgaaggagcaattgcaagaaggataataacaagaaaggcaagcgaaagaataatagaatatgctttccaatatgcaaaggacaacaataagtcaaaggttacaggagttcataaggcaaatgtgctaaaaatatcagatggtctctttagagatatatttaatgaaatagcagacaagtataaggatgaaatagattcagaggatttttatgtcgatgcaactgcaatgtatctcataacaagacctgaaagctttgaagtgattgtaacaaccaatctctttggagacatactatcagatgaaggtgcaggacttgtaggaggccttggaatgattccatcaggcaatattggagaaaacggagcattgtttgagccagtccacggttcagccccagacattgcaggtcagggaattgcaaatccattggctatgatgctttcagcagtcatgatgctgaactatcttggtgagagtgaagctgaagagaagttaaataatgcaatccttgaactattaaatgaaggaaaatgcctaactccagatttaggtggcagttcaacaactatggaagttagtgaggccataaaaagcaaattataa

SEQ ID NO: 104 - DNA, 483 bp, Methanobrevibacter ruminantium
  source 1..483: mol_type = genomic DNA
atgaaaggaaaagtttggaaatttggaaatgatattgatactgacatcatacttcctggaagatatttaatctatactgatgaggaaaagctatccgagcattgcatggaaggattggaccctgactttaaaaataaagtaagcgctggagatttcatccttggaggaactaacttcggctgcggatcaagcagggagcatgctccaatagcaatcaaaggctgtggaatatctgcagtaatcgccgaatcctttgcaaggatcttttatagaaatgcaacaaatgtgggagttcccctcctagaagctcctggaataagttctgccattgaaaatggagaggaaatagaagtggatatggaaaaggggattatcatatctgaaagcggaaaggagtatgaatttaagaagctgcctccattcatgttggaaatccttgaagaaggcggattgattaattatcttaaaaaacagaatgaataa

SEQ ID NO: 105 - DNA, 1278 bp, Methanobrevibacter ruminantium
  source 1..1278: mol_type = genomic DNA
atgtcaacaattgctgaaaagatattatcaagagcttcaggacaaggacaagttgaagctggagatatagtcatggctgacattgacatagccatgatgcatgatttgactggacctcttgcagttgaatcatttaacaagataggaactgaaagggtctgggacaatgaaaagatcgtcatcccatttgaccaccaagttccagcagattctcttgactctgcaaacaatcatatcctaatgagaaagttcgtaaaagagcaggatataaaaaacttttatgatgtttatgaaggagtttgtcatcaggttctacctgaaaaaggccatgtgattccaggaactgttattgttggtgcagactcacataccacaacatatggtgcccttggagcattttccactggaataggctctacagacatggctatggtattgtccaccgggcaattatggtttaaggttccagaaaccattcaattcaatatagagggaatccttaaggaaaatacatctgcaaaggatgtgattcttaatataattggacaggtaggggcagatggagcaacctacaagtcctgtgaattcaagggagagaccatatccactatgaacatttcagatagaatggtattatccaatatggctatagagatgggaggaaaaaccggaataattgagcctgataatgtaacctatcaataccttaaggacagggtaaaggacgaaaacaaaaacagattaaaggcattcattgaaaagtccaatcttaaaacagatgaggattcatccagtcttgaaacaatggacattgatgttagcgaccttgagccacaaatcgcatgcccacataatgtagataacgttaagccagcaagcgagctaagcgacattgaaatagaccaagtgtttgtaggttcttgcacaaacggaagaattgaagacctaagggatgccgcaaagatattaaaaggcaagcatatagcatccggccttagaatgctcgtgattcctgcatcaagggaaacatatatgaaggcattggatgaaggattaatcaagatatttgtggaagctggagcccttgtttcagcaccatgctgtggaccatgccttggaggccatacaggactaataggtcctggagaggtcagtctttctacatcaaacagaaactttaagggaagacaaggaagtcctgaaggtgaagtttacctatcaagcgctaaagtagctgcacaatcagcaattgagggaagaattagtgttcctaaataa

SEQ ID NO: 106 - DNA, 1260 bp, Methanobrevibacter ruminantium
  source 1..1260: mol_type = genomic DNA
atgaaaatttgtattgtaggacaaggatatatcggattgccaactgcagcattatttgctaaaagtggctgtgaggttgttggcgtagacataaataaggaaatcattgaaaagctaaaccaaggaatagcccatatagaagagcctggaataagcgactcaatcaaaaatgcggtagaccaaggccattatcatgcttcattaactcctgaggaggcagacacattcataataaccgttccaaccccatatttgcctgaggatcttagctgtgacttaagctatgtaatatccgcttgcaattccattctccctgtccttaaaaagggaaatgtcgttatcatcgaatcaacaatagctccaatgtctacagatgaggtaatcaagcctatctttgaaaatgaaggctatgtcattggagaggacctatatcttgctcactgccctgaaagagtattgcctggacaaataatggaagagcttgtaaacaacaacagaatagtaggtggaatcactgaagaatgtactaaaaaagctgcagatgtctatagaacctttgtaaaaggagaaataatagagactgaagcaaagactgcagaattatcaaaatgcatggaaaacaccttcagagacgtcaacatcgcacttgcgaatgagcttgctaaaatatgtgcagagattggcgtaaacgcccttgacgttattgaaatggcaaacaagcatccaagagttaatatccatagcccaggccctggtgttggaggccactgccttgcaatcgatccatatttcatctatgcaaaggctccagagacagcaaaaataatcaagcttgcaagggatacaaataacagcatgccaggttttgtaatagagaataccggaaagattctaagcaaattagacaaagatgcagagaagataagcgtatttggagtggcctataaaggaaatacagacgatgcaagggaaagccctgcatttgagataattgcaggactgaaggctgcaggatatgaagtggtcatacatgaccctcactttgacaatccagattacttagactttgatgatgcaatcaaggattcttcaatgatacttatcttatctgaccataatcagttcaaggatatggattatgatagcataaagaggaatatgaagaccaagctcatatttgacactaaaaatataattaaaagtgtaccagaggatgttactttagtcaattatggcaatttgtataagtttatacattaa

SEQ ID NO: 107 - DNA, 861 bp, Methanobrevibacter ruminantium
  source 1..861: mol_type = genomic DNA
atgaggattttaattacaggcgcttatggaatgttaggatctgacttaagagaggttctaaaaaatcatgatttaattgcaacaggctctaaagacctagacatcacagatgaagaaagatgtattgattttattgctaaagaacgtccggaaatagtcataaatgctgcagcttacactgctgtagatgactgtgagactcattatgatgatgcatatgcagtaaatgccctagggcctcgtaatttggcaatagcctgtaataagattgatattcctttggtccatataagcacagactatgtctttgatggaactaagcgaactcctcttatagaaaatgacaaattaggtcctcaaagcgcatatggaaagaccaagcttgctggagaggagttcattcaggaaaacactcaaaaatacttcattcttcgtaccgcttggctatatggaatccatggaggaaactttgtaaagaccatgttggatttggctaaggaacatgatgagataactgttgtaaatgatcagatagggtctcctacattctctcttgatttggcaatggcaatatgtgaggttctagacagcgataagtatggcatctatcaccttacaaatgatggggaatgttcctggtatgattttgcaaaagaaatctttagaatatctgatattgatgtgaaggtcatacctgtaagcactgaagagtttccaagacctgctccaaggccacattattctgtattaagcaatgtaaaatggaaaagcgcaggttttgttccaatgagagattataaggaagctttgaatcaatatatttctttatataatttttttgtaaaaataggtaaaatttaa

SEQ ID NO: 108 - DNA, 873 bp, Methanobrevibacter ruminantium
  source 1..873: mol_type = genomic DNA
atgaaaggaatcgttttagctggtggttctggaaccagattatatccaattacaaaggctgtttctaagcagttattgcctttatatgataagccaatgatttattatcctatatctgtcttgatgctagcgaatattaaagatatattaataatatcaactcctcgtgatttgccaatgtataaggacttgctaggggatggaagcaatttaggaatgtccttttcctatgctgagcaagagaatcctaacgggcttgctgaagcattcatcataggggaagactttattggcgatgacaatgttgctcttatattgggagacaatattttccatggacacagatttactgaaatcctagaaagagctcgtgatcttgatgatggagcggtcatattcggctactttacaaacaagccagaggcttttggggttgttgagtttgataatgaatggaatgttctctccatagaagaaaagccagaacatcctaaatccaattatgttgttccgggactttatttctatgataatgatgttattgagatagcaaagagtgtaaagccttcagataggggagagcttgaaataacctctgtaaatgaggagtatcttaataggggcaagcttaaggtagagctcctaggtagaggtatggcttggcttgatacaggtactcatgatgggcttcttgaggcagctaatttcattgagacagttcaaaagagacaaagtttgtatattgcttgtttggaggaaattgcttattccaagggatatattagcaaagaagagcttttaaaattagcagagcctcttaagaaaactgcttatggtgattatttaactaaattagcagaaagaaagatttaa

SEQ ID NO: 109 - DNA, 579 bp, Methanobrevibacter ruminantium
  source 1..579: mol_type = genomic DNA
atgggcaagtttaatataattaaaagtgaaattgaaggtgtatttacagttgaacctaccgtttttgaagatgaacggggctactttatggaaacttataatgagaatgactttaaggcagaggggattgatttaacctttgttcaagacaatcaatcaaagtcatcaaaaggagtacttagaggcctccatttccaatacacacagccacaaggaaagctggttcgtgtaataaagggagaagtcttcgatgtgggagtggatcttagaaaagactcacctacatatggaaaatggatgggggaaatactctctgaagaaaacaaaaaacagttatttataccaaaaggatttgcccatggctttttagtattatcagatgaagcagaattcgtttacaagtgtacagacttctataaaggagatgatgagggaggaatccaatggaacgaccctgatataggaatcgaatggccattgggagaccttaaggaagaggatctgattctatctgaaaaggacaagctattgaagccaatgaaagacactccaactgatttctatatggaagatgaatga

SEQ ID NO: 110 - DNA, 1008 bp, Methanobrevibacter ruminantium
  source 1..1008: mol_type = genomic DNA
atgacaaaaattttagttactggcggtgcaggttttataggtagtaactttataaaatatatgcttgataagtatcctgattatgaaatagttaatttagatgctttgacttactgcggaaaccttgaaaatcttgaagatattgaagataatccgaattattcctttgttaagggaaatatcatggatgaaggtcttgttgatgttgttgtaagcagcgtagactacatagtcaattttgcagctgaaagccatgtggaccgcagcatagaagacccgcagatattcatcaaatccaacataatcggaacacaggtattgcttgatgcagcctataaataccaaatcaaaaaattcctacaagtatccaccgacgaagtatatggaagcctaggcccagagggatacttcaccgaaacaactcctctccaggcaaacagcccatattcagcctcaaaggcaggtgctgaccttatggtaagagcatatggagagacattcgacctcccaatcaacataacaagatgctcaaacaactatgggccttatcagttcccagaaaaactgataccactaatgatctccaatgccttagaagacaaggagctcccaatatacggcgacggaaaaaacataagagactggctacacgtctacgaccactgctcagctattgaccttgttctccacaaaggaaagataggagaagtatacaacattggcggccacaacgaaaagcaaaatatagaaatagtaaaacttattcttaaggaacttgataaaccagaaagcctaataaaatttgtaaaagacagattaggtcatgacagacgctatgcaatagattcaaccaaaataacagaagaattaggctggaaaccaaaatacacatttgaaacaggaatagtggaaacaatccattggtatttggacaatcaagactggatggaaaaggtaaaatccggcgaatatcaagaatattatgaaaagatgtactctaaaaagtag

SEQ ID NO: 111 - DNA, 984 bp, Methanobrevibacter ruminantium
  source 1..984: mol_type = genomic DNA
atgaaagtatcagtagtaacacctaactataatggtcttaaattcttaaacgcctattttgaaaccttagcttttcaaagtaggttcatagaagagatcatcataatcgataatgcatctactgatgccagctgtgatcttatagaagaatacataaacagtcctagctataagattgacataaaacttataaaaaatgataaaaatcttggatttgctcctgcagtcaatcagggcattcgcttggctaaatccgaactaatctattctgtaaacaatgatgtagaacttgaatttaatactatagaaacattaattcaatctatggaaagatccattgaagaggggaaaaatccattctccattcagtcaaagatgatacagtaccataatagaagcctaattgatgatgcaggtgatgaatataatctacttgcatacactaagaaactaggcgatgggagtccgattgacaactacaatgaaaaaagggagatattctcatcctgtgcaggtgctgcattgtatagaaaatccattttggagaaaataggtctttttgacgataatttctttgcttatgtagaggatatagatctttcattcagggctcaaataaatggttatagaaactacctagagcctaaatcaatcatctatcattatggaagtgctacaagcggaagcaggtataatgagtttaagataaggcttgctgcacgaaataatgtttggatgatttataagaatttcccaattcctctaaagattgttaatttcatcttcatatttcttggatttttcataaaatacctcttctttttaaggaaaggattcggttcaatctatttgggcggagtaaaagagggcttaagagaaagaaaaggaatagaaaagacccactttgaatggaaaaactggaaaaattactttaagatagaatggaagatgattaagaacacatttggctactttaaaaaatag

SEQ ID NO: 112 - DNA, 897 bp, Methanobrevibacter ruminantium
  source 1..897: mol_type = genomic DNA
atgagaaatatagacttatcaattattgttgttaattataacacctttaaattaacaagggacactatagattcttgtttagctgaacctactcattatacatatgaaatattccttgtagacaacaaatcaacagatgacagccttgaaaaacttcaagaatactttaaaagtgaaacagaacgaggaatattaaaaatcattccaaaccaatccaacgatggttttgcaaaggcaaataatattgcaatagagcaagcaaaaggggatttcatacttcttttaaactcagacacccttatgaagcaatccactatcgacaagtgcatggattacataacagacaaaggccacgatgatatagatgcattaggctgtaaggtttcccttgccgatggaagtcttgacaaggcctgcaagcgcagctttccaaatcctgcaaactccttttataaattgtttcatataaatgtagatagtgacaagaacgattataatctggatgatcttgatgatgatggtatttatgagattgattgccttgtaggggcatttatgcttgttagaaggactacaatcgatgaagtaggccttttggatgatgctttcttcatgtatggagaggatattgattggtgctatagaatcaaacaggcaggatggaagatagtttacttcggccaggcagagataattcactataagggagcaagcagcgaggataaaaatactaaaaaaagaaatccaaagattatttatgagttttatagggcaatgtatgtcttttataaaaagcactatactaaaaaatataatttccttgtaaacattgcagtctatattggaattggagttttgctagtttttaacttagttagaaatgccttcaggtcttga

SEQ ID NO: 113 - DNA, 1401 bp, Methanobrevibacter ruminantium
  source 1..1401: mol_type = genomic DNA
atgattaaagaaaatcagagaatattaaatgcaatactagtcatcatagacattattgtaattcttatctcactaggccttgcatactttgtaagattcaagaccaccatattctcagtaggaggctcccttccattcagtgactatttcatattcacaatcgtttgcataattcctacttatattctattatactacttctttggtctttataagccattccgtaaccaatcatcaatattctctggtgctgaggacattgtaaagtctgacataatggcattcatcatcctggttgctattttgttcatcatcaatcagcctaacttttcaaggatcatgctccttcttttaagcctatttggaatgattctcacaatcgctgaaagggtattggtcgttcttgtattgagaatgatgagaacaaacaaccttaacctgaagcatatgcttatcatcggagacaatgacttggcattcgagtttgcacataagatcaactctaaaacctatttgggatacaatattgccggatttttaggaagaaaggaaaatataggcaaacgatttgaaggaaccaagtttataggcagctttgatgacttgcctcgtgttctaaagacccataagtttgacagggtggtcatagccattccccttaagtattattaccatctaaacgaaatcgtggatgcatgtgaggaagagggaatcaaggcagaaatcattccagactattataagtatcttccggctaagccttcagttgacatgcttgatgacatgcctatcatcaatatccgctatgttccattggatgatgccttcaataagttcaagaagatagtctcagattactttgtatccattgtagctattataatcacatctccaatcatgattttaactgcaattgcaattaagattgagtctccaggacctatcatcttcaagcaggaaaggataggctataacggtaagcccttcatgatgtataagttcagaagcatgaaggttcaggatgatgaggaggagaaatcccaatggacaactaaggacgatccaagaaagacaagaataggcactttcattagaaaatggagcatagatgagcttcctcagtttttcaatgtcctaaagagggatatgagcgtagtcggtccccgccctgagaggccttattttgtggaggagtttaagaaaaccattcctaaatacatggttaagcatcaggtaaggcctggactaactggacttgctcaggtaaatggttataggggaaacacttcaattaaaaagcgtattgaatatgacattcgctatgtagaaaattggagtttggcgctggatgtaaaaatcatgttttggacagtatttaggcgtaataagaatgcttattaa

SEQ ID NO: 114 - DNA, 2472 bp, Methanobrevibacter ruminantium
  source 1..2472: mol_type = genomic DNA
atggaaaaagaatttttcgaaggaatgaatttggaagaagacattagcgatgaggacttccagactattgtagaaggctgggaaaaagtccaagatcaaatgtccaaagaagaatttataactaaatttaatgaacacaaggcagaatttaaagacgcttctttcttcagcgacatagactttttaaacatgattgttaatccattagtgggtggtggcgatgatgagccaggacctgctattgtagaaggcgaattccagaagatatctgatgttgaaccaggcaatgaaggattcaatgttgttgcacgtataatgagcattggaaacagcagaatattcacttccagaaaaggaaagcaaggaaagctttgcaacttgcagattgccgatgacaccggagagctaagacttgttctttggactgaaaacatcaagcatctcaagcatgtcactgaaggagatattgtagagattacaaatatcgaatgtaaagaaggcttcagaggaggtaaggaattctccctacgtccaagatcatctttaagacctattgaagagggcagtgaaaactatccggaaaacattgctgctttccctgtctatgaggaaaagattactcagattgcagacattaagcctgatgaaaccgtaagcatcataggaaggctaatcagagttcctaagccacatgcctatgaaagcaacggcaagaaaggtaaggtaacctcccttgaaattcaggatgcaagcggaaagacctcatacacattatggaacaatgacgttaagctaatcgacatcttggaattgaaggaaggggacattgtcaaaatccttaatgaacaatccagagaaagaaacggagaaatttccttaagccattgggatggaagaatcgtcaaggctgaaggcgactatgacattccagaatatgaggaaaacatcattaagattgcagatgcccaagagatgcaggatgtaagcattatcggtcttgttacaaaggttcaggacgtaattcaattcacaagaaacgacggctctgaaggctttgtaaaatcaatcgagctttcagacgacgaaggaagcatcagagtaaccctatggggagacgacactaagatacctatctccaagggagacattgtcaaggtcattggaggaaatatagaatatgatgatttctcaaacggctacagggtaaacaccaattggaacactgagttaaaaatcaaccctgaagagcatagcgatttgatagaaaccttaaaaggtcaagcagaaaacttaggacctattccaatcagcgaggttcaatctattgaggaagacggtgaggaagttgacattatcggtagaatcatcaccttaaatgacacccacaccttcccaagggatgacggcactgaaggtgttgtccgctctggtgaaatggctgatggatcatctcctgacggacttgtaagggtatccttctgggatgacaaggctaaggttcctgaaataggaaaggcctacaaggttgaaaacgccagaacccgtatgggaatgtatgcagtggaagtcaatgtaggaaagaccacaagattcattgaaatcccagaaagcgaagcaggtgaccttccttcatttgaagagttagaagagtccatctacatcagcaaaaaaattgaagaattggatgaggatgacatgaacattaaagtcttggctagaatcctggaagttcatgaacctcgggaattcccaagggatgacggcactaaaggattggttggaaatatggaggttgcagacataaccggctccattagagtaaccttatgggatgataagaataaccttccatacggcgttggggacgctatcaaaatccaaaatccacgtgtaagatataattcaaatatggactatttagaattaagcgttggaaacggaacaaatatcttaactccatctgacagtgagataaatgatattccagacattttagagttacaaaatacattgtatcaaaccaaggagattgctaacctttcagatgacgacactaaaatcagagttacaggcagatttgtagacatctatggtcaaaagatgatcattcctaaatgtcctcaatgtaacaatacattagagcctgaagatatcgatgctgaggaatgcagcttctgcggcaattatattgacgagcctaagtaccttttaatgcttccaggtaaattagaggatgacacaggcgacattcaagttacattcttcaatgaattggttggagaattgcttggcatgaaacaggatgaaatctttgaactctatgagggagaaggtggagaccttggtccattggaaggaaagattgatgatttggaaggcattaccttagaaatccttgcagatgttacattcaatgaatatgatgaggaaaataggttaagaccaagaaagatctttaatatggaatggtaa

SEQ ID NO: 115 - DNA, 936 bp, Methanobrevibacter ruminantium
  source 1..936: mol_type = genomic DNA
atggtagaacttgaagacttacctaatgttggagaaaaaactgcagaaaagttaagagaggctggatttgctgatatgatgagattagctactgctactgctaaagaattatctgtaaaagcggaaatcggtgaaggtgtagctgaaaaagttattgaagcagctcgtaaggcagaaaagatcgattttgaaactgcatttgatgtaatggaaagaaggagagatgttggccgtatcactacagggagcaaaaacgtagacgaattgatcggcggtggaatcgaaacccaatctatcactgaagtattcggtgagttcggttcaggtaaaagtcaaatctcccacgaattagctgttacagttcaattgcctaaggaaagaggcggacttgaaggggaatgtgtattcatcgatacagaaaacacattcagaccagaaaggattgaacaaatcgcagatgcttgtggaatcgaccgtgaagaggctttacaaagaatccacatcgcaagagctttcaactcctctcaccaaatattgatggctgaaaagattaatgagcttatccaaagtggagtaaatgtaaggcttgtaatcgttgactcacttatggctcacttcagagcagaatatgtaggaagggaatcattagcaaccagacagcaaaagcttaaccaacatttacatgcattgcaacaaatcgctaacacctataatgttgctgtattccttactaaccaagtacaagcaagaccagatgctttcttcggcagccctacaaaagctattggtggacacgttttaggacacgcttcaacttacagaatctggcttaaaaaaggtttagctggtaaaagaattgctaggctcgtagacagccctcacttacctgaaggagaagcagtatttaaggttactacagacggaattgttgactaa

SEQ ID NO: 116 - DNA, 918 bp, Methanobrevibacter ruminantium
  source 1..918: mol_type = genomic DNA
atgttgattgctatggactttagaataattatactctcaataatcataatgattctgcttggagtgcttcttaaaaaaatagaccttctaaaagaagaagatgtcgaaacactcaataatttagtaatcaatatatgtctaccttgtctaattttcaatgctttatacactgctgatgtttccttgcttccatctttgagtattttaacactttccactactatcactagtttaatcgtaggagtattcacttatattctacttaaattatttgcttgggataatgttaaaatatggagcatacttgtaacagtggtcttgggaaatacagggtttttaggctatccgattacacaggggatctatggcagcgaaggccttatacgtgcagtcttctgtgactgctccacctcaatcacatttgtaatattgagcgttatcctgatattgatttttgatggtgaattgaaggtggctttaagaaagatagctacttttgttccattatggtctatcgttttaggaattctctttaatatattcgccattccgataacagatgtcggaactactgtagttggttatttgggtgatgccactatccctcttattatgatctctttaggcttgtccttgaatataagcgggcttaagaacaatcttaaggaagtgagtcttgcctcattcattaagcttatattatatccctttgtggctttaggggttatggccttgcttggaatcactggattcaatcatacaatcggacttattgaagcggctatgtcatcagctatgattgggcttgttttagccataacttataagttggatcctcatttgacttcagattgtatttttacttcgactttgtttggcttagtgactattcctttgtttttaatgtttatagtttaa

SEQ ID NO: 117 - DNA, 1983 bp, Methanobrevibacter ruminantium
  source 1..1983: mol_type = genomic DNA
atggcagaagaaataaacaacgaagaaattagagtgggagtatatgtttgccactgtggtgtaaacgttggtggagtcgtaaactgtcctgaagtagcagcttacgcagaaactttacctaacgtagttattgcaaaagattacaaatacatgtgttcagaccctggtcaaagtcttatccaagaagacatcaaagaacacaacttaaacagaattgtagtagcagcatgttctcctagacttcacgaacctaccttcagaagatgtgtagaagaagcaggattaaacaaattcttatttgaattcgctaacttaagagaacaagactcttgggtacacatgacccaacctgaagaagcaactgcaaaagctaaagacttaactcgtatggctgttgcaaaagcaagattattagaacctcttgaagcttctaaagtagcagtagacaaaaaatgtctcgttattggtggtggagtagcaggtattcaatctgcattagacttagctgatatgggattcaaaacctacatggtagaaagaaacccaactatcggtggaagaatgggtcaattagacaaaaccttccctaccttagactgttccatgtgtattctcgcacctaagatggtagacacatccaaacacgaaaacattgaattaattacttatgctgaagttaaagaagtagacggatacatcggaaacttcactgtaaccgtagaaaagaaacctagatacgtcaaagaggatgactgtaccggatgtggacaatgtcaagaagtatgtcctatcgaaataccaaactactacgacgaaggtgtaggtatggtaaaagctgcatacatcccattcccacaagcagtacctctctgtgcaaccattgacaaaaactactgtattgactgtggtctttgtgaaaccgtatgtggtccagatgcaattgaccgtgacatggaaccagaagaaatcgaactccacgtcggtaccatcattgcagcaaccggttacgacccatatgacccaaccgaaaaatacgaatacggttacggcagatacactaacgtaattaccgctatggaaatcgaaaggatgatcaacgcatccggtcctaccggtggtcacgtacaaaaaccatctgacggtaaagaacctaaacgtgtagcattcatccactgtgtcggttcaagagacgaacaaatcggtaaatcctactgttccagagtatgttgtatgtactccatgaaaaacgctcaattatgtattgaccacgaacctgacactgaagtaacctgttactacatggatatccgttcattcggtaaaggattcgaagagttctacaaaacttcccaagaaaaatacggtattgaattcatcagaggacgtcctgcagaaatcctcgaaaacgatgacttaaccttaaccgtaagagcagaagacacattactcggaaaagtaactgaatacacctacgacttagttgtattatctgttggattagaacctccaaaaggatccaacgaactcagacaaaccttaggtttatccagaactaccgacggattctacatggaagctcacccaaaactcagacctgttgacaccttaactgacggtgtttacattgctggtgtagcacaaggtcctaaggatattcctgacgcagtagcacaaggttcagctgcagcatcaagagcatctatcccaatggctaaaggtgaagtagaaatcgaacctattactgctgacactgataccaccgtttgtggtgcatgtgaagtatgtgtagaattatgtccattcggtgctgtaagtattgaaggtgaaggcgctgacaaacacgcagctattaacgttgctttatgtaaaggatgcggtacctgtgtaggtgcatgtccatccggtgctatgaaccaaaaccacttcaagaccgaacaaattatggcacaaattgcagctgctcttgaagacgttgcaaaatag

SEQ ID NO: 118 - DNA, 666 bp, Methanobrevibacter ruminantium
  source 1..666: mol_type = genomic DNA
atgaaaaaatttgaaagtgtcgattttgacaaaaccgaaaaaatagttgatggaattgctatcgaagataatgaagctatggatatagtggttatacttgaacccggctcagggcagtatgcattcttggcttcaagaaaggcaccatcaaagggtttcaacgcttttattgaaaccgaagctgcaaaagaccataaaacatttgtcactgcagtgctttttgacaatgaatatgaaattctccactctagaagggacattaatgaggttcctattctcaccactaatgaatactcatgcagaggatgcacagcattgtacgatgcaatcggaataactattgaaagtattaaagatgaaatcgacaataaagtcttgtttttaatcattaccgatggaatggaaaacgcttcaagaagattcaatgaagatcaaataagatcttatattgatgagcttgattacgagtttatctttgttggtgcagacatagacagttaccgtgaagcatctaaaataggaatcaggcaatcccacaccgcaagcttcaagaaaactggtgaaggaatagatgacttatttaaaacaatttctgatgtgtctgacattcatcgcgacaatatgaaattagaggatgtcgattggaagcacagacttgaagattag

SEQ ID NO: 119 - DNA, 1497 bp, Methanobrevibacter ruminantium
  source 1..1497: mol_type = genomic DNA
atggttaaaagaattcctgatgaagaacaaataaaattaggcattagaactttagattttaacattccagaggatcatatttctcgttttgttgtggatttcattgacgaatattatcctcttttaggaatcaaagaaaataaaaagaagaaagggcgtgacagttttcctgtgaaagagatgttaaaattgcttatttatgctaaaatcgagcatattgatagtatgagattcttagcagacatggtaaaatatcatgacgtatataaattcgttggaaatggaatttgtccttcagaacgatcattacaacgatacagagaaaaatacggcaaatattacaatgaattgttaaaagcaaccttaaaaaaagcttcagatgtggattacactgatttcaacgaagtttccattgacggaaccatcaaaaaagcatacaattcaaaaaataaagtgatcacagaaaaagaaactgaaatattaacccgttacttcgaaggaggccgtgtaagtcaggaagagctagataaactccataaaccggcccgagagattcttgaaaataaaaaaatcagcaaccaagaaaaattatacctcttggatgacattaaaacacaattcacactgtctggtcaaaaatcagtgccagtaaccgacatagaagcacgttggatgaaaagcaagaaaggaaactcacaaataagctataatatccaatctgcagtcgattacgatacaaaaatgatttgtgcaataaacgtcgtacaagcccctacagaccattaccaattgccaaaaatcgtagataaggcaataaacaacacaaacgtaataccaagattcgtattggcagatacaatctatctgaatgaagaaagcttatcatatcttgcagataatcaaataaatggagttataccagatagaaagcaatccaaggaaaaaatcggaagattgaacaagaacccatatcacaaggatcacttcaaatacttccctgaaattgatgcatttgaatgtccagaaggccaaataatgtattttttcaacaaatacactgaaaaaaatgatgatttggacaagccagacaaaattaagcgtttatattccaattatggtgcttgtaaggcttgcaattgccgtgaaaactgcctttcatccacccaaacccacagaacaatcaccgaatatggcggaagtttaaagaaagcaatgtgggaaaaaatggaaacagaggaatataaggaagaatatgcaaaaaggtcatctgtcgaaggaccttttggcattttaaaggaacaattccatatagaaagcgaagtagtgataggaaaaacaaagacagaagaaagaatactattagatgccgtggcttataatttaatacgattatttaacttagaacaagaaataaaaaatgataaagaagatatagttgatttctgtgagaaaatttctgtccaagagaaattagaggtcagagcaaccatattttaa

SEQ ID NO: 120 - DNA, 294 bp, Methanobrevibacter ruminantium
  source 1..294: mol_type = genomic DNA
atgagttttgaagacttgattgaagactatgtcaaagctaagatagatttgaatgtcaagttcggatctgtattggatgaattgaatattgaatacgaaagcttttgcttctatgatgaattcaaatccgtctgtcttgatttggaaatgcataataaggaattgtctgatgaagagattgaaaatatcattgaaaagacaggatttgacttcctaaaggtggaaatcaaaggcaaaaagtttccttttggaaatggtgaagaaatcgattacacctatgtattcgagtgttaa

SEQ ID NO: 121 - DNA, 999 bp, Methanobrevibacter ruminantium
  source 1..999: mol_type = genomic DNA
atgaaaattagtttaaataatgtatctttagatattgacttaaagaacagtcaaaaatttaaaaatatggaggtaattcctattgaggctttaagcgctggtaaaaaggaatttatcacacttaaggcgggcattcaagaagggtatgtgaagatttccgaatgtgaaagcagcacagtaaatactgtcatggctcaaaacaagtcttccactccacttgttttaatagatggcgaggaagtaattggcgctatgcaaaatagaataatgaacaggtctttaattgttcctggaaataccactatgcctatttcagtaagctgtacagaacatggaagatggcatactcgtggaaacagtcctaaagcaagggaattttctcattctgacttctttgcagactatgaaacacgtcatcgtaagtctgaaaccttatataataattctgactgccagtctgaagtatgggcttcaatcagcgaccttgaaattaagaattcctacagatctccaacaagtgcattgaatgatagctatgtccatcacaggccaagacttaatgaatatttaaaacatttcagcatgctttacaatcaaattggagctatattcataatcaatggccaaatcaaaggattggaattgttctataatcctttcctctgttcccagtactatgacaagattcttaaaagctatatcatgaatgctattactaattactacagtaattgtagttcaaatagttcaaatattgatgtaggggcatttttggcagatttaagcgactccaaattaaaccactctcctaatcaaggtcttggtcaacacattaagttttcaaacaatcatgggaccggctctgcattgattaatgatggggaattcgttcacttgaattactttaaaaccaaatatgatgtttcttacaagaagcagagaaaaaatgtcagaacttttggttccttcgatgacttattgagtaaaatggatgaataa

SEQ ID NO: 122 - DNA, 1272 bp, Methanobrevibacter ruminantium
  source 1..1272: mol_type = genomic DNA
atgtatcaatacgaaaatgaagttactaaactcaatgaattaatggaaactcataataactggatgagagatagcgtaaaccttattgcaagtgaaaacactacaagtaatgcagttacaggagctgttgcttcagacttagctcacagatatgctgaaggacaagcattcgaacgtttatatcaaggatgcacatatatcgatgaaattgaagacattgtaaaaaggctctcaagagaagtctatgactgtagttatgctaatgtacagcctgtatctggtgtaactgctaaccttgctgctttctttggatttgcaaaggctggagacaagatgatggctatgaacattccatttggaggtcacatctcccatgcaaacgtaagtgcagcaggtatcagaggattaaaaacccttgaacatcctttcaacccagaggttatgaacattgatattgatgcaatgaacaagatgatattggaagaaaagccaaagatcattctcttcggtggaagcttattccttttcccacaccctgtaaaagaggctgtagatgcagcaaacgaagttggggcaactatcatgtatgacggtgctcacgttctcggtttgattgcaggtaaacagttccaagatcctttaaaggaaggagctgaagttatgatgggtagtacccacaagaccttcccaggtcctcaagggggaatcatcctatcagacgaatcaaacaaggaactaatcgacaatgctgttttcccaggtgtagtgagcaatcaccacttgcaccacttagcaggtttaggaatcgctacagctgaaatgctcgagttcggtgaagattatgctaaacaaacaatcaaaaacgctaaagcattggctggagctcttgcagaacaaggtttcaatgtattctgtgaagatcttggctacacagaatctcaccaagtcgctatgaatgtaagcgatgtcaaaagagcaacaatattggctaaagagctagagcaaaacaacattatattaaacaaaaacctcattccaggtgacaatgtaaatgacagtgatgacccttcaggtataagaataggtacccaagaaatcacaagacgtggaatgaaggaaaaagaaatggaagaagttgctgagtttatctggaaagttgcagaaggcgacaaagtagatatcaaggatgaagtaactgaattcatgagtcaatacagaactattcattatgcttttaaagaagaagaaggttataagtatattcaatactaa

SEQ ID NO: 123 - DNA, 702 bp, Methanobrevibacter ruminantium
  source 1..702: mol_type = genomic DNA
atgagaataggatgggcttttactggtgcaggacatttgcttagggaaagtgtagaagctatggaagaagtggcaaaataccatgatataaccgtatttttatcacaggcttcagaggaggtcttaaggatgtatggtttatatgaccgtgtggttgctgtaactggcggaaggtacagagagcttgcctgcgattccaatcagaaatttagctttccaataactggcaggctttctcttggaaaatatgatgctcttatagtttctcctgtcactgcaaatacagttgcaaagatagtttatggaatttcagacactcttgtgacaaatgcagtggctcaggctggaaaagggagagtcaaaacccttatggttccggtcgatattgaacccggggatgttgatacagttcttccttctaagctagagctttcaaaatgtcaaaaatgtgatgtgtgtgatgcagctgaagtctgtccaaatggggcaattgtggctcatcaggagattgatctcttgaaatgcattggctgtggtgcatgtaaggacatttgtcaatatggtgcagtttctgccggtaagattataacaatgcatatgagagacattgatatagagaatactcaaaagctatcaaaaatggaaggaattgaaatatttgcaagtcctcaagagcttttactccattttgattataaataa

SEQ ID NO: 124 - DNA, 402 bp, Methanobrevibacter ruminantium
  source 1..402: mol_type = genomic DNA
atgaaaaataatagaaaaaataatcaaaataaagagaataatcatttaaaatcattgcatttaaaaaaatccaatgaaaaaataacagacctaagaatagcagatagctttttaagtcgttttcttggattgatgtttaaaaaagatatagattatcctttattgtttaagattccacagaatattaataataggcatagatcatccattcatagctgctttatgagatttgaattaaaattagtttttattgataagaacaatatcatatatgaaataagtgatttgaagccatggagatattatgcacctaaaaaaccagccaaatatataatagaatttgataaaaatggatttagtgattatgatttaaaaataggtgatgaagtagagttaaaataa

SEQ ID NO: 125 - DNA, 1209 bp, Methanobrevibacter ruminantium
  source 1..1209: mol_type = genomic DNA
atgagtagaaatatttttgttgaaaaattaaatcaaacttttatcgaagatcttgatattgaaattgtagaaagaaaaggtattggtcacccagacagtatcagtgatggtattgctgaatctgtaagtgaagctctctgtaagatgtacatggatgagcttggtggagtattgcaccacaatactgacgaagtccaaatcaccgcaggtgaatccaaccctgtattcggtggaggacaaatcatcaaaccaatcgatattctcttaaccggtagaggagtatctgaatacgaaggtcataaattgcctcttgattatgtagcaatcgacgcagcaaaagaattcttagacaagactgtaatcaacttagacgtaaaccgtgacacaatcgttgaatgtaaaatcggacacggttccggagaccttgtagacgtattcaaaagggaaggagcaccttcctccaacgacacatccttcggtgtaggatacgcaccattctccgaagttgaaaccatcgtctttgaaaccgaaaccttacttaactccaaagcattcaaaaaagaccaccctggagtaggtgaagacataaaagtaatgggacttagagaaggagacaagatcacattaacaatcggttgtgcaacggtatccaaataccttgcaaacagagaagaatacatcgcatgcagagacgtattaaaagacattgtagctgaccttgcagtaaaatacacagacagggaaattgaagtattcgtcaacacagcagacaacgacaatgcaacagacgaatcaggctactacctaaccgtaaccggaacttccgctgaaatgggagacgacggatctgtaggaagaggaaacagggcaaacggtcttatcaccccatgcagaccaatgtccatggaagcaacctctggtaaaaacccaatcaaccacgtaggtaaaatctacaacatcctctctaacgaaatcgcaaacgatgtagcaaaagatgtcgaaggagtaaaacaaatcaatttaatgattctttcccaaataggtaaacctatcgaccagcctaaagcagcttcagctggaattatccttgaagacggctatgaaatgggtaaggtaagcccacaagttgaaaaaatcattgacaattggttagaaaacattaccgacattactgaaaaggtagttcaaggtaaagcaagaactttctaa

SEQ ID NO: 126 - DNA, 3432 bp, Methanobrevibacter ruminantium
  source 1..3432: mol_type = genomic DNA
atgccaatagaagaggcagaaaaatcatatgactttaaaaaaatagaatcaaaggtccaaagcttttgggaagatgaggacatctatcaaaagaccaatgaattgaacaaaaacggtcctcaatattccttcttggacggacctccatactgtagtggtaaaatccatttaggtactacttggaataaggttattaaagacacattgttacgttacaaatcaatgaatggatttgcacttagaagacaagctggttgggacactcacggattgccaatcgaacataaggtagagcaattgcttggaattgaatccaaacaggaaatcgaagagaaatatggcatagacaagttcgtaggcaaatgtaaggaatttgcaatggaaaacaaggttgcaatgactgaacagtttaaaagccttggagtttggatggattgggacaatccttatatgaccttggatcctaaatatatggaatcagcttggtggacattaaagaagactcatgaaaagaacttgcttacaaaggacaaaagggtaatcagctggtgtcctcactgtcagactgcacttgctgcagctgagattgactatactgaagacacagacccttccatttatgtccgtttcccacttaaggaaaagttcctaaatgaagaaaactgcagtgaatttgcaaatgattctgatttggccaacttaaaacagtcattccttgtatggacaaccaccccttggacactccctggaaacttggctatctgtttgaatgaggatttcgaatattcatttgttaaggtagatgaaagattaaacgagtcagatgacgaaatattaatcattgcaaatgaacttcttgaaactgttttaggtcctatcgaaatcatacataagaataagattccaaatcctaaatatgatccagaaaataaggagtccaaagagaaaaaatacctcattgaagaggaaactgaagtgatgtatgaaataataaagacagtaaaaggctctgagcttttaggtcttggctacgtctatcctttagctgaagaagttccaaagcaaatggaaatagaagctgaaaacagtcttgttcacacaaccttccacggagaccatgttgaattgggagaaggtaccggatttgtacacacagctcctggacacggtcctgaggactttgaaatcggtcaagaagtaggacttcctatccattgtcctgtagatgaggcaggatgctttaccgaagacggaggagcatatgccaatggatacaccaaagacctaaatgacacaatcattgcagacttgatagcaaaaggattgatgtttaagaatgatacaataacccacagatttggggtctgttggagatgtaagactcctatcatttacttagctactgaacaatggtttattaaagtgcctgaaatcaaggaaaagatgctttctgaaatcgacagagtcgaatgggttcctaaatgggctggtgaaggaaggttccatgattgggtagctaacgctaaggactggaccatttcaagacaaagatactggggtattccaatccctatatgggtatgtcctgactgtggagaaataaaggttataggctctgtagaagagttgaaagagctttcaatcaatgaaatcactgcaagcgatgaggaattggttcacagaccttatgttgatgacattttaatcaactgcgattgcggatgtgatagcccaatgaaacgtattccagatgtattggatgtatggattgactctggagttgcaggatgggctgcattatactatcctcgtgaagaggaaatgtttgataaatggtatccatatgactttatctgcgaaggacatgatcaaacccgtggatggttctattcacagttaggtacaggtgtaatcgcattggatcaagccccttacaataaggtattgatgcatggattcgtattggacgaggaaggaaagaaaatgagcaaatccttaggaaatgtagttcagcctgaggaagttattgaaaaatacggtgcagatgtacttagattctaccttttatgggcttgcaagccatgggatgaccttaaattcgtttgggatgaattgaacaatgttaaaaagatgttcaacatcttatggaacgtttatgtattctcaacaacctatatggcacttgacgaattcgacccagcaaaatgcgtacttgatggccctgatgcaaatgtcacacttagaaatgaggacagatggatcttatccagagtaaactcacttgctaaggaggcaggagatgccataaatgacgtacacttccacttggctacaagagcaatcaataatttcatacttgaagacttaagcagatggtatgtaagattaatcagaggaaggacttgggttgaaagcgatgatcctgacaagttaggtgcatattatacactttacaatactcttaatactttaattcatttgatggctccaataactcctcacttgtctgaggaagtttatgaaaacttggttaaaaaccttgatgataatgcagttgaaagcattcatatggataattggatgtttgatgaatgcttaatcgataaggagcttgaagctgaaatggaccatattagagaaatcattgaggcagctgcaagggcaagagatgttgcaagatacaagttaagatggcctgtaagtgacattaccgttgtttctcaggatgaatctatcttaaacagtgttgcactccttgaagatgtaatcaaagaccaatccaacactaaagaggttcttacagcaaatgagtttgaaaaccttacattcattgcaaagcctaatctcaagaccttaggcccaaggcttaagggagatatgggaattgtccaaaagttctttgcccaagccaaggctgaaggaataggcaattcaattaaagaagagcttgactcaagcggaaaatacattgtcacaggtgaagacagagagggcaatcagaaagaaatcgaactcagtgcagatgatgtcctttatgaaactgagcttccagatgatgtagttagcgcagaattcaatggaggaaacgtatttgtaaatactaaaattactccagaaatcttatctgaagctatggctcgtgagaccatcagaagaatccaagacatgagaaaagacatggacttagatgttgaagctaatgttggcgtaatgatcaatactgatggagagtttaaggagctcattgaaaagcaatctaatttgataagcgatgaagtaagagctaaatcccttgtaatattcgatggaaaagcctgtgaagtctgtactgataagggtatgggcagagagtatgaggacatttctgtagaatattctaaagaatgggagatcgaaggtcataaggttattatttcagttgtaaaactttaa

SEQ ID NO: 127 - DNA, 2211 bp, Methanobrevibacter ruminantium
  source 1..2211: mol_type = genomic DNA
atgactttaacagattctgaagtaaaatatattgaaggaattctcggtagagaaatgaacgaattggaagagggaatgttagatgtaatgttttccgagcattgttcatataaaagtagtagaccatttttaagaatgtttcctactgaaggagaaaacattgtcctagggcctggagacgatgcaggtcttgtatctattacagatgaatatgctcttgctgtaggtatggaaagtcataatcacccttcagctattgaaccttacggaggagcaggtacaggtattggaggaatccttagagacattatctctatgggtgcaatgccaattgcccttttagacagccttcgttttggtcctcttgaagaccaaaagtcaagatacttgtttgagcatgtcgttgaaggaatctccgactatggtaacagggtaggagttcctaccgttgcaggtgagattgaatttgacgaatcattcagaacaaaccctcttgtaaacgtattatgtgcaggacttgtcaaaaaggatgagatagttcttgctgtagctccaaatataggagatgtcttccttcttatgggaggaaccacaggccgtgatggaattcacggagtgacctttgcatctgaagagctcacatcagacagtgaaaccgaagacagacctgcagtacaggtagctgatccattcaccaaaaagagagttcttgaagcttcccttgaaatcctagaaaagatagactgttccggagtaaaggacctagggggaggaggccttacctgctgtgtctctgagcttgtagataagtctaaaaacggtgcagttgtagaccttagagctattcctttaagggaagagggaatgaccccttatgaaataatgctttcagaatctcaagagcgtatgatttttgtcataaaccctaaagatgtggaattggcacaaaagatatgtgataagcatgaaattccttctgcagtgattggagaagtcactgaaggaagcaatatggttgtaaaggacttcgatgcagaagaagagttacaaaccttgtgtaatgttccaacaatccttttagcagatcctccttcaattgacaggccaacagtagagcctgctaaatcagaagatcttgttgaagtgattgacggacctattgatgaatcattaattaagatattgtcctctccaaacattgcaagcaaggcatgggtatataaacaatacgaccatgaggttcaaaccagaaccgttgtaaagcctggagatgacgcagcagtattgcagatagatgacgagacagctgttgcacttacagcagactccaacactgttcacacaaagctttccccatatgatggaggggcaggcagtgtagctgaagcaataagaaatgttgtttcaatgggtgctaaaccttatgcaattgttgattgtcttaacttcggaaatccggaaacaccagaaatcctctggcaattcaaggagtgcattagaggaatgtctgatatagcagagaaattcgaagctccagtcataagtggaaatgttagtttctacaatgaaacagaaggtattaaaatcaacccaactccggcagttggagtcattggagttgaaaagctatcaagcatcagaacacttccattcaagaatgaaggagataagataataatcattggaaaaacctatgatgagcttggtgggtccgaataccacagagcagtccataaccttgaacaaggagaagctcctaaaatcagaatagatgatgaattggctgcagctaatgcagttcttgacctcatagaaaatgatggagattatgtaaaattccttgaaggtgaagacaagctcaatataaaagccacacatgacgtatctgcaggtggaatagcaattgcattgtctgaaatggttatgaaaggcaagttaggctgtgaaatagatatcagcaatgtcccagcggaagaaaatattagcgataatgacttgttattctctgaatcccatggaagatacatcattgcagtagatgccgataaggcagaggaaatagtaaattccatagatattgatgctgcaattattggtgaagtcaaaggagattctttaataatcaagaataatgatgaaaccattgttgattttgctatagatgagttagataatgcttataatggtgttattgaaaagtatatggcttaa

SEQ ID NO: 128 - DNA, 1227 bp, Methanobrevibacter ruminantium
  source 1..1227: mol_type = genomic DNA
atgaagtttatatcaaatttaattccattagaagaagcattatcaaaaataaatgataatataaaacttatggatacagaaaccattgacttaaaggactctcaaggcagagttttagcacatgctgtatcttcttatcacaattcacctccatttgacaaatcagctatggatggatatgcagttattgctgaagacacttttggagcttccaataatgttataaaagagttaaaaatcatcgataggattggtgcaggtgatttttccaataagtcccttcaaaatggtgatgctatagttatagcaacaggggcacctattccagatggtgcaaatgctgttttaatgaaggaatacacttatgaggatggtgacaatcttgaaatccactctcaagtgactcccggtgaaaacatatctccaaaggctgaagacattgccaaaggagatgagattttaggagaaaatgttttaatcaggcctcaagagatgggcttgatagcttccgcaggatacagtgaagtggaagtctataaaaggccaagagtaaaactgctgattacaagcaatgaattggtggatccttcccctaatatagatgatgctaaaataatcaattcaaaccaatacacaattgcagctctcatcagaagtgcaggagcaacagtagatattgaccatggaatcgatgactttgatgaaattcgcgatgcaatcgataaggcaagcagggaatatgactgtgtaattacaaccggaggaactgcaataagcaaaggggatgttgtcattgatgcagttgaggacttgggagaagtattgttccatggtgttgcaatgaggccaggtaagccggtaggtgctggaatagtcaacggaacccagatattcatgctttcaggacagcctgtagctgcaatgggtcagtttgatataattgcaagacatttcctatttaaggttcaaggccttgattattcccataagattgtaaagaggacatcttcaactaagatacactcttccctaggcagaaccgattatataagggctgtagcagatgatgagactgttcatcatgttttaaacagaggttctggaatcataaggtctatggttgaggcaaactgctacataatcattgatgaaaaccatgaaggcattgagataggcgatatggtagacttgattttctttaatgatatggcttggcctagtctttaa

SEQ ID NO: 129 - DNA, 660 bp, Methanobrevibacter ruminantium
  source 1..660: mol_type = genomic DNA
atgaataaaaaaataatttttttagcatgtgtaatagggatagcacttttgtcggtaagttacattagtgctgaaagtgatgtggacacctctgattgggtgaatataactgtaaacgatataaacttccaaattcctccagagtatggaggtggaaggaatgcaagcggagattatctttttaacaatgtatttaccttcggactcgtagctttggaaaacaataaaagttttagaaataattacggctatgaagcgacaaatgaagagaattatgatgttgaagagatggaaatcgacggacatcatgccgtagcctactacagcaatagaagcatagtcaatcatactgtaacttatttatattttgaatcaaatggaacattctatgcattgtcctatgatggagatgacgttaattcctctatgaaaaaaatcgtatcttatagtcctaaatccaaattgagtaaggaagagtttaatgaaaagctaaataaggctcaagaggagtatattgaagatcaaatagaacaagaagaggcttatcaatatgaacaggcatatcgtgagggatataatcaaggaagaagcgatagcagaggaggcgaactcttgggttattatttcttctataaattaggtcaaaggagtcgttattaa

SEQ ID NO: 130 - DNA, 1158 bp, Methanobrevibacter ruminantium
  source 1..1158: mol_type = genomic DNA
atgaacggaatatattattatgtaatagcctttctacttatttggactattgcaattgtatttaagggcagacttgaaaattatggccttgaagtcaattttccccttttgatgtggaagacacagagattgagaggatttatagacagaatcgccaatagggctccacggttttggaaatggtacatgaatataggaatcgtcatctctactggatttatgattctgatggctgtggccttggtatattctcttaagaccctgatggacgctcctacagtcagcctggttattccaggggtggaagtgccaggatctccaatattcattcctttcctatctggtcttatagcccttgcaacagttcttatagttcatgagttcagtcatggaatattggcaagggtggagaaaatcaagattaattcaataggtcttctattatttgcaattcttccaggagcttttgtagagcctgatgaagaggaattgaagggattgaaccgtccttctagaatgagaatatatgttgcaggttccatggctaatctgaccttggcagctattgctcttgttatcatgatgctcatatcctcctttgtagtccctgcagtctttgaggatgacggcattgtaataagcaggctcactgaagacggcaatgcaatcaattatctctctgagggaatggtgataaagggaataaacaattattccgtaagcgatggggcatcctatcaaaaggctgtaagcacattaaggcctaatcaaacggtgactgttctaacggatcagggagagtatagcttccaattgaagtcaaatcctcaaaacaagtctttaggatatatgggagttcaggcacaggttaatcaaataatttctccggattttgataataagttctacactcctttattatggggaataatgtctttgacagacttattgttctggatatacttcttgaactttgctgtcggcacattcaacctgcttccaatgaagccattggatggaggtcatttgtttgaggaccttttatcctatattacatcagagaatatctataagcctgttgtgactttcatgtccttctttatgggaataattattgttgttagtttggttgttggatttgttggtgttccattctaa

SEQ ID NO: 131 - DNA, 1227 bp, Methanobrevibacter ruminantium
  source 1..1227: mol_type = genomic DNA
atgaaagcaaaagctgaaaaaatcggtgatggagtatactggatcggtgtacttgattgggacttaagaacttaccacggatataccttagacggaaccacttacaatgcttacattgtattcggcgaaaaggtagcaatcattgacaatgcatatcctggaaaaactgaagagatgatggcacgtatcgatgacgctttcgaacaagaaggaagggaaatcaaagtggactacatcgttcaaaaccacgtagaaaaggaccacagtggtgtcttatacgacttatggaaaagattcgatgcacctatctactgcagtaagatcgctcaaggaggattgctcagacactatcctaaattggaaggtgcagaattcaacattgtcggaaccggcgacgctcttgaccttggaggcaaaactttagcattcttagatgcattcttgctccactggcctgacagcatgttcaccttacttgcagaagacggaatcctattccctaacgatgcattcggtcaacacttatgctactccaaaagatatgataaggacattccagaatatgttcttatggatgcagcacaaaagttctatggtaacttaatcactccactatctaaaaaggttcttaacaagtttgatgaaatcattgaattaggccttttagaacaagttaagatgattgctccttcccacggtcaaatctggacagacccaatgaaaatcattggcgcttacagtgactgggcaaccggtaaaagagcagaagacaaagttaccattgtctatgacacaatgcactattccacccaaaagatggctcacgaagttgctgaaggaatcatggcagaaggatacgatgtggaaatgttcttcttgcacgaagacgaaagaagtgaaatcgtaaaaagcatattaaccagtaaggctgttgctttcggtattccaacaatcaacgacttcccattcccaagcattggagacattatctactacttgaaaggtcttcacttcaacagaacaggattcaagagacccgctgtaacctttggttccatgggaggaagaggtggagctgttgaattcattgcaaacgagctcaccgaatgtggatttgaagttctcgaccaacaagaaatctactatgtacctgcagatgaagacgatgaagctagcttcaaattaggtcaaaaattagtagaagaagctaaaaagttagaactttaa

SEQ ID NO: 132 - DNA, 795 bp, Methanobrevibacter ruminantium
  source 1..795: mol_type = genomic DNA
atggaaaatgaagagaatattagtcaaccaaaagcaattcaaatttttgctaaggctccaggggagcttggcgtaaatgttgtaaagagcccagtgaaattaactatcctttccatgctaaaggacactgatatggaatttgatgaaatcgttaaaaacactggtaagtcaaaatcaactatttctgtacatttaaagtctttaagggaagatggaatcgtaagctacagatttgatgcaaacgaccacagaaagaaaatattctacatcagctccaaattcttaggagaagtagaatctggtgatgagaaggaattggaagaaagacaagccgaattcttggtaaagaatattttagatgtagacaacttcaagttctcttttctattgttccacaccttaagatccaacttgattcaagagggaattaacatcaacccagtattaaaccaaacaggaaagaatattggtgcagcaatgtatgaaaagctttatgacgatgacattaaagtcttctgtgacaatattactgaattctgggcagataatggattaggaaaacttgatatagttttaggagatatcattaatgttactgcatatgagtgttttgaatgcagtttgcttcctaagaagggtaaacctgcttgctacttagatgcaggtatatttgaagctcttttcgctaattatcttaaaaaagacatagcagtaactgaagttaaatgtttcacaatgggtgacgactgctgtcatttcttagttgaaggcattaatggtgaatctttaacttaa

SEQ ID NO: 133 - DNA, 1983 bp, Methanobrevibacter ruminantium
  source 1..1983: mol_type = genomic DNA
atgtcaaattcaatattttgtcccgactgcgggatgcttaaggaaaactgtgtatgtggaaggtacaaagcaaatcgtgataaggtaaagtacaccaaaggtactagatccaatccacagtataagaaacgaaaaacatttaattattctaataaaaaaagagcggaaaatatgaaaaatacatcatcaaacaaatcaaaaggtttattccaatatgaagagcccaaagggctctatcaatatgaggatcttgaacctgttaaagtagaggaagaggacgactttggaagttcaaaggtctatgacatagctgaacatgacttgcctaaggagataatagatggcttaaaagaggactatcctgaaattccagatagcattatagaaaacttcccatttgaaaggccaagggaaggacaattggatataattgcagatattgaggaggccatatcaaaaggattcaaatacatcatccttgaggcaggaacaggtacaggaaagtcagctgtagccacaacccttgctagaatgtatgagtcagcatatattcttacaatgaccaagcagcttcaaaggcagtatgcagacgagtttgactttccccttgtaaagggaagaggcaattttgactgtataaaagacggatttgaagtcacctgtgacatgggggcatgtaagacagctccaaagaattccaaattcttctgtccatatggaattagcaaaaacccaacacttacaggagacttggcatttcaggactcctatggtggagacattttcttccagacaaatgaccactgccattactggcagcagaaggcaaatgcaataaactctccaatcacccttatgaattatgactacgctattttggagttgaattatgtaaagcatttcggtaaaagaacccttctcattcttgacgaggctcataacattgaagacaagctgatgaaaaccatggaaatcaatctttataatcgtcagcttgaaaaggacataaagaaggtcataagccctcagactcttaaaacaagagagatgggcgaatggataatggagattgatgcaattcaaggccattatgcagatattgacataaaggacctccctacaaacaaggcagacaggatccgttcaacttcagcaaggctgaaggacctaaagaacaagcttgaaacagagcctggaaactgggtaatcgactcaaatgaaaatggagtttctttcaagccacttaaagtcaatcattatgccaacgattatttattcaagcatggtgatgttgtaatattcttaagtgcaaccatcctttcagctaagatgttttcaaaatggctaggcttaaatcctcatgaagtctatcatataaaggtggacagcccattttcagttgaaaaaagaccaattgaactaaaccttgcaggcaagatgtcaaaaaacagggtaaagcagtctgcccctaagtctatcgaaatattaaacaagattctaaaaaggcatgaaggagacaaaggactgattcacacccattcatacaaatgccagcaatatataataaacaacctttataactccagattgattgcacatggctctaacaatagggaaagggtcttaaaatactttgaggaagatgataaccctcttgtgctggtcagtccgtcaatgagcgaaggtgttgaccttccatatgacaagtgtaggttccaagtcatttacaaaatcccgttcccttatcttggagaccctcagataaatatgagaaggaagaaggaccaaagatggtatgcatataagacagtaatgacattgatgcaggcctatggaaggggaatgagagcagaagacgactcctgtgtaacttatatattggattcagatattcaaatgcttttaaagagcccattgtataggtcattgattccagagttctttaaggaagcgattattgttaatgatgatcgtattatttaa

SEQ ID NO: 134 - DNA, 699 bp, Methanobrevibacter ruminantium
  source 1..699: mol_type = genomic DNA
atggttataaaagaaaagatagaaattgaaggaattccagtggaagtccatagaaaaagaatgaaaaatgtctatctgcgtgtattgccagatgccacccttcgtgtttccgccccagagagggtatcaaatgattatataatagaatatgtcacttctaatttggattgggttaagcagactcaagagagaattcttaaaaaccctccaaagcctaaaataatgtataagaatggagaggtccataagatttggggagaggaatacaagatacaactaattaccaatgacacaataaaacatgccttttatgatgctgacgaatctatagtttatcttcccgtaagaagaagatccacagttaatgaaagggagaaagcactatttgaactttaccgctctgaaatgaaaagaaacattgattgctttttaaataagtgcgttccaattgttggagagcaacctaaggaaataaaattcagaaacatgaaaaactggggaaactgcagaagaaataagacaatcacattaaacataaagttggcttcaaagcctccaatctgcacagaatatgttcttattcatgagctctgccatatacttgaattcaatcatagcccacggtttaaggcattgatggatggcttctgtcctaactggagagagattaaaaaacttttaaacgaatctgatgattaa

SEQ ID NO: 135 - DNA, 834 bp, Methanobrevibacter ruminantium
  source 1..834: mol_type = genomic DNA
atgcttacaaaaagaattattccttgcttggattgtgacctgcaagtgcctgaaggccgtgtggtaaagggagttgaatttaaacagatcagatatgctggaaacccagttgagcttgctaccaaatattacgaagatggagcagatgagatagtcatcctagacattacagcttcccacgaacgtagaggaaccatggtggatgttatagaaaggcttactgaaaacgttttcatcccaatatgtgtaggtggaggaataagaaaggtagaagattataccagaatgctaaaggcaggtgcagacaaatgctccacaaatactgctgcaatccataacccacagcttctaacagacgcttctaaagtggttggatcccaagctgttgtaatcggaatagatgcaaagagaagatatgtggaagaggacccagagcaagctaaaggaaaaaccatagtggacacagacgatggagaggtatggtttgactgcagcatctacggaggaagagagttcactggcatggacgccattgcttgggctcaggaatgtcaggacagaggagcaggagaagtccttttaacctctatggatggagatggaacaaaggacggctatgaccttattctaacaaaggcaataaatgacaatgtggacattccagtaatagcctctggaggagttggaaacccacaccacatactcgaggcatttgagatagcagatgcaagtgcggcccttgctgcaagcatattccactttgatgagtatccggttcctgtggttaaaaaatacctgaaggaaaatggtgttccaattagggagactttttaa

SEQ ID NO: 136 - DNA, 1077 bp, Methanobrevibacter ruminantium
  source 1..1077: mol_type = genomic DNA
atgtctagtcaaaaaatcaattccttaatcgatcttaatcttacccaatattcaggccaaacttcacagtctccatggagacataattctatggaaaatattgataagtttgatgagctaatttacttaaaagttccttcaattattgatggacttgatgataaaactatcaatttaaatggacttccagttcttttaaacctatcacaagataaagataatataaatggttttgaatatacatatagtttacctcaaaaagtagaaaaacaagcattttctatagggcaagacaatctttcaaagaaggaacttcaatccattgaaagagaaatagactcaaatctaaataacatctatgacttggaatttgaccttgaaaagttctatgagtttcttttagaggatgagaagctggctccttcagttgatttttgtaagggattgagactatttattgcaaaggatccttttgaatgcataatatcctcaatttgttcagctaacaattcaattgctcgttggactgcttcaatagataagataaagttaaactggggagaaaaggtggaatttgatgaaggtatgttttatggttttccatctcctaaagactttttagacttttatgaaactcctattgaacagtcagaggctgatggacgtaggtatgaggtggattgctacacaaaaaatcttaaatcatgtggagttggatatagggctccatatatgaaaaaggcaagtcagatgcttattgatgagatagatatgaatgatgtttcaaaaatggcttatgatgaggcatttgatcttattttaagattgccgggagttggtcctaaggtggctgattgcatattgctgtatggatttggattccaggaggctttcccatctgatgtctggataaagaggatagtttctcatctttactttgatggggaagatatctctgcagataagactagggagtttggaatagagcgctttggtgattatgcaggatatgcacagctttatctattccattatgcacgtaaatctggtttaatggatgagattaagaataaatag

SEQ ID NO: 137 - DNA, 444 bp, Methanobrevibacter ruminantium
  source 1..444: mol_type = genomic DNA
atgaaattagtcattcaaagagttacaaacgccagcgtagaagttgaaggagaaattacaggccaaatagaagaaggattaatggttttagtaggttttggccagacagatacagaaaaagaagttgattacctagctagaaagcttacaaaacttagaatattcccagatgaagagggcagaatgaaccgttcagtaaaagatataggaggaaaactcttgcttgttccccagtttaccttatacggcagaaccaaaaagaacagaccttccttccataaggccttagccccaaatgaggctaccaaactctttgactactttgtagaaaagtgcagcgaagaggttccctgtgaaacaggagtatttggtgcattcatgaaagtgagcttgttaaacaatggtcctgtaactatactgcttgaaaaagagtttgaagactaa

SEQ ID NO: 138 - DNA, 450 bp, Methanobrevibacter ruminantium
  source 1..450: mol_type = genomic DNA
atgaatggtgaaagcttccagggaatatgggataattctcccttaattgcatggattcataatctctctaagaatcatttcaagtacctaaaggcaaaaatcaacgagtttgatttaggccatgagataaggtatatcatgatgatttacgacaatccaaatatttctcaagatgatttggtgataatgtctggtcaaagcaagggaaacattgccaagtcattgaagaaactggaggatgatggatacattaaaagagaggtaaatccggagaataggagaaagtacatgttaagaaccacttccaaaggtgatgagttggttcctaaggttaggcagatttctaaggattgggaaaaggaagttggaataaccgaagatgataaggaagttattgaaagaataaaagagatagctattaatggaatgaaattaacggaggatttatga

SEQ ID NO: 139 - DNA, 1392 bp, Methanobrevibacter ruminantium
  source 1..1392: mol_type = genomic DNA
atgaaattcgattcagagacatctgtattgcttgtatcattccttacagcattctttgcagtgtttttagctgcaggtatagtcataggagttccagcaattgcaaatgagtttggaatgaacaatgtagttcaaaattggattattacaatcgcattgcttgttgtagctatgtttacgcttcctgctggacagttgtccggtaagttcggtgtcaaaaggtctttgcttgttggagtattaatctttatcgtcggttcaataggagcatgccttgctttttctgccgaatcattcctcttctttagggtgattcaaggaatcggaggggcattttcaaatgtggcttctatggctatggtcgttcaggcaatcaagccacaaagcagaggaaaggcccttgggcttactgtaactggggtttaccttgcaggatccctttctcctgtaatatgcggattccttgtttataactttggatggagatccatgttttactttacaattccattcttccttatttgtattgcgctaatgctttggaagattccaggggattggaaaacctatgaaaatgataagattgactctataggatacatgatttatgcagtgggaatattgctcttcatctatggatttacaaacttgataaacgcttggggtttgatttgtgttgttgtaggctttatattgcttcttgcctttgcatattatgaaacaagagtggacactcctgcatttaacatgagattgtttaagaatactaagtttgcatcctccaatgttgcggcattatgcagctatcttgcagttgcagcactcactaccatattgaattatcatttccagtatgtaaggggatggaacgctcaaatgtctgggcttatattgattgttacccctataatcatggcatttatggctccaaactccggtaaattgtctgataggatacatcctcaaaaattggcagctattggaatgaccattgcaactgcagccctagtgattttgatattcttagatgcaaacactccaatttggctgattattgttgctatggtacttcagggggttggtatgggactatttacaactccaaatacaaatgcgatcatgagctctgttcctcctaaggagactcctaatgcttcagcagcacagtctgcaatgagaacaatcggtcagacaatgagtttagggcttcttacccttgtatttgcttggattatgggcagtcttaagctatcttcacagtatgcaggaatggttgttcaagcatctcagatagtttgtattatctgtacaataatttgtgtagtggctatatttgcttcattggttggtataaagtctaaggatgagtttaatattgaaaagccaagttaa

SEQ ID NO: 140 - DNA, 1392 bp, Methanobrevibacter ruminantium
  source 1..1392: mol_type = genomic DNA
atgaaattagatttagaaacagttgtagtggcggtatcgtttattacttcattttttgcagtatttttatcaaatggaattgtcataggggttccagctattgcacaagagtttgcaatgaataatgttattcaaaactgggttcctacaatattcttccttgtggtagctatatttacagttcctgcagggcagatatcaggtaagtttggtgttaagaagtctttgcttggaggagtgcttgtctacctctttgcttcaataggggctgtgctttcattctctactgagtcattcctccttttccgtatccttcagggtgcaggggttgcattcttgaatgtgtctgctatggctatggttgtacatgcagttaagcctcaaaataggggaaaggcacttggatttacagtgactggggtttatttggctacatcattgtctcctgtaatttgcggattccttgttcataatctcggctggagatcaatgttctactttgtaattcctttccttgttatttgcgttcttcttatggcatttaaaatacctggagaatggaagacatatgaaaaggacaagatcgatatgatcggatccattctatatggaatcggaatattggcattcatctatggatttacaaccttaacaacaagcacaggtcttatcctaaccattgcaggacttgccatgcttgttgtatttggagcttatgagctaagacagaagtctcctgtattcaatatgaacctatttaaaaataagaagttcacatcttcaaatatagcagcattgtgcagctatattgccgttatggtggttacaacaatcttgaattatcatttccagtatgtaaggggatggaatgctcagactgcaggtatgatattgattatcactccaattatcatggcaataatggctccaaactctggaaagctttcagataagatacatcctcagaaactggctgcaataggcatgtcaattgctactgtggctcttcttattctcacattcctggatggaaacactcctatttactttgtaatacttgctatgatcttacaaggtattggaatgggactattctcctctccaaatatgaatgcgataatgagttctgttcctccaaaggatgctcctacagcatcagcttcacaggcaaccatgagaacaataggccagactatgagtcttgggcttttaacccttgtatttgcatgggtgatgggcagcttgcctcttgcaactaaatatgcaggaatggtggttcaagcatctcaaataatctgtggaatctgtacagtggcttgtatccttgcaatattcgcttcattggtaggtgtaaagtccaaggataagtttaatacagataggccaacatag

SEQ ID NO: 141 - DNA, 1017 bp, Methanobrevibacter ruminantium
  source 1..1017: mol_type = genomic DNA
atgaatgacttgacagacagactttttcacttttttaaggaagaaataatattctctatttctctgattttagctattatttcttgtttttttgttcctcccagtgtagattatttaaattatatcaattgggaaacaattattcttctttttataattatgctctttgtagagattttaaagaatctgtctgtttttgaaatattggttcgtaagctattgaaaaaagtaaaaaataccagaggactggttctatttttagtcttcacctgcttttttagctccatattcattacaaatgatgtttcattgattatatttgtaccatttacaatattggccttaagaaaggttgatagacttgatttgataatatttgcagtgtctatggagacaattgcagctaatgttggctgtatggttcttcctattggggctccacataatattgtaatgtatatggtttctcatattccattccagtcatttttcttgattcttttgccttatatcgttgtatctgcagtgtttttgattattctatccttctttgttccaagcgatgcagtaaacttgcctaaatttggcaaagttgagattaataaggaaggcttctttaaaagagtcttatttggtgttgattatttccttcttttgactttcatagcactatttgtattgataggaaacttggaaaacattacattctttaatctgttgtttaaaaagtggataataggcaatgaggttatttggggcgtagtggcatctcagtttatttcaaatgttcctgctgcaatcttgctcagtggattcagcactaattatgaggcgataattgttggaatcaatattggagggcttggaactcttattgcgtctatggcaaatcttatttcatataagattcttgtgagggagcatggggagtttaaaatcagatatttgattatatttacatttttaaatgtggttctgctctttatcctattgggagtttatgtttttattcattaa

SEQ ID NO: 142 - DNA, 591 bp, Methanobrevibacter ruminantium
  source 1..591: mol_type = genomic DNA
atgttattcgaaaaggaaaataccgaggaaaagattataagagccacattcgatattgttcaaagggaaggattacaaaaggcaacaactaaaaagatagctgctgaagcaggtgtaaatgaagtaactatttttagaaagtttgaaaacaaaaagaacctcataaaaaagactaaagaatattataccaatcagctcatcgccaaactagaggaaagctttgaatttaacgaaaccgacagcattgaagaatatcttaaaagaagcttcaataagattttagaattttcagaagaggatttcaacataatcagagttgcaatgcaggaagttaagaatgatgatgacaaaaagctccttatcactacaattacagacacaataataaacaaattggatgagttctttaaattgcaattggaaaagggaacaattaaggatcttaattccaaagcagtatccctaatgtgctttagcataatattccagtctcttatcttatggcagatatataatgatggagatttagctgcagactattatgcagatgaatttttagatataatttttaatggaattaaggttcaatag

SEQ ID NO: 143 - DNA, 3285 bp, Methanobrevibacter ruminantium
  source 1..3285: mol_type = genomic DNA
atgaaggtcttaaagatagcaattatcatgcttattttaatcatatctctgggagcggtttcagcaacagagaattttaataatgatttaagtgataatggactaaacgataacacattaagcgacaacagcttaaatgaaaataccttaagcgacaacactttaagtgataaaagcttaagcgaaagcacaatcatccaaaatgatcatgataatttaaaagatacaaataataatgataataataaagctctaaaagatcctgcgaagacatttacagacttacaaatggaaataataaatgcaagtgaccttttagaattgacagacgactataaatacaacaatgaaactgacaatatcacattaacaatctctaaaagcaatttcgtaattaacggaaatggccatacaatagacggagacaatcaatgtggcattttccaaatcaacggaactaacataaccctaaaaaatctcaatataataaatgcaaactctacaaaggacagcgccctattactcaacccaggctctgagcttgagacaaacaatgtaaccttcatcaacgacagctcagacaaaagagtaatatttgcatttggagcaaaatatacaagcaataatgataagtttatagactgcacatccctcaatgatggagtaataaactcataccttggtgaaataactatcaacaacggatattttgaaagctccaagccattggactgggctttcgtcaacagtttgggaaattcctcaatctacgttttaaacacaacatttgcaaataccacctccaaatacgctacagcaatcaagggagatcgagaaacagtaattcatgattctaaattcattaatctctatgcaaaccttactgcaggagcaataggattaaaaagaattgaagaggctgaaattgacaattgcacattcattaatgtgagttcacaaaaaaatggaggggcaatattccttgacatatattcagatagcgaagacgtaccaataatgatttcaagatcctcctttgttaattgctacagcgaattcggaggagcaatcctctctttagggggaaaaatcacattggaggaagacaatttcacaaacaatggggcattctttgacggaggagcaatctattcttccttctcacagcttacaatttcacagacaatctttgacaataactctgtagaattagatgatgatagaggttcctttggaggggcaatattctctgacattagcgcattgattatattgaattgcagcttcagcaacaataacgcccaaactggaggagccctatatacatatgattcaggctactacattgcaaactccactttcaaagacaataccaacaaagagagtgagtttgatgatatcttcacagacttcgatggggaaatcgccacacttgaaaacaatagctatagcggagaggattcaatatgcctgaacaacgaaaggtatgaatcagtaatcgccgtttctggaatgaactttaccctcatagaaaatgaaatcaatgtgacaaaccctcctcggaaatttgacctacgtgaatggggatgggtgactccagttaaaaaccaaggctacatgggttcatgttgggcatttggaactgtaggagctatagaatcttcaatattaagatttttaggccttgaaatggacatctctgaaaacaacatgcaagacagcttattgcaatattatcgctatggaaccctaggagcagaagaagggggagagtataacctaggcccttcctatgcattaagttggtttggagtattcccttcagaatatgacgtttacgatgagcttggaaagatttcagcaataatcgcaacagatgacagcatccatttgcaggacgcagtctttgtgcctcctcttatgaattccactgacaaggataaattaaagcaatcccttttaaaatatggcgctttagcagtaagctactatgccgaaaccgatgaacctggattaaatgagaatacctcatcacaatacagcctaaaaaatgatagtaaccatcgcgttcttttagtgggatgggatgatgactattccaaggacaatttctatatgacccctccaggagacggagcttggataatcaaaaacagctggggagaagaattaggagataagggatactattacatatcctattatgacgcaagttttgcaaccctagtgccttctgtcggattcccaataatgaatacagtcatttacaataaaaactatcaatatgacatcggaggcacattggaattcactgatatgggaaatgaatacgtcaatgaatttgaggctttggaagatgatttcattgcagcagtcggaacatacttcattgatgctggcgtcgattacaacatagagatctatgtcaatgatgaattgaaatacagccaagatggaacttcaccattttttggattccatacaatccaattggattcatatgtccctatcaaggaaggggatgaatttgacgttaagatcacatcagactgcattccaattttagaaagtggaagacagcattatatagaaaacaagtcagctgcaaatctaaatggagaatgggtagaccttaccagtgacgggaaagtctgtgctataaaggtatatactacagatgaagacaagaaaaaggaatcttctagaatcaatacaagaatagactgtaaaaacatgacaaccactgcagtggcatctgaagacggcagaataggagaatacttccaagttactttaaaagacgaaaacggaactgctttagccaataaaccaataaagataggtttcaatggaagggtctatgatagaacaacagatgaaaacggcagtgcaaagctacagataaaccttgcttacaaaggcacatacacctttgcaataggattcttaggagatgaggaataccttggagcatttgaagttgctaagattactgtaaaagtacagacccctaaattgactgccccaaataagtcatataaggtaagtgcaaagacaaaaagccttactgcaagcttcaagacagcaaacggaaaggccgtaagcggtaaaaagataagtttcacagttaatggcaaaacatactcagctaaaaccaattccaaaggaactgctactgtaaatgtaagcctaaacaagaagggaacttatagctttactgtcaagtttgcaggtgacgatacatttgctacttctagtgcaaaggctaaattgacattaaaatag

SEQ ID NO: 144 - DNA, 138 bp, Methanobrevibacter ruminantium
  source 1..138: mol_type = genomic DNA
atggcaagatgtccaagatgtggttccgaagcacttgaagagatcaatttcaatacatataaatgccatgaatgcggctatatgattagaaatccggatgaccttgaattggttgaaagagaaaatggtgatttatga

SEQ ID NO: 145 - DNA, 429 bp, Methanobrevibacter ruminantium
  source 1..429: mol_type = genomic DNA
atgaaaaaggcaattattgaaactgaaaaaggagatatcgtattggaattattccctaacgaagctcctggaactgtagcaaactttgaaaaattagcaaacagcggattctatgacggattaaccttccaccgtgtaattcctgactttgtaatccaaggaggatgtccaagaggagacggtaccggaggacctggctggaccatcaaatgtgaaaccgaaggaaacccacacaaacatggaaccggagcattatccatggcacatgcaggtaaggacactggaggaagccagttctttattacccacagtccgcaacctcatttagatggtgttcacaccgtatttggacaagttatcgaaggaatggatgttgtaaatgctatccgtcctggagataagatgctaaaagttactgttcaaggataa

SEQ ID NO: 146 - DNA, 276 bp, Methanobrevibacter ruminantium
  source 1..276: mol_type = genomic DNA
atgttagaacaatatatgcaatttatgtggttaatcatttttgggaatatagagaacttgattttatcttcccaaggagttgtacagggagtggatcctaagattttaggtggattaagtattcttgtagttattatgtggtttgtaatcggtacagtcattactgatgttgcaatacaatattccaatcttattaattttattggcggtcttgcaatatttcttttaggttttcaagctgtttatgaggctgttaggaacataaggggtggataa

SEQ ID NO: 147 - DNA, 270 bp, Methanobrevibacter ruminantium
  source 1..270: mol_type = genomic DNA
atggattggaaaccttatgctccattcactgcattgcttatttttggaaacattgaaaaccttattctatcatctgaaggtgtaatagcaggtgttaattcatttgttttgcttatattgagtttgatagccgttgttgcttggcttctcttaggaacatatggtacaaactatgcaatcaagtatgctgattatattgaaattatcggcggaatcgctattattctattgggtttagaatcaatgcttgaagcctttggaattctttaa

SEQ ID NO: 148 - DNA, 1041 bp, Methanobrevibacter ruminantium
  source 1..1041: mol_type = genomic DNA
atggctagaataatacttggcaagactggacttgaaatagagaaaaacggatttggagcactccctattcaacgtgttgactttaatgaaagtgcagagattgttcgaaaggcttacaataacggaataaacttcttcgacactgcaagagcatatacagatagtgaagaaaaacttaactatgcatttaaaggattcgataaagagtttccacgagaaagcatcattattgcaagcaagacccaaggggaaaacagaagagacattgaaaaggatatcaagactagtcttgacaatctaggaaccgactatatagacctttatcagatacacaacccatcattctgccctacagaaggggacggaagcggagcatacgatgcattgttcgacctctacgatgagggaacaataagacatataggattcacctcccacaaatatgaacttgcagaagaagcaatccacagcggattatacgaaaccatacagtttcctttctcttaccttacagggccaaaggagcttgcaattgtggagatggcaagggcaaacaatataggattcattgcaatgaaggcaatgagcggagggcttatcagaagctctaaggcagcatttgcatacatcaatcattttgataatgttgttccaatatggggagttcaaaaactaagcgaacttgacgaattcctatcatatatggcagacgacaccaaattagataagcaacttgaagagataattgcaaaggaaagagaagaattgcagggagacttctgcagaggctgcggatactgcatgccatgccctgaagacattcaaatattcatctgcgcaagaatgtcattatggattagaaggttcccagctgaaccaaacctaaatgaagagactcaagagaagatgagaaagatagaggactgcacagaatgcaggcaatgtgtcatgaaatgtccatatgaacttgacattccagagcttttaaagaagaactatgaggattataaaaagatcctatctggagaaattaaggtttaa

SEQ ID NO: 149 - DNA, 1176 bp, Methanobrevibacter ruminantium
  source 1..1176: mol_type = genomic DNA
atgaatacacaggaaatcattgatattgaagataaatatttcattaatacatttaacagggtcccaatagtccttgaccatggagaaggagtaaaagtatgggacatagatggaaacgagtatttggactttttagcaggtattgctgtaaactgcttaggtcacaaccatcctaagcttgtaagcgcaattcaagagcaagcaggaaagcttattcacgtatcaagcatctattataacgaacctgcaacagtttatgccaaaagattggtggatgcaactggctttgatagaatattctttgcaaactctggagctgaagccaatgagggagcaatcaagcttgcaatcaaatacagcggcaagcatgaggtcctatactgtggagactctttccacggaagaacaatccttaccctttctgtaactgatcaccctgaatacagcgcaccttatgttgaaaacctgccaaaaggatttaagaaagttgaattcggcaatttggacagcgttaaggaagcaatcacagatcaaactgcagcaatcatcattgaacctgttcaaggtgaaggtggagttcatgttgcttcagaagagttctacaaaggattgaatgacttatgcaaggaaaaaggaatcctaatcattgcagatgaggtccaatcaggatttggaagatgcggagcattgtttgcacatgaattatttggccttgagccagatataatgactgttgcaaaaggaatcggcggaggattcccaatggctgcatttctggccaaagaggatgtagctggcggatttgtaccgggagaccacggtacaacctttgcaggtagccctcttgcaggtgcagctgcaaatgcagtatttgatgcattcgaagaagagaatattgtagaaaacagtaaaaagatgggagaatactttaaggaaaaattagctcctcttaaagacaaatacgacttcataactgatgtaagaggttccggtcttttagtagggcttgaattaaactttgaaggagcagatatagttggaaagatgcttgaagaaggattcttaatcaactgtacagcaggtaatgtattaaggtttgcacctcctcttgtagttaaagaggaagagattgatgcacttgttgaagctcttgataaggttttttcttccttataa

SEQ ID NO: 150 - DNA, 645 bp, Methanobrevibacter ruminantium
  source 1..645: mol_type = genomic DNA
atggaaataaaaagaatcaacaggtatgtcatttacctattttcactgtttttaatatcattaggggcctcaatatcaatcaaggcaaatctgggaacatctccaatcatctgccttccatatgtttcaagccttatcttgaatatgagcgttggaacagtctgtttgatatttaatgttatattcatacttgttcagataatcctccttaggggagactttgaaaggagacagtatcttcagataattgtaggaacaatcttctccctttcaattgacttttcaatgacgcttgtaacttttttaaatcctacaaactacattagccagtttgccgtccttatgctaagttgtgtggttgttgcatttggcgtattgcttgaggttcaaacagaggtggtctttcttcctcccgatggaatcattgtggctatttcaaaggttctaaataaggagtttcctaaggtaaaacctttctttgatacatcattagtgcttacagcagctattctttcaatagttttcctaggctaccttgcaggagtccgtgaaggaaccataatttcagctgtaataattgggcctatcgttaaagtgcttcagaagttctttaatccttatatcgaggctgtaattgaaaaataa

SEQ ID NO: 151 - DNA, 438 bp, Methanobrevibacter ruminantium
  source 1..438: mol_type = genomic DNA
atgacaaatagaaaagactggggattgacagtaagagggatagttcaacaggaagataagatattaatccttagaagacatcccaagtcaagaaacaatcctaataaatacgagcttccaggaggaaaagtggatcccggagaattctttgatgaagcattgattagggaattcaaggaagaaaccaatcttgatgtaaatatagtgagcttatttgagacagtacaagatgaattcataagtagaagaaccaatcagccgataagcactgttcagttaatgatgaatcttgagataatgggcggagaagtggaaataagttcagagcatgatgattttaagtgggtgagcatagaagagttgaaggagctttataaaaatgatatggttacacctacattaagattgactttagaaaaaagagattttaagatttaa

SEQ ID NO: 152 - DNA, 1284 bp, Methanobrevibacter ruminantium
  source 1..1284: mol_type = genomic DNA
atggatttaaacataaagacaaacgacaaaggccatttagatattggcggtgctgatgcttgtgaacttgtagaagagtatggcactcctatctatgtaatagacgaagaaagagttagagacaactacaacagattttataatgcttttactaaattttatcctaaatttaaagtattctatgcatgcaaagcaaatacaaacattgcagtgctcaaaatcctcgaagaggaaggatgctgtatcgatgcagtttcccctggagaagtctatatctgtaaaaagatgggattttccggagacaggatactctttacaggaaacaacattagaaacgatgagatggactatgtaaacagcgaagacgttatcctaaacatcgattccgtctctgcccttaaaaggttagctgaaagcatcgatccacaaggtaaaaagatctctttcagagtaaaccctatggtaggtgcaggccaccacggtcattgtatcactggtggggaaatgagtaaattcggtattatggaaaccgaagctgtagagatttacaaattagctaaggaattaggattcgagcctgtaggtatgcactctcacatcggttcaggcattcttgacccggaaccattcaaattagctatagaatctacaatgaacattgcaggtaaggtccaccaagaagctggaattgactttgagtttattgacttcggtggaggagtcggtattccttacactccagaagaagagcttttagacttagagcactttgcagaggaaaatataaaattattcaaagaaaaattagaagagtttgacatgggagaacctattttataccttgaacctggaagatacattgtaggtgacgcttctgtaatacttgttgaagtaaacagcgtaaaggaaagttatagaaaattcatcggagtcgatgcaggattcaacactcttcttagacctgccatgtatgattcctaccatcacattgtagttgcaaacaagatgaatgaagagcctacccaaactgtagacgttgctggtaatgtctgtgaatcaggagacctctttgcaagggacagaccacttccagatattgaggaaggtgacatattaggaatattgaatgctggcgcatacggttataccatggcttccaactacaattcaagaccgcttccagcagagatccttgttaaaaacggagaatcctttgttattcgtgaagcacagacctttgatgacatatttgaaaagcaatccattccagaacacttgaaatag

SEQ ID NO: 153 - DNA, 864 bp, Methanobrevibacter ruminantium
  source 1..864: mol_type = genomic DNA
atggtagatttaaaaggtttaaaattctctaaaatgcatggaatcggtaatgatttccctataattgatgaaagtaaaggagaacaaatcaaagaagcagataagccagaagcatgcagacagttatgtcataggaactttggtgtagggggagacggagtattgttcgttgtcccatcagacgtcgctgacattggatacagaatgttcaatcctgacggatctgaagctgaaatgtgcggaaacggcattcgctgctttggagactttgtctacagaaacaagattgtggaaaaggaaacaatgactgttgaaaccaaatcaggtatcaaaaccattgagataactgtagaggacggagagcctgttctctttaaggtaaatatgggcaaatccacattcaaggtccctgaaattcctatgattgctgatacagatgaattcgttgatggggatttggatgtgatagataccactttcaaggcaacttgcgtaaatgtgggaaaccctcatgccattttgtttgtagacaatgtagatgatattgatattgacaaatacggaccggccattgaatgccatgaagttttccctgaaaagatcaatgttcattttgttgaggttttaagcaaaaatgaaggaaaaatgagaacttgggaaagaggagctggcgttacccttgcatgtggtaccggtgcaacttcaacagcccttgccggtgtaaaattaggtctttttgataagaatgtacttctccacttacctggaggagaccttgaatttgaggtctatgaggaagatggtgagcttggtgcatttatgaaaggccctgcagcattagtattcaatgctgaaatccaatag

SEQ ID NO: 154 - DNA, 171 bp, Methanobrevibacter ruminantium
  source 1..171: mol_type = genomic DNA
atgattttatcaagaaacattttgaattatttgaaagaaggaaaaacacttgaagaagcttgtgccaaggcaggtgttgttcaaaatgagctgaatatttggaagctttgggcggataaaggtttgcagccctataaagatttctttagagaaattgaaaattatagatga

SEQ ID NO: 155 - DNA, 729 bp, Methanobrevibacter ruminantium
  source 1..729: mol_type = genomic DNA
atgaatttggaagagagaaattcaagggaaatagaggagttcttcaaatcaaaaggagtgaaagtggtaggttttgctagtcttgaaaacattagaaatgttcctaaggagtatccaaacagcattttaatagggattccaattgaaaaggaagcattgaaaaccatctataccaatgaccaatcattgtatgttgaatccatgaaggaagtggctcaaaaactgaatgacattatccttgaaggtgaggattacatcaaaaacaccatgaattacaatgccttggccatttcaagagaaagggtggcgggggaattgaaagaccttgccagcaagattccccataagacaaccggaacaagatctggacttggatggataggaagatgtgcattgctcatcagtccggaatatggtgccgcacttagactctctacattgcttacagacatgcccattaaagtgggaacacctatagatgactccttatgtgaagattgcacagactgccaggatgcatgtcctgtagatgcgataaatgaagtgaaatggaactcaaggcgagaaagggaagagtacttcgatgcggaaaagtgctttgagttcataaagaaggaaatgaaaagaacaaacggcaagagcttatgcgccaaatgtggtctggcttgcccttacactaaagaatacttaggaatagaaaccgacaggaatctaattaaggaaatatga

SEQ ID NO: 156 - DNA, 651 bp, Methanobrevibacter ruminantium
  source 1..651: mol_type = genomic DNA
atgaaaactaaaaacaccaaaacaagaccacaattaacaaaagacctgaaaagtgaagacttcatggaatactattttttaaaggaagagttaaaggaattctgtagaagagaaggattgaagattggcggtagtaaaaatcagttagaggaaagaatcatttactatctggatactggcaaatcattagatgaatctgtcaaagatggaaataaaaccaaaaatcacaaatctgtcaaagatgataataaaactaaaaattgcaatcataaaatcagtaattctgattctcaagaaatcacattggattccattttaggtgagaacttcagatgcagtgaagataaacgggaattctttgaaagggaaataggaaaaggatttaaattcaaggtaaaattccaaagatggctgaaggcaaatcctgataaaacatatcaggatgcaatcaatgcctactatgaattgcagaactccaacgagaaaaccaaaatagacaggcaattccaatacaaccaatacatacgggatttctttgaagacaatgagggcagatccctggatgatgcaattaaatgttggaaatacaagaaaagtcttaaaggccataaccggtatgaagactctgatttgaaaatattgaaatcataa

SEQ ID NO: 157 - DNA, 585 bp, Methanobrevibacter ruminantium
  source 1..585: mol_type = genomic DNA
atggggaaatttgaaatagaaacagatgatttagtatacatcccttcagatgacacttttctattagctgaaaaccttgagataaaggaaggccaaagtgtccttgaaataggaacaggatcagggcttgtctctatgtatgcaagtctactaacagatgatgtaacagcaacagacatcaactacaatgcccttgagcttgctgagaagaacttcaagctaaacgatatcaacacaataaggcttgagttcggagacctatttgagcctgtaaaaaatgagaagtttgatgtaattctatttaataccccatatctgcctaccgatactgatgacattattgatgatgatttgaattatgcatttgacggtggaatagatggaagaaaagtcatagatagattcattaatgaagtgtcacattatttaaatgatggaggaattgtccagataattcagtcctcattatccaataatgataagacattggatatgtttgataggaatggatttattgcagaaatagctaaaagcgaaagctttttctttgaagagattgttctgattaatgcctataagatttaa

SEQ ID NO: 158 - DNA, 897 bp, Methanobrevibacter ruminantium
  source 1..897: mol_type = genomic DNA
ttgaaggaagaaatatcattagcaaagcaaaccaaaaggatacttcaggaaaatgatattaagttaaacaagaaccttggacagaattaccttatcgacgactttaaaagaaagaaaataatcaattatgcaaatctaacaaaggaggatacagtcctagagattggccccggaataggaactcttacaatagagcttgctaaaagagcaaaaaaagtaattgccatagagcaagacgagactatttttaatatccttaaaaaacgtctagaaaaggaaaaaatcaataatgttgagcttataaacggcgatgcagttaaagtagactttccagagtttaataagatagtctcaaacctcccttatcagatatcctcacctatcagcttcaagttccttaatcacgactttgaccttgctatactcatgtatcagaaggaatttgcagacagaatgaatggaaaggtgggaacaaagcaatattcaagacttagcgcaatgctatactttaaggcagatgtcaagttcttaacaaaggtatctccagagtcattcattccatctccaaaggtagattcggcggttatccaacttaagccaaagaatattgattcaataagaatcaatgataaggaatatgaaatagataaagaaacatataagacatattcgaaagtggttaaggcattgttccaacacagaaacaagaaggcaagaaatgcattgattgattccagacatataattggctttaaagataaaaaggaattaaaaagcattttaaacgatttggaagatgaaaatccaagaataaaagaaatactattagagcgaaccattaatttagctccagaagagattatggaactaactatactcttaaaagaccaattataa

SEQ ID NO: 159 - DNA, 750 bp, Methanobrevibacter ruminantium
  source 1..750: mol_type = genomic DNA
atggataatccaaacattgataatcctgctccaaagaaagaagaaaatgtgattatattagattatcttaaatttggatatataaatcccgaaagaccaactgctcgtggaaagccaattgcacaagctcttggcgttgataaattcacattaatcgaagtcacaccaaaacaaggaattgatttggaaattcatgaaaaagtttacataggttctggaaaaagagacaagatcaaccgagtaaagggattgcttgattatgaaaagcttactgctacaagcagaatcgaattggaatatgcaattaaggaaatcatccaatcaaaagaggagatttacattaagttctttaatgaaatagattccttaaacatcaagatgcacaagctagagcttattccaggaatcggcaagaaacatactcaaatgattcttgaagagcgtaagaaagagcctttcaaagactttgaagacctaaagaagagagtccctcttcttggagatcctgttgacatgcttgcaaaaagagtaagccttgaactcgacaccacacaagtgaaaagaggcaagaaaaaatactatatgtttactcaagttccaagcaaacatccttccaataaaaagagatatagaagaggaagaaacaacagaaacaggaacaacagaaacagaaagccaaataaaaataggaataaaaaacctaataataaggctaataataaagcaactaataaaccaaaaacagaatga

SEQ ID NO: 160 - DNA, 3177 bp, Methanobrevibacter ruminantium
  source 1..3177: mol_type = genomic DNA
atgaattttaaaacaaaaggaagcttgattcttatttcattacttttcattttaataataggtattggaatggcatcagcatccgaagatataaatacagatatagacacggattatcaatctgatagcattgatgtgtctgatgtaagtttaaatgatgaacagatagcatctgaggatagtttgcctaactatgaaattgcaaataaatccaaggacaaactatatgatgaaggagaagaagaggaaggcggcataacaaatgacgatgatgatgaaaattatagaattgatggaatctatgcagattatacaattacaccgtctgaaaatggaactatctttgttgaaggagaaagaatacaaataatatttaattttacagatcaagactatgagcctgtttccggagactggtttattaatttttatggtgaaagtacagatgtcgacatatatcatccatttgaagcaaccgggctcaccgactatgtcgttccaatttatttgcctccaggagactatgtcatattcttttatgaaggcgtggtttttgatgattttggtggaatagaagatgaaggaactcaattagatgtaacttttgaagatgcagaaggaaaccaattagataatccggaattctctatcagaaccaactacaacaaaaaggtatatgcaaatcttaccatagactacagtgtagcagaacttgaaaatctagtggaaggagacgatataactgcaaaaataagcttaatggatgaattcaataacaaaatgactgaaaaggttaacctagagatttacaggaatggagaaaactatgattctaaaaaggtaaacgttgtagagggccaaaataacaacatcatctttgaaaaccttcaggaaggaaactattcattggaagttgcaagcattgacagcgttccaaaatacactaacatcataacaaaagcagtcaacttcacagtcaaaagcaactatgacccagacaactaccaaatcatcctcaatccagaagatgagaaaaaacttgtaggagactcatatgaaatgggtgtaaaactactaaatccatctgaagaagcagaagaaggaagcattgacttatacctaaatggaaactttgtaaaaacattagaacttaactatgatgaagatggttactcccaccacattgtagaaggccttcagcttggccctaacaatgccacattcctataccaaatcagagatggagtaaacgtaagcgaatcagtaaacctaatcagatacgaaaccgagtccatcatagaccttgaaagctcagatatcattatcggtgacgatgcaaagatcaaggccagcctaagttaccttgacggaatcgtcaaaaagccaatcaacgaaaacttcaagctttatatcaaaaactacgttgaggatgaagatgaggtcgaatttgtctatgatgaagagtttaccataaaaggaagcgaaacaataactcttagcgacctagaggaaggaacatactacatttcagctgtatacaatggtaaaaactacaaatacctagcaactgaagaagaaagcacccttgaagtattccctaaggaaacaagagttgacgctgtcgcaagaacctattcaactgaagagaatgttattgtaggcatagaattagctgacctatctggaaaagccataaaaggcactgtaaatgttgtccttgacaacaagacaagttaccaagtaaacactaccgatgacatccaacatcctgtggaattggaccttggaaagttaggctatggcctccacaatattgaactaaactacacaggagacgatagcgaaggatggcttccaagctacaacaatgcagaattcctagtaatctatccaagcttcatgagcattgaagatggagacgtcacctccggaagcgacctgactgtcaacataagcttgacaggccctgatgatgaaggaataaacggaatcattacagttcgcatttacgacaataccggaaaatatctaataaatggagacttcaacacaacaaatggagtaaaaagcattgaactcaaaaacatcactaaggattatatcatctatggacgctactatggattggatacaagcaaaatagaaataggacctagcaatcattatttaagcagcgaagcttatggattcattagaatagctgaagggaaaagcgaaaaaaccgaatatgaccttgaattgaccaaggtaaatgacaacacagtaattgcaagccttaaggactccgattcaaagcctgttgcaaatgcagagctaacagtaaaagtgaatggagtagaatccaaagcaaaaacagacaataatggaatggccaacattagcttcagcggaaattcatcaatcaaggtaagctatactgatgcaaataacacaactgcaaaggcatctatggaaataattatcataaacaatgttactgaaaagattgtaaaccaaacagtagaggttccggttgaaatagagaagattgtctatgtaaaccaaaccgtggaagtccctgttgaggttgaaaaaattgtatatgtcattccaaacagaacagacactgcattcgaatacgaaaacatggttacaactgcagtggcatctgcagatggcagaacaggagaatacttcaatgtcagactaatagacgcaaccggtaagccattagcctacaagcctattaaaataggattcaatggagtcgtatacgaccgtacaaccgatgcagacggaagagcaaaacttcaaataaacctcggttataagggagattacacctttgcaataggattccttggagatgacaattacactggagcatttgaagtagctaagataactgtaaaacttcaaaagccacagttaagcactgcaagcaaaacatataaggcaagtgcaaagacaaagacattgactgccaccttcaagagcgaacatggaaatacagtaagtggcaaaaagataagctttacagtaaacggaaagacatacagcggaactaccaattcaaaaggtatagccagcgtaaatgtaagcctatccaagaaaggaacttatagctttactgtaaaatgggcaggtaatgatcaatttgcatctgtaacaaagagtggaaaattgaccattaaataa

SEQ ID NO: 161 - DNA, 345 bp, Methanobrevibacter ruminantium
  source 1..345: mol_type = genomic DNA
atgattgggaaaaaaacattagaaagtgaaccgataccagcagctaaagttaaagaaatattagaagagttttcagaaaaatatgagctcaactatgaacagaacttgaccttagctcatgtgactaatctaaataaactttccctagaagatgctgaaaaattaatcgaagagcttgaagcattcatgacccataaacaagcaatccgtgtagcggacttgcttccaagagacatggcagacttaagattaatttttgcaaaagaaagaaacgctccttctaaagaagatatggagcaaattcttgaaattattgaaaaatatgaaatttatgttgaggaataa

SEQ ID NO: 162 - DNA, 291 bp, Methanobrevibacter ruminantium
  source 1..291: mol_type = genomic DNA
atgcaaagatccagaggatttaaaagtagaagtagaaaaaaattgaccaagaaagttagacctggtcgtgctaatccgatcaccagaagaattcagcaatttgaaaacggtgatatggtacacattatcatcgacccaagtattcaaaaaggccaacctcattccagattccatggaaaaactgctaaagtagtagataaaaaaggtaaagcttacatacttgcattaaaagatggtaataaagcaaaagaattaatagttactccagaacatttaaaattacaagagtaa

SEQ ID NO: 163 - DNA, 1269 bp, Methanobrevibacter ruminantium
  source 1..1269: mol_type = genomic DNA
ttgaatcaagaaatactaaataaagcagaagaattaataaatcatacaaatggaaatatctgtaatcactgtttaggacgtaaattctcagactgtgttgaaggagatggaaatgaagatagaggtgctaaaataagacaagcacttaatctagagccttacaaagcaaatgaagataatcctgcaaatgatgaaaaatgcctaatctgcaatgatttatttgaagacctcaacactgtccttgatttggtgaatgaaaaaatagatctccttaaggtggaatttgacacctttgtagtgggatgcaagcttccaaaggaaatagtggaaaaggaccaagagataagtgacgaatttgatttcaatgttgagataatcaaaaaggaagtcaacagagaaatcggcaagctccttgaatcaaatctagagcagaatgtagactttgatggagaggatgtccttgtaatggttgactttagaagaatattaaaggaagacattgaaaatccaatcaaggtccgccttcagataaacccaatcttcatagaaggaagatatagaaagcttatcagaacaattcctcaaaccaaatggccttgcagaaaatgcaaaggaaaaggatgcgaggaatgcaatttcacaggcaagcagtacccagaatctgttgaagagctgctctctgaagtggttctaaagcacaccaacggatacgaagccaagttccatggtgccggaagggaagatatagatgttagaatgcttggaacaggcaggccatttgttcttgagataaaagagccaaagataagaaagatagaccttaaaaagatagaagaagaagttgcaatctctgcaaaaggaaagacagaataccttaatctcaagtttacagaaagaagaagaaaggcagaaataaaggagtcatctccagatacctataaggtctacagagctcttgtaaaatgcgaagattacatcaaggaagaagaccttgaaaagcttcaaacacttcacataatccagcaaagaactcctataagagtctcccacagaagggcagataagataagacaaaaggaagtcaaggaaataaaggcagaattcattgactctaagacctttgaaatgatcattaaaaccgaaggtggattgtacataaaagagcttatctcttcagatgagggaaggtccaatccaagcgtaagtgaagttttaggcactcaagccatatgtgcagagcttgatgtgattgaagtggggattaaataa

SEQ ID NO: 164 - DNA, 1335 bp, Methanobrevibacter ruminantium
  source 1..1335: mol_type = genomic DNA
atgttaggaagtttaggagaaaaccttacaaacaccatgaaaaagctagctggaatgagtgttatagataagaaggttattaaagaagttgttaaagacattcaaagggctttaattcaatcagacgtaaacattcagcttgtattaaaattatcaaagacaatcgaaaagcgagcacttgaagaggagcctccaaagggaataaccccaagggaacatgtaatcacaatcatctatgaagagatggtcaatctcctcggaagcgaagctcaagagcttaagattacagaaaagccatttaaaatccttttcttaggattgcaaggtagtggtaaaaccaccaccataggcaaattatgcagatacttgcaaagaaaaggtttctcaccagctgtcgtatgtacagacacttggagacctgcagcatatgagcagttaaagcagcttactgaagaaatgcaaattcaactttacggagacccagacaataaagatgcacttgatttagctgaaaaaggtcttaaacactttaaaaatcaaaaaatcatcatcttcgatactgcaggtaggcataagaatgaggaagacctcatcgaagagatgaacaagttagacaagatcattaatccaagcgaatccatgcttgtaattgacgcaactatcggtcagcaagcaggggaacaggctaaagcattctcccaagcaactgacatcggttcaatcatcatttcaaaattagacggtacagctaagggtgggggcgctctctcagcagtagctgaaactggtgcgccaatcaaattcattggtaccggagaaggaatagatgattttgaagcatttgaccctgaaagattcatttcaagactccttggaatgggagacatcagaagccttatcgaaaaggctgaagaagtgattgatgaggatgaagccaccaagaccatgaacaatatgctcagcggaaagttcactctagtggatatgagaagccagtttgagatgatgaacagcatgggacctatgcaacaggtcatgaacatgattccagggcttggaggaaagatcccaaaagaggcaagccagatgaccgaggataagatcaatggatttaagataatcatgtcctctatgactgaagaggaaatgctcaatcctaagataatcaagcaatccaggattcaaaggatagctagaggcgctggcgtagaggaaagcgatgtaaaagagctattgagatattataacaataccaaaaaggctatgaaaggtattggacgaagaggaatgggtggaggagctatgaataggattatgggtcaatttatgaaatag

SEQ ID NO: 165 - DNA, 567 bp, Methanobrevibacter ruminantium
  source 1..567: mol_type = genomic DNA
atgcttgaaaatttagttgaatcattaagaaatgcacctgttgttaaaaaaggagattacgattacttcgttcatggaataagtgatggaatacctgcccttaatccatgtgttctaaaagagatttctgaagttctcgctgaaaggattgatttggataaagtcgataagattgttggggttgaagctatgggaattcacattgccactgctttatccttagaaacaggccttccattgcttgttatccgtaaaagggaatatggattggaaggagagcatgaaatcttaaagcacacaggatatgcaacttccaaattatacatcaatgacttaaatgaaggagacaatattgtcttggtggatgatgttgtaagtactggaggaactctttctgttgtaataaatgaattaaaggctattggtgtgaatatccttgatacatttgttgtagttgaaaagggagaaggaaaaaagatagttgaagataaaactggagaaaatattgtaactcttgtaaaattggatgtagtggatggaaaggttgtagctgattctttaatctaa

SEQ ID NO: 166 - DNA, 1008 bp, Methanobrevibacter ruminantium
  source 1..1008: mol_type = genomic DNA
atgtcaatatacgatatggaattaaagaaggttattcgaaagattaactccttaaatgtaaagaatgtaggtttgcagtttccggaaggtctcaagatgcaggcggtagctattgctcgagagattgaaaagaacacagaggcaaatgtaattatatctgcggatccctgctttggggcatgtgatgtgtcagataggaaaatgaatggaatagttgactttattgttcattatggccatacccccctcccacttagatatagcattcctacaatgtttattgaggcaaaggccaatgtgaatataaagcaatatttagaagatgccttggaaatgcttgaggactattctaaagtggccattgcaacaacagcacagcacctacacttgcttgatgagatcgttgactttttagaagaccatggaaaggaagttgtaataggctcttcaagaagcacaaggaaaggacaagtattgggatgcaatttctcttcaatcaagaatctgggggcagatgtttatctgtttattggaagcggaaatttccatcctttagggatttatatgtttacaaattctcctgttttggcaattgatccttatagtggcgacattcgtgaaatgagcggatatgcagataggattcttaggataaggtttgctagaatcgtcaaggcaagggaagttaagaaatggggaataatcgtttcctcaaaggaaggccaatatcggatggccttggctaaagagctgaaaaaacttcttgaagatgagggaatggaagcattcatccttcttatggatcatatcaatccagatgttcttcttccgtatatggaacttgaaggatttgttgttacagcatgcccaaggatagcaatcgatgactctcagatgtataagaagcctgtaataactccaaaggagttggagatagttctaaataaaagggaatgggaaaagtatcaattagatgagatattatttgaggatcgttattatcagtaa

SEQ ID NO: 167 - DNA, 462 bp, Methanobrevibacter ruminantium
  source 1..462: mol_type = genomic DNA
atgaatttcgaattctccattcttggattgtttttattattgctcctatttgttccaaacataatctggactaaatttatccctaaagattatgaaaattattcaaagagagaaaataagatattgttaatccttgaacgtattggtgaagtggcaactgttgtatttgccttgttttgcggtgctaaatttagctggtcattattattaattattatttttattctaatggctttgtatgaggtttattggattagatactttatgtcaagccatacaatgaaggatatgtgtgatagtcttttaatgattccccttccaggtgccacattgcctgtaattgcattctttttgtttggaatctattcaaatagcatatttttagttatatcttcaattattttggcaattggacatattggtattcattataatcataaaaagcagtgtaatcttaattaa

SEQ ID NO: 168 - DNA, 567 bp, Methanobrevibacter ruminantium
  source 1..567: mol_type = genomic DNA
atgaaagtagaatctggagattttgtaatgcctggcgactttttaagtgtaagtgaagaattcctgccaggtcctggagcatatgaagatgatggaagtgttaaatcaggtgttcctggaaatgtatttgttgataatggtgaaaaggaaatctctgtaatttcaaaatccggcggtccaaacttattgaaggttggagatattgtatatggtgaagtgaaggacgttcgtggccaaagagccttgattagtgtatacgctaaaaagggaaccgatcgtcaattggctcttccttatatggcagctattcacatttctcaagtgactcctggatatattgacaagcttactgacgcttttagaatcggagatttgattgaagcaaaagtagttaagattatgggagataatttggacttgaatactgaagacattacttctggtgttgttaaggctatgtgtacaagatgcagagcatttatggagcctcgtacagagtctgaagtatactgtccggtatgcaatagaaaggaaaaaagaaaggtttcaaagaattatgattattaa

SEQ ID NO: 169 - DNA, 279 bp, Methanobrevibacter ruminantium
  source 1..279: mol_type = genomic DNA
atggaaattgaagttattaaagaatcaaaattagaacttgaaatgattattcatggtgaaaaccactctctttgtaatgtcttaagaaaatatcttatggaagatgatgatgtggaatatgcggtttacggaatcgatcaccctcttacaggtgcaggtaagccggttatgaccatcaagaccaaaagatcaaaaagacctagaaactctcttttaaaagcagctacaagattaaaagaagaaactgctgaatttaaagagttaattgaagaattataa

SEQ ID NO: 170 - DNA, 417 bp, Methanobrevibacter ruminantium
  source 1..417: mol_type = genomic DNA
atggcttataagattccatctttaactgtagacatatttatttttaacgatgagaaagagtttatactaattaaacgtaaaaatgacccttataaggatttctgggcattgcctggtggttttgtcgattatggtgagacaacagagcatgcagctgtccgtgaagctaaagaagagacaagcattgatgttgaattgattaaactcttcaatgtctattcagaccctgatagagatccaagaagacacacagtaagcgtattctatttagctcatggagatatgaatgatgccaaggcagatgatgatgcaaaggacattggcattttctcatttgatgacttggataatttagatcttgcctttgatcataggatgattttaaatcaggtcaaagagtattttgataaggaataa

SEQ ID NO: 171 - DNA, 396 bp, Methanobrevibacter ruminantium
  source 1..396: mol_type = genomic DNA
atggagttctgtccaaagtgtaatggtatgatgatgaacacaactgtcaaggttaaaaaagaagaccttgaagaaaaagttgatgaagaaaatcaatcaaaccaagaaacagaagaagaaaaagttgtttttaaatgcatgacttgtggctatgaaaaagacccttctgaagttgatcaggaccaatataaagttaaggaaacagtagaatccagtgatagtgttattatgagaggagatgaaagcggaatgcgctctactgtaagagagatttgtcctaaatgcggtcacgatcgtgcttcctatgaattgttacaaacccgtagtgctgatgaggcaccaaccaggttctttacttgtgaaaaatgtcatcacaagtggagaggatatgattaa

SEQ ID NO: 172 - DNA, 1620 bp, Methanobrevibacter ruminantium
  source 1..1620: mol_type = genomic DNA
atgtctaattcgcaaaatgatggtttagaagatgtttccaagggaaacaatgaatctgctggtgaaaatacagattcaacttctaataaaaaaactagatttactaaatctaaatctatttcagaggtttttaaggaattagattctcaggaaaccaatgattccatcttagattctgaagatgctgcttctgaattagaatctgaagataaatattctaatatagaaaattatctttccgaggcagaatctgaagaagaaattttagatgcttcttctgaggcagaatctttagatgctagttctgatgtagaatttgaagaggatattattatcgattctactgcagaagaagaaatagatgaaattattcctattcataatgaatataaggatttagatgaatctgaagctttcaatacagaatctattgatgaagaagaaatttcagaatcttctgaattggataattatgttgaaagcattgttaatgaaaaagatgacttaagctctgatgaacttgtcgattctaaagaaaacttagatgctgtcggtggagatgaaggctctatgagcgttaaagatatcgaaaacgcttcatttgaagctgaagatacctcattagatgctgaagattacgaagatgactctattgacagtgaggatatcgatcaatcttatgaagaagagcttcttgatgagaatatgaaagttataaaggtaaataatgcttcttcagaggatgttttatcaaagaaaaataaaggattccttagctctttcgggtctataaaaatggattcttcctttattatcacagttcttagtttcattgttggactgggaattttaatcatgggtatattctatctcaactccagttctgatagagttgtagataatgttttatctggtgaaactgcaggtcttgcagtctttttaattatcattggtcttttaattatcggtttcagtattttaagattcctttcttctacaaaggccgatcagtcttcttctatgctggatatgtttaaaagcataagggacatcgactatgatgatgttaaagatgataatataagtcgcgatgactttgattctgtattttctagcgtttttggcaaagaaaaacgctctgatttttccaacgacgatggcgataaaagctctgttgataaaaacctttttgatgaggatgacgaaatatccgatgaagatattgatgccttatattccgactcaaatttaaataaaactgcttcttctactaaaaattcaacaggcattcaagacactgacaatataattgaagaggatcttgatgacgattttgatatgattgattccgataattccgaggattttgataacgatactgatttagaggatgataatgtgtctgatttaaaagataaatattctaaatacaatttcgatgatgatgatgctccatccaaacctcagtttaaaaaatcagtggacatttcaaaattcgatgatgatggtttatctgaagaggaattggaagctgaaagaagaagaaaagcggaagaattggaagaaaagaaaagaagaatcatccaaggaactaattttgataatagcttaagaaaataa

SEQ ID NO: 173 - DNA, 735 bp, Methanobrevibacter ruminantium
  source 1..735: mol_type = genomic DNA
atgtttaaagctgagttaagtgattctagtattttaaaaagcagttttgatgctatttcatctattgtagatgaagtgcagattcaaactgacagtgaaggttttcgtttagatgccttagaccgtagtcatattacatttgttcatttagaacttaaagcaagtttatttgatgaatttgtttgtgatgaacctgaaaaaattaatattgacactgatgaattgatgaaagtattaaaacgttccaaatccgatgatcgcgtattgatgtcattggatgaaggtaactttatccttacctttgaaggagaagctaccaggacttttaaaatcagattgattgatattgaatatgactctccagcacctccatccttgaactatcctactgaatttgagattccattctctcttttaaaggattccattcaagatatggatattttctctgataaaatcactttaatggtagatccagagtactttaaagcatttgctcaaggtgaattcggagatgcaaatattgaatatcttcacggtgaaaagatagatgcaagcgctaaatccattttctctttagaaaagataagagaaatgcttaaggcagataaattttctgatatcgttaacatcagccttggagatgacatgcctgtaaccttaaccttaagaagagttgcaaatgatggtgagcttagttttttgcttgctccaaggatagaatcagaagaatag

SEQ ID NO: 174 - DNA, 1614 bp, Methanobrevibacter ruminantium
  source 1..1614: mol_type = genomic DNA
atggatggagacttttttcaattattgcgaagggttcaaaaggaggaacggactaaatccactttagcaagagtggataaagatttctataaacaactctattcctatattagagatttagaacgttctgttgctcaaaatcctttcgatactgctcaatcaaatctattgaacaatgctcaaaggattgctactgagatttgtcaatggagagaatcaaagatcagtacggctgcaaacaataatatttataggtctttccatcttttcaaaaaaggaaaccctcagtttgatttgattgatacaactccattgcatcttacacctgaagaggaaactttatatttcgccttgatggacgctcttaagactcatagatataatatttcattggacaaattcggggatgaaaaagccgattggggtgctgatgattatgaggacgaagaagaggatgattttgaagaagtcgcttccgttgtaaaaagccgtgttaataaaggggttgtttctgatgaagagttcttcaatgaggggggttcttctaatgagtccgttactgatggattcagtggagagtctatttccattgaagagtccggtgctgatcctgtagttcaagagcctgctgtagaaactcctgttgaagaaagttctggcagtggttttaagcaagaagttcaagagtctgctgtagaaactactaataccaatgtaggtggatctgatgaggttttagataggttaaatcaaattaaaaattcaactgttgttacagatgaaaaatacgaacctattgaaaagcaaatcaataatcaggctaaagtagttccaaatgtctccatgtctaataatcttaattatgaaagtaaaaattataatggtcaagataatgagtttgattctaaacttaaaccagattatgaatctgatgtagaatcagaacctaaaatagagtctaaacctaaggtagaatctgcacctagaattgagtctaaacctaaggtagaatctgcacctaaaatagagtctgaacctagattagagtctaaacctaaagtaggatccgaacctagagtggagtctaaacctaaagtagagcctaaaactatcgaagataggcctaaaaggaaaagttcatcaacattagactttgacagcatctttgcaaatccagacagtcaatttgatagcatacacaattttgaacctgattatgaagcggatttagcaaacattcaagcaagttccagttttgcagagcctagcgaagcagatttaatgttttcaacaaaacctaggcctaaaaaagagcctaaacctaaatctcaagttggatctaaagaagagttcgaatctagacctaaagtagaagaaccaagtcatgctccaactgctaaagcagaaagaccaagatctcaatctataaaagcttttgctaaaaaggaagaattggaaaacactacagttgtaatatacaaaaatattgattcatttatgggaattgatgaaaagatttatggtccttttatagcaaatgatgtggttattttaccaaatataactgcacaaatacttatagacaataataaggcaggtctaattgatatttaa

SEQ ID NO: 175 - DNA, 279 bp, Methanobrevibacter ruminantium
  source 1..279: mol_type = genomic DNA
atgaagatgcctaaagaaaaaagaacatactgtccacattgtaaaagacacactattcacgaagtacacacttccaaaaagagaaaagctagtgaattaaaatggggacaaagacaattcagaagagttaccgcagggtacagaggttatccaagaccattgccaggtggtaacaagccggttaagaaattagatttaagatacaaatgtaaagaatgtggaaaatcccacatcagaaaatctttcagagtaggaaaacctgaatgggtatctaactaa

SEQ ID NO: 176 - DNA, 180 bp, Methanobrevibacter ruminantium
  source 1..180: mol_type = genomic DNA
atggctagtaatggtagaggaaactttttaagagttaaatgtttagattgtgacaacgaacaaatcattttcgatcgtgcagcttctgatgtaaaatgtatcatctgcggtaaaaccattgttaaatcccgtggaggaaaagctaaaatcatggctcacatcgatgaagttttagattaa

SEQ ID NO: 177 - DNA, 783 bp, Methanobrevibacter ruminantium
  source 1..783: mol_type = genomic DNA
ttggtaagaaaaagtcaagaatggccaaatgaaggagaacttattgtaggaactgtatataaagttcttaactatggtgcattcgctaatttagaagaatacgcaggtaaagaagcttttattcatatttctgaagtttcttctggttgggttaaaaatatccgagatcatgtaagagaaaatcaaaagattgtagctcgtgttttaagggttaatcctaaaaagggtcatgtagacgcttccttaaaaagaatcagggaagaccaaaggaccaaaaagattcagcaatggaaaattgaacagaaagctgaaaaattcttggaacttgctgctaaatctttagataaggacttagatactgcttatgatgaagtaggctatgagcttatggatatctttggagatatctatggcgcttttgaaagtgcagctgaagaaggagctgaaactcttactgaagagggcattagccaagagtgggctgatgcaatcactgaagtggctgtcaagaacattcaacctcctgaagttcacattacaggatatgttgacattgaaagctatgctccacatggagtggaaatcattagggaagcccttttagcagctgaagacgaaaatattgaagttcaatgtgttggagctcctcgttacagaatcactgtaacttccactgactataagcttgcagaaggtcaattgaaagaggccgccaataaggctattgacattgtcattgaaaacggtggaaaaggagaattcttacgtgaaattgataattaa

SEQ ID NO: 178 - DNA, 171 bp, Methanobrevibacter ruminantium
  source 1..171: mol_type = genomic DNA
atgaaaatgaaaatgaaaaagtgtcctgtttgcaatatttacacactaaagcctcaatgccctaattgcggcggagagttaagggtgatttatcctcctaaattctcagttgaggacaagtacggtaaatatagaagacaattaaaaaaagagatgcttaataaggaataa

SEQ ID NO: 179 - DNA, 789 bp, Methanobrevibacter ruminantium
  source 1..789: mol_type = genomic DNA
atgagaacaacccaatttaaagtattagaagaagttaaattaaacaatccaatatttattgaagcacttcctggtgtcggtcatgtaggaaaattagctattgaccatgtaattgatgaattggaagccactaaatttgtagagatttattctccatacttccctcctcaagttcttgttggagaaggcggaattgttgaagatatgaagaatgaattatactacttgaaatctgctggcggagacgaaagggatttcattttccttgttggaaactgtcaaggattaaatcctgaaggtcaatacgaactctgtggttccatacttgattttgtagagtctcttggagcaaaagagttttacacattaggaggccttgctaccggtcagcctttagaaggtgtagaagaccgtgttttaggtgctgctactgatgaggaacgtattgaaatgctcaaagaagcagatattgaaatcagatctgctgatggcggtattgtaggtgcttctggtttattcttaggattaggaagacttagaggtatgaaaggcgcttgcttaatgggcaaaacccctggctatttcattgatgctgaagctgctgaagccattttggcaaaattagctatccttgtaaagcttgaggtcagcactgacgagttagaggaaagagctaatgagattcgtgaaatgatcaataaggctcaagagatggagcaggaaatgatcaatagggctatgggccaacagcaagcacaaactcaagacgaccttagatatatcggttaa

SEQ ID NO: 180 - DNA, 1188 bp, Methanobrevibacter ruminantium
  source 1..1188: mol_type = genomic DNA
atgcttcaaattgcagtaacaggtaaaccaaatgtaggaaagtcttctttttttaattcagccactgcatctcaagtagaaatggctaactatccattcacaaccatagatgcaaataaggctgtaggtcatgtcatcagtgaatgcccatgtaaggaattaggggtcacatgcaatccaaacaactcccaatgtatagatggaacaagattgattccaatagagcttatagatgtagcaggacttgttccaggggctcatgaaggtaaaggtttaggaaacaagttcttggatgacttgatgcaagctaaggtattcatccatgtaatagatgcctcaggaggtaccgatgcagagggaaacccagtggaactaggctcccacgacccattggaagacattgaattccttgagcatgagatagtcatgtggatgtatggaatcgtcagcaaaaactgggtaaggcttatccgtaaggttgaagcagagcacttagacttttctaaggtcatatttgagcaactgtcaggtacaggtatcctaattgaagatgtaatagaagctttaagaactgtaagtcctgattatggaaaatgggaagatgaagaccttatagaatttgtaagaaaccttttaaacattgcaaagccatcaatcgtcattgcaaataaggcagatcttcctggagcaaaggaaaacattgaaaggatgaaggaaaagtatcctcgtgtcattgcaacatctgctgaatctgagcttgcattggtaaatgcaacaagggccgggctcatctcatacatctcaggagacaacagctttgaaatcctagagaaggacaagctaaaccctaatcaaatcaaggcattggaatacattcaaacaaacattcttgacgtttatggaagcactggaattcaagaggcattaaacactgctgtatttgagcttttaaatatgatagtggtttatccggttggggatgagcataagttcactgaccaaaagggaaatgtgttgcctgatgctttcctagttcctaaaggttccacaccacgtgaatttgcatatatcattcacacagacattggtgataagtttatgcatgcagtggacgctaggaagaatatgagaattgcaagcgattatgaaatccaagatagagacattattaagattgtaactagataa

SEQ ID NO: 181 - DNA, 1119 bp, Methanobrevibacter ruminantium
  source 1..1119: mol_type = genomic DNA
atgatgcatccacgtccaagtccaattgccgcttctttatacactttaagagatttaaatgcagatgtaattattatgcacggtcctcatggctgctgctttagaacaggaaggctccttgaaagcgatggggtaagagttgtcacaactgctatggctgagaatgatttcatattaggagctgcagacaagctagaggaaacattgcaggaggcttatgacacattcaatcctaaattgataggaattgtaggaacatgtgcaagcatgatcatcggcgaagacctgaaggagccgattgaaaacttaaatcttgatgctgttgtcatacctgtagagtctcacggaggctttggagagggagacaatacagaaggtgctattgcagtgcttaacgctgctgtagaatgtggtgtcattcctcaagaggaagcagacaggcaaaatgagatgcttcgtttagcaactgtggttgaaaaaacaagaggcatggctcagggaaagtatataaagcctaattttggagacaataaggaaaaagttgcaaagattgttgtaaaagcagtaaaagaaggaaaaaatgttgcatttgtattaaatgcgaaaaaagaaacttcatatctttttgcagacattttaaattgcgatttctctaaacttttccaagatactgattcaaatataaagtccaataaagatatagaaaaccttcatttcattgcaaatctggatgagaacatcggccttccaagaataaggcagcatgcagtaaatattacaaaagaactgaatgaaacaggaatagatattgaatgcatcacaggtggccttgatgagtatccaatcactccaagaaaggcagaagagtatcttaacgagctaaatcctgatcttgttatcgttgcaggagttccacatgcattgtatgtagaggagcttgactgtgaaaccattgcagttacagatggtcctagacttgttcagccacttaatgaattaggctattctcatgtaatagcagaacttgatgcccattctaagacattaggtgtagatgagatagttgattcagactttggtatgatgatacgttcagctattgaatgggagcttgaataa

SEQ ID NO: 182 - DNA, 594 bp, Methanobrevibacter ruminantium
  source 1..594: mol_type = genomic DNA
atgattacaattattgattataaaagcggaaatcttagaagcatttccaatagttttaaaaagataggttcaaaagcagtcataacaagcaatcccgaggacattgcaaatgctaatcatttagttcttccaggggtaggtgcctttggaacagctatggaaaacattgagccatacaaggatttgatttatgagcatatcgatgatggaaagccatttttaggaatctgtttagggcttcaagtgctcttgtcctcaagcgatgagactcctggagtcaaaggccttgatatatttaaggggcatgttgaaaagattcccgaaggcaggaagattcctcatatgggttggaatcagttaaaacaagtcaagccatgtcctatacttgatggtgtggatggcaaggacttttactttgtacattcctattatgcagttcttgatgatgaaagcaatttgtctggaatctgtgattatggtgttgacttgactgcatcagtttcaagggataatgtatttgctacccagttccaccctgaaaaaagtggagttccaggcttaaaaatccttaaaaactttgtaaatttagaataa

SEQ ID NO: 183 - DNA, 621 bp, Methanobrevibacter ruminantium
  source 1..621: mol_type = genomic DNA
atgggaaaatttaaatttatatttattctagttttagctctatttttaatatgtggaattgctgcagttgtagatgcgcctgattcctttgatggctctttaaatcttatacctgtttctgattctagtgtaagtcagtctgattcatcagtaaatcagtctgattgtgaaaatgggacttgttcagttgacttaaacaaatctgaggataattcttctaaagaaacttcagatgatgaaattgattatgattcaaagtattatgacgattctttgattgatggattgtatttctgcaatgacctagagcatgcatttaaggatgctaaacaacatcataagaatgtgatgatcatttttgacggagcagcctgcatttactgcgaatatcttaaggatgaaggattgacagattcagatattcaaaaggaaataaatgagaatgatatcctacttatgacttataccagcgatagcccagagctttctcaaaaattggagatttatggaactccaacaactgtaatatttgatgaaaatggaactgagttaggaagaatcgagggctatgagtctccagagcaattcttaagtgaactgaaagagtataatggcaaataa

SEQ ID NO: 184 - DNA, 618 bp, Methanobrevibacter ruminantium
  source 1..618: mol_type = genomic DNA
atggagataatgcctattatttcattttttataggggtaatttcaatattatctccttgcattctgcctaccttgccaataattgcaggatttagcctaaaagccgaatcaaaagcagaaatagtggccttcatattagggctatttagcatattcacaatcattatattcctgacaggattctttacaactattctttttaggtatattgtttatgtaagggtcattgccgcatttcttttgctcattatgggaatattgatgttttttgactataatctatcttttggatcggttaagtctcgtagtggtgagggaatagtcaattcatttattttaggatttcttacatcagtggcttgggcagattgctatagcggatatctcatttctcttataactatgcttgtatcaagcagtcctttatatgcagtttttaatattttcatttatgtttttggctttgcattgaccttgcttgtattgtgcttggccatttcaaaaatagatctagagaagctgatttataagtcaggctatattcctaagatatttgctgttttaattattattggggctttttatatgttttacacttcaattcaagtgtttttataa

SEQ ID NO: 185 - DNA, 693 bp, Methanobrevibacter ruminantium
  source 1..693: mol_type = genomic DNA
atgatttactcaaaagaaattgaaaatatgtgtcctgttcataagggagcagaccacggtcctgcaccaattcctgaagagggaagatgggtaaaatccaaggagatctcagacatttccggactaacccatggtataggatggtgtgcgcctcaacaaggatgctgcaaattgactttaaacgttaaggatggaataatcgaagaggcattggtagaaactcttggatgctctggaatgacccattctgcagctatggctggagagatccttgttggaaagacaatccttgaggctttgaatacagatcttgtatgcgatgcaataaacactgcaatgagggagctcttcctccagattgtatacggaagaacccaatctgcattttccgaaggaggccttccgattggagctggacttgaagacttaggaaaaggtcacaggtcccaggttggaacaatctattcaaccaaagtgaaaggcccaagatatttagagcttacagaaggttatatcactgaaataggtcttgatgaagatgatgaaatcattggatacaaatacattaatatgggggtcatgcttgaccttataaaggatggaacagatccaatggaagcgattgaaaaggcaagcgggcaatacggcagatttgaagatgccgttaagaaaattgacccaaggaaggaataa

SEQ ID NO: 186 - DNA, 999 bp, Methanobrevibacter ruminantium
  source 1..999: mol_type = genomic DNA
atgagtttatttgaaagttatgaaagaagaatagatcaaattgttccagtgcttgaaaaatacggcattaaagaccttgaggaagcaaaagcaatctgcaatgaaaaaggattcaatccatatgacattgtaaaaagcgtacagccaatttgttttgaaaacgcttgttgggcatacactcttggagcagctatcgcaatcaagaaagactgtaaaaaggctagtgatgctgcaactgcaataggagaagctttacaggcattctgcattccaggaagcgttgcagatgacagaaaagtaggtctcggccatggaaaccttgcttcaatgttacttagtgatgaaaccgagtgttttgcattccttgcaggtcacgaaagctttgcagcagcagaaggtgcaattggaattgcaaattcagctaataaggttagaaaggagccacttagagtcatcttaaatggtttaggaaaagatgctgcacttatcatctcaagaatcaatggattcacctatgttcaaacagagtttgactactttacaggagaggttaaggtagttagggaaaaggcctacagcgatggcgaaagagcaaaggtaagatgctacggcgctgatgatgtaagggaaggtgtagctatcatgcaccttgaaggtgtagatgtgtcaattaccggtaactcaacaaaccctacaagattccagcatccggtagcgggaacctataagaaggaatgtgtccttcaaggcaagaaatacttctctgttgcttcaggcggaggaactggaagaaccttgcaccctgacaatatggcagcaggccctgcttcctatggtatgactgacactttaggaagaatgcattctgatgctcaatttgctgggtccagctctgtacctgcccacgtggaaatgatggggcttattggtatggggaataatcctatggtaggtgctacagtggctgtagcagttgccgttgaagaagctttaaaatag

SEQ ID NO: 187 - DNA, 1407 bp, Methanobrevibacter ruminantium
  source 1..1407: mol_type = genomic DNA
atgtatacatttttaatttgtttatttgcattaatattatcttattttgtatatggtaagttcttggaacgtatcatcggagttgatgaaactgccaaaacgccagcatatgaattagaggatggggtcgattatgtccctatgaataaatacagggcattattggttcattttcttaatattgcaggtttaggtcctattttcggagctattcaaggcgcattattcggaccttctgcattcttatggatcgttttaggtactatctttgctggtggagtccacgatttcttcgaaggggcaatgtctgttcgaaatgacggtctatccatgcctggaataataagcaaatatttgggagatagggttcgcaagttctttgccgttttaataattataacatgcattcttgtggcatctgtttttgcatctggctcagcagatttgctttcaagtttaacaaatatagatattcatatttggctcgttgcaatattcatatatttcctcatagccacattattcccagttgataagattataggtaagatttatccaattttcggagctttgttttttataatggctgttttgcttatttctgcattgatattaaatccaaattattcattgccagaatttacaactgcagggctttatttaactgacaaagccattttcccattcctatttgtaaccattgcttgcggtgcaatctccggattccatgcatcccaagcgccaattgttgcaagatgcgttaaaaatgaaaaggatatgcatatggtattctatggtgcaatggttattgaaggaatacttgcattaatttgggcaactattgccatgtcatttttccatggacagcctcaattagccagtatttatggatccagcccttccattgcagttaaagaaatgtcaatagcattgattggtactgtaggattggttttggcaatcattggtgttgtaatatgtccaatcacatcaggggacacttcccttcgtagtgcaagaataacaattgcagatgaattaggtttaaatcaggataaactaaagactagacttaagatatccattcctttattccttgtgtcttttggattgactttcattgatttttccttggtctggagatatttcgcttggtctcaattgattgtagctattgcagttctgcttgctgcaactgtttatctgattgataataagaagcatttcattgttacatttgctccagccattttctgtacggtggttgctatagcttatatattgcaggcttctgaaggtcttagattggatcctttcatatctaatgttatttctgttatagttgcacttgctttaagcgtgtattttattttaaagtatagaaaacagccaaatactacaacatag

SEQ ID NO: 188 - DNA, 246 bp, Methanobrevibacter ruminantium
  source 1..246: mol_type = genomic DNA
atgggaatattttcattttttaaaaaggataaagataaagaaaaagtagagagtcatgaagaggttcattccattcaaataaatgcagaaaactgtcaaggatgtggaagatgtgtttctgtatgtcctaataatgcatatgaacttatagaaggcaagtctagcttaaaagagaattttacttgcagagattgtaaagtatgtttggcagcttgctcaaatgatgctatcacatttgttaattaa

SEQ ID NO: 189 - DNA, 783 bp, Methanobrevibacter ruminantium
  source 1..783: mol_type = genomic DNA
atgaaaatttttattaatgcagacacttacaaggaaattgcccaaataacaaaagaaaaactgattgaaacagcaaatgaattaggaatagaaatatccgaggacattaatgaagcagatatcatatgttccattggaggagacggtacttttctagaatcttcaaaattagctctgcaaaagccaatcattggaataaactgtggaacattaggttatttgactgatgtgaatcccgaagggattaaaaaagccatgaaagatataattgatgggaattattatatcgaagagagaatgatgcttgaagcagagattatcaaggaaagcggagagataataaaaatgcctccggcattaaatgaaatgtccatttctaaaaatatctttggagtggttagatttgatgccatagtagatggaaaacttataaattcatacacagcagatggaattttaatctgcacacctacaggttcaactgcatataatctttcctgcggaggccctattgtagatccgactgcagagattattacaattactccaatagccccacatacaataataaataggagcatagtcttatcagataagtcaattgttgaaataaagattacagagcttagagagcacacttcatcatatgccctatccgatggaaagtcaagtgaaatagagactggagatatcttaaaaatcaagaaatcagatgcaaaaaccaagattataaaactgaattggcaaagctttattgataccgttcgtgacaagataaactag

SEQ ID NO: 190 - DNA, 1371 bp, Methanobrevibacter ruminantium
  source 1..1371: mol_type = genomic DNA
atggatatagaaggttttgtaagaggaagacttaccaaaggcgaagatgaagaagagcttaagtctatccttgcagagagaataagagaatttaaagacatttcagaagaacattccctcttaatggctgaaagcgttatagatgaagtaaagacaactcttgagctaaacaatactgaagatgagttcttaaaggacatcatcacagttccaaaggcaaatgttggcatgggtaagatgggtgtaggttcccgtggtgcaggtgacttctttgtacatagaaagatagcacaaatcgtaaaaagtacaaatacacaatctgttgtcgaccctaatgctcaagatgatggcggtgttgtcaaggtaccagctccaggtgacgatgtctatataaccactgcagtggatggaatacactcaagattaagcgaatatccatttttaggaggtttccatgtaacaagagctaccttaagggatgtttgtgttatgggagcagatcctgtcgctatcctaagcgaccttcaccttgcagatgatggtgacattggaaagctatttgactatactgcaggtatctgtgcagtttcagagcttattgatgttcctcttgtagctggaagcacattgcgtgtaggtggagacatggttcttggagataggcttgtaagttgtgttggaagtgtgggagtctcacagcatcctccaaccgcaagaaaaggagcaaccgtcggagacattattctaatgactgaaggtgccggaggaggcacaatcactacaactgccctttacaatggctactttgatgttgtatgggatacaatgaatatcagctttgtaaaggcttctaaggcattgtttgatgcagacctggttaaggatgtccatgcaatgactgacgtaaccaatggaggccttaggggagacgctcatgaaatctgtgaaaccactggtgtggggcttgagttctatcatgataagataaagaccactgtagcacctaatgtattgaatatgctggaagacttggatattgatcctttaggagtttctacagattctcttatgcttgtagttcctccagagattgctgatgacgttgttaaaactgtgagcgatgttggagtttacattacagagattggtaaggtggatgatgaaggcagtcctcgccttattaaggaagatggaagtgtagatactttggttcctctatttagggaagctgcttacacaaagattaaaaagttagttggagatacaactcctgaagactttgaaatcatgaaggaaaaagttcaaaaggctgcagatgattctataaggaaaaaagaaagagtcattgattatattttgaataataattag

SEQ ID NO: 191 - DNA, 414 bp, Methanobrevibacter ruminantium
  source 1..414: mol_type = genomic DNA
atggcattagaaggtgcagaaagaatagatgaatttataagcgaagcaaaagtgtttttcttagcaactgttgacggagacaaaccaaaaaaccgaccattaggtttccatcttcttaaggatggtaaaatctactttggtgttggaaactttaaggacgtatacaaacaaatggaagcaaatccttatgttgaaattgtagcccttgtagaaactgatttcctaagatactatggaaaagctgtctttgaagaaacatacgacatggctgatgctatagttgctggaaacgaattcctgcaaggaatttataatgatgaaaccggttttaaattagctattttccacttggaagaggccactgcggaaatccgtgacataaccggtaaaatcaatgaatcatataatttctaa

SEQ ID NO: 192 - DNA, 396 bp, Methanobrevibacter ruminantium
  source 1..396: mol_type = genomic DNA
atgagcttatttaaaaattttattggaaattttaaaaaatctgatgtattggatttagctaagggctttaaattagaatatgaagccaataatttggaaaatatgaaatcgattgtagataaatttgttgattttcatcctgattcctattttgcttcttgctctatggtgatttatataattcaattgtataagaaagatcctttaaaggtgtctccaaatatgcttaataatttaagcattatggaacgcaatataaaattttatgataattcaagcactgactctttagataatgaagagttggaactaaggcaatggtttaaaaaggaagtttatgaaaacgttaaatatatggaatctgcaggattaagattttctgctgatgataaatag

SEQ ID NO: 193 - DNA, 159 bp, Methanobrevibacter ruminantium
  source 1..159: mol_type = genomic DNA
atgcaacttaataaaatttgtttagctgctatcgtattatttgttttattcactattttgaaatttgtgatgaaatggagttttaaattatttgctataggaattgtaatttgtattatccttgcaatatttggattcttcaaaggagatgacttatag

SEQ ID NO: 194 - DNA, 639 bp, Methanobrevibacter ruminantium
  source 1..639: mol_type = genomic DNA
atgtcaagcaattcagataaagatatattaaaagaattaagagatataacaaaagacaaggaaagctggaaatcaaatataaatcatgtcgcagttaaattgaatgatgatttttccctttcagtaaaggcaaaggtcttatggcttcttggagaaatgggtttaaaacacccattggagatagaagaatatgtcgatgacattgcagtttatttggaggatgatcatcctaaattgagggaaaggtcagctaatgcaattggaagaataggcagggctgataagaacttagtaatcaattatatggataaattgatgaaactgagtgacgatgaatcagaaagtgtaaggcatgcattcatctgggcttgtgaaaacatagctgtaaatgctccagaattgttttgtgaaaaattggatatattttatgaaatgatttcagatcctggtgaaaaggttcgcatagaagctcctgaaatctttagggtagttggaaaaagaaatccaagttgtgtaaagccttatttggataaattagagcatatagcagaaaatgatgagaaccctgttgttcgcattcatagtgctggtgcagttcgaattacaagaaaagccttaaaagaaagtgataatgcttaa

SEQ ID NO: 195 - DNA, 693 bp, Methanobrevibacter ruminantium
  source 1..693: mol_type = genomic DNA
atgggctttttttcaaatatgagaaaaccagaaggaaaattaggcaatattcaattaaaatcaatgaataaggaacatactccagtttcattatggggtttaaaacatctagacatttctccggaggatacaattttagatattgggtgtggcgggggaatgaacattaatcgtatggctcagactgcaaagaaggtttatggggttgattatagcatagaaagtgtaaatctttcaaaagaagtgaatgctgactttattaggagcggaaaggttgaagtttatgaaggaaatgtttcaaatcttccttttgaagacaatagctttgatattgtaactgcttttgaaacagtttatttttggccagatattgaaaaatcatttggagaggttaaaagagttcttaagccagatggaatgtttttgattggctgtgaatcaaatggggcaaacaatttagcaatgaagttctttgatcgtgtaatagacatggaactctatgaagataatgaattatatggatttttgaaaaataatgattatggtgatataaccatttatttaagggatggaaaaaacaaacaagagattattaaaaaggatgataaaacctttgtaattgatgatgattatgataatttttctatttcagatagatgggttcaatggatgactataactgctataaaatga

SEQ ID NO: 196 - DNA, 462 bp, Methanobrevibacter ruminantium
  source 1..462: mol_type = genomic DNA
atgttaagtttaattaaagacaataaaggctttttatctcttatagatgctattttatctatttttctaatttttatagttctaatctcatttaatatgattgtagatatggagatgcctagcttatccgaagacaacaatcaattcaagacaagtcaagatcttatggagctgatgtcttcaaagatagatggcagggattattccacattggagcgaatctcatatgttttatcctccaatgataattcgatagcctcaagaagggaagttaagaatattctagatgatttctttagcgctcatctgggttctgactataaatatgtttttatagagactaatcaattaaatggctatgtcttgtcatctgatggtgattattcaactgctgatgaggtttctctagctataagaaactatggaaattattcttataagctttatattttcaaggcttaa

SEQ ID NO: 197 - DNA, 1359 bp, Methanobrevibacter ruminantium
  source 1..1359: mol_type = genomic DNA
atgcttaatgcaaacacttatgtaacagaggaagaaggtatcggcggaactataagaaacagatgggaagacttctatgttgaagagattccggaagtaattccagatggagaaggtccaaacatttatatttggattgaaaaattaggaagaaccacccttgacgttttgcttgatattgcaagagacctccatatagacaggaaaagaatgggctttgctggaatgaaagataaaaaggccatcactcgccaatggatctgcatagcgaatatggattcagaggaacagtttgcacaagttgaggcattagcaggcacaattcataatactgaatttttaaaagtaattagaggtcgaaaaaagttaagaatgggtcagcttaaaggaaataagtttagaattcttgttaaggatattgatggcatggaatcagataacgaagaaactcgtaaattagccattgaagatgctgcaaaaagagcagatgccatcttaaaaaccttggagaagactggagttcctaactactttggctggcaaagatttggaaagccaagaacaaatactcatttggttggagaggctcttattcataatgatttaaaagaggctgtcagacgttatattggaaatcctagcgaagaagaaagtgaagattcaagaaaagcccgacaagcctttgatgatggaaattgggaagaatcccttgaattgatgcatcctggaatgcgctatgagaagatgatgttgaaagtgcttttaaaagaaaaaagaagagcaatcaggaagattgcagaggaagaaggaattgaaattgaagaagtagatgaatccaaagtggaattatcagataaggcttataaaaatgctattcatgcacttccaaagccacttcaaagaatgtttgtccatgcttatcagtcattcctattcaatgctgcagtaagtgagcgtgtagcaatgggtatggataaatatatcgaaggagatattgtcattgataaggaagagagaattgtaagagataagactcctgaggagtttcaggaaatggtatcttcctttgaaataaatcagacttgccctttgtatggtacaaaggttccatttgcaggtggagaagttggcaagatggaagaggaaatcttaaacagctatggattgactagagatgactttgaagtacctaaaatgcctcgtttaggaagccatggtcttagaaggtctatgagattccaggtatgggatgcaagtgcaacagcaactgaagatggtgttatgtgtgagttttccattgataagggatcatatgctactgctgttcttagggaagttatgaagaaggatgtttactag

SEQ ID NO: 198 - DNA, 1206 bp, Methanobrevibacter ruminantium
  source 1..1206: mol_type = genomic DNA
atggaagaacgtactggacttttttcaaatggagttatctggttcggagttgcaatctctgtctcagaaatagaggcaggaatacagcttgcttccatgaacacccttgattccatttggctacctttagtccttggccacatcataggaggcatactgctattttctacaggacttataggtgcacgtcttagattgaatgcaatggagaccatcaaatcaacctttggcaattatggctccaaattcttttccacattaaatgtattgcagcttatagcttgggtagctgtgctgaatgcacaaggggcttcagcattgatgggcttgaatttacccatatccttccctttaacctgcattatcctgtctgcaatcattgcagtatgggtttatgtaggacttagaaggtcatctaagattactaccattatgatgatagtgcttacagcattgctggttattctatctgtaaaactcttaggggtccatatatccaatgctttgcctattcaaaacattaattcaacagcattaagcttttggagcatctttgaaatttcaatagctatgccaatctcatggcttcctgtgatttcagattataccaaagatgtggaaaacccagtaaacggcacattggtctctgcaatagcatataccatagcaagcctttggatgtattttttaggcatagaaatagttggcattggaacaacaagcattgcacaatcaatcctccttgcaggtcttggagctcaaggagtgataattttagtgctttcaactgtaacctccaattttgtagctgcaaattcagcaggggaatcagcaaaggccatctttaatagaatcaatccaaagattgcaggagttgtagtgagtgcaataagtgcaatacttgcaatatctggaattatggatcattatattggattcttatatcttattgcatctgtatttgctcctatggctgcagtgctccttgtatctttctatctttcaaaggaagagactggaaatgctagaatatggtattggaacatatttgcatggcttgcaggatttattgtatatcaagcaactgtaaacctggattcaatattcctaggacctactttgcttgcagtgattgtatcagcaatacttgcgtacattccgatattgcttaaaaataagtctaaattgcctaatattagcaaatag

SEQ ID NO: 199 - DNA, 843 bp, Methanobrevibacter ruminantium
  source 1..843: mol_type = genomic DNA
atgaatgaaacaataaaaaccttaacaattcaagacatatcctgttatggacaatgctccatcacagttgcattacccgtaatttctgcttttggaatagaaacagcaatcctcccttctgctgtactctcaacacacacttcaggttttactgattttactgttagagatttaacagaagatcttccagaaatccgtaaacattgggaaaaagaaggaatatttttcgattcaatttacactggattcattgcatcagcagaacagttagattacataaaagacatcatagactcaagattaaaagaaaatggccttgtatttgttgaccctgccatggcagaccatggagaattctataatggatttgaccaagaatttgcagataaaatgggagagctttgtaaattaggtgatttcattctccctaacacaactgaagcatgctttatcctacataagccttggaaagaaagctttacaaaagaagaaatgctagagatggctaaagagcttaaagcattcactaaaagatatgtcatattaaagggatatgaagaagaagacaagatgggaatgatcgttttagataaaatagaagacactattgatatagtttacaatgaaaagataaattatgtatcccatggaactggagatgtatttgcttcatcatttgtaggatcaaccatgttaggtaagtccccttcagcagcagcaaagatagccggagaatttactaaaaaggcaattgaaaagaccattggcgatgagactcatacttatggagttaaattcgaacaggcaattccagagttgtatgatctgttaaaatcaatataa

SEQ ID NO: 200 - DNA, 675 bp, Methanobrevibacter ruminantium
  source 1..675: mol_type = genomic DNA
atggactggtcccctatttttatctcaatgaaaaccgcaagcctatcaatctttataacctttttcttaggtttgattgtagcttggcttctcgttaagataaaaaatgacactacaaaaattgtactggatggcattttcacacttccaattgtattgccacctacagtagtagggtttttcctgctttatatttttggtatcagaggacctataggaagcttctttttagacttctttgctgtaaagatagcattttcatggcctgcaactgttatagctgcagtggttatgtcttttcctttaatgtatcgttctgctagaggtgcatttaaacaagttgattccaatttattggatgccggccgtacattaggtatgtctgagtggaagatcttttggaaaatcttatttgcaaatgctttgcctggaatcataagtggcggaattcttgcttatgcccgtggcttaggagaattcggtgctaccgcaatgcttgccggaaacattgccggacaaactagaacactccctatggcggtttactctgaagtggctgctggaaatatgggaactgcctttgattatgttatattcatagtggccatatcatttatagcgatttttattatggactatttttccatacgcaaggaaaaccaatggaaaaactag

SEQ ID NO: 201 - DNA, 825 bp, Methanobrevibacter ruminantium
  source 1..825: mol_type = genomic DNA
atggattctaagaaaatattaatgattgctgtagttgctttaatagcaattgttgctgtaagttcatgctctgcaggtttccttgactttttaggaggagacaacgctactgacgacagtttaaatggaaaagaagttaatttagctgcagcagcaagtctaaaaaatgtatatgatgatgaattgattccaatgtttgaagcaaaatatcctggagtaaaagtaactccaacttacgcttcaagtggtgacttacaaactcaaattgaaaacggtttagaaacagacgtattcatgtctgcttccaacaaacaaatgaacgctttagctgatgaaggtttaatcgacaatgacaccaaccttcaattcttagaaaataaagttgttttaatcgtacctaaagattcagacttaaacatcacatcattcgatgacttaaaagatgtgaaaggtaccattgctattggtgacccagaatctgtacctgcaggacaatatgctaaagaagcattaaccaacctcggtatttgggacgctgttgaatctaaattctctttaggaactgatgtaactgctgtattgaaccaagtagctcaaggatctgctgaatgtggtattgtatatgctactgacgctaaatccaatgatgatgtaaaagtggtttgtgaagctcctgaaaactctttaaacacttcagttatttatcctgtagctatgattaaagacgctaaagatgcagatgcagcaaaagcattccttgaattcttacaaacccaagaagctaaagacaaatttgttgaatacggatttaccattcacgaataa

SEQ ID NO: 202 - DNA, 390 bp, Methanobrevibacter ruminantium
  source 1..390: mol_type = genomic DNA
atgattgaatgcagaaatatttctaaaggaaaagcagaaggggaattaatagtatcagatgaagcaatcagctttttaggaggcgtagatcctgaaactggtgtggtaattgatcctaatcatgaattgaaaggccaatccattaaagataaaatactttttattccaggtggaaaaggctccacagtaggatcttatgtaatatttcagatgatgaagaataatacagctccaaaagcaattatttgccttaaggcagagcctattatagcaacaggagctataatgtctgatattcctatggttgattctccatcaagtgttgaagaattggttaatggccaaatggtagaagtagatagtgataatggtaaaatagagattttatag

SEQ ID NO: 203 - DNA, 1239 bp, Methanobrevibacter ruminantium
  source 1..1239: mol_type = genomic DNA
atgccttctttatacattaaaaacgtaaatattataaatccattcagtgaagagcctctagatgaaaggcatgtcctaatcaaggacggcagaatcgaatcccttcatgcagaggagtctgcattatatgccaatcatatagtcttggatggtgaggataattacctccttccaggctttatagactcccacgctcatgtcatggcaaacgggtttcataaagaggatacaatgaaaaatccacttgcattgcacttttacaatgctatagagaatatgaaagctacaattgatgctggggtaacaactgtacgtgacactggacttgcagatattggagtaaagatggcacaggaaaggaagatattccctgctccaagattaaacatttccattaagccattggctatcactggaggtcattttgacttttatctcaattcaggctttgatatggaacttgcatatcctggctttccaatcggtacctgcgatggggtggaggatgtcttgaagaaaacccgtgaggttattagggctcgtgctgactttattaaaatcatggcaagcggaggaattctatctcctaatacaagccctgaatttgcacagttcaataaaaaggaattgaagacaatcgtctctgaggctgaaaactataaccttaaggtagctgcccattgccatagcttagaaggaatacaaagatgtgtaaaggctggaatcaagtccattgaacatggtactttcattgatagaaagacatcagagctattggctaaaaagagaatctaccttactccaaccttaatcgttcatcaaacccttattaaggaaggtttccctgtttgggataattttgcagatgataaggttaaaaagcttaaggaagtcgttaagattcaaaaggaaaatatcgaaacagcttaccagtgtggggttaagttcctgatgggctctgactgtggtgtgattgaccatggaagaaaccttggagagttaaagcaattggttgatattggactaagccctcttgaggctattcaagccggaacaatagaaggtgctaaattcttcaatcaagagaatgacttgggatccattgaaacaggtaagattggtgatgttattttagttaaagagaatcctattgaaaatattgggtctttagttgataatgataatattttagctgtaattcaggatggaaaaatacttaaggataaacctatctattaa

SEQ ID NO: 204 - DNA, 249 bp, Methanobrevibacter ruminantium
  source 1..249: mol_type = genomic DNA
atgaatgaagcagattttattcaagaaattatgaaacaagctaacttaagtgaagaccaaggtggccaagtcaacgatattttccaaagcacctttttagctggaaataagaacaaagatactattgttaacttaattgcagaaaaattaggtgttgatgcagcacaagctgaacaaatctatgatatcgccataggtcttcttgctagtggtgttttaagcaaaataaaaggcctttttaaaaaataa

SEQ ID NO: 205 - DNA, 207 bp, Methanobrevibacter ruminantium
  source 1..207: mol_type = genomic DNA
atggcagaaaaagaattaaatgttgtcggtatgcactgtccttcatgtgtaatggctgttgaactttccatgaaagatttaaatggtgtagacgacgctaaagcaagtttagacactaactctgtaacagtagaatatgatccagacaaaattactgatgcagacttagttggcgctgtaaaagaagcaggatttgatgtagaataa

SEQ ID NO: 206 - DNA, 2481 bp, Methanobrevibacter ruminantium
  source 1..2481: mol_type = genomic DNA
atggctcaaaaagaattggatattcctgtagatggcatgcattgttcctcttgttcccttctagttgaaaagtcgctaggtaagcttgatgaagtggaatccatcaatgtggacctaaacaccaataaggcccatatggtgttaaaggataatctctctccagaaacaatcgataagacagttgaatctgtgggatttaccgttccaaaggaggaagtggtcattcagattgctggaatgcattgtgcctcttgcgtgaacaatgttgaaaagttccttcctcgtgtagatggtgtggttgaggcaaatgccaatctttccaatcagaaggttaccatcacatactatagggacatgctcaatctaaaggagattcaaaagacaatcgaaatgcttggattcgaatatatcggccttgacggcgaactggacataatggatgaagaggaaaggtatcaaaaggaccttagaggcaaactatatagaatcatagtaggtctggtctttgccggtatacttatggcaattatgcatttccatattacaattcctccattgactatgggacaactctctttaatcatagctattttcccattctgttatgtaagcatgcctatcttaaaggctggatggaactccttcaagcataagaacctagatatggatgtaatgtattcaatgggtattcttgtggcatttgtatcaagcgtattaggtacattcaatataattctcgactcaagttttatgttctatgaatctgcagtgatgttgccttcattcctcactataggacgttatcttgaggcaagagcaaaaaggaaaacctcatcatcaatcaaggagcttattggccttcagccaaaaacagcaacattaattacaagtgatgaagagggcaatagcatagaaaaggaaatagatattgaggatatcaatattggagacatattgcttgtaaagcctggtgaaaagatacctgcagactctattgtagttgacggtgaaagctatgttgatgaggctatgattacaggagaaccggttcctaagcttaaaaaggagggaatcgatgttttctcaggtacaataaaccaagatggtgcattaaagatagaggctcagaagattgggtctgaaactgtcttatcacagatcattcaacttgttgaaaaggcacaagggtcaaagcctcctgttcaaaggcttgcaaataagattgtcagctggtttatacctgttatccttacaattgctatagtcgtattctgtctatggtactttgtagcaggtgcaggcttgttgttctcactaacatgccttatctctgttcttgtagttgcatgtccatgttcccttggccttgctacccctacagcagttaccgttggggtcggtagggcagcagaatatggtatactaatcaagaatggagaaaccttggaaagctctaaggatgttgatgtatgtgtattcgataagactggaaccattacagaaggcaagcctgaggtagcagacattgaaacatttgatatggctggtgacaagttccttcaagtcctatcaagcgttgagaataattcaaatcaccctattgcaaaatccattttaaacagatttaagagtgataatcttaaattaacagaggaaggcaaggatgatttggctttacttgaagtaagtgactttgaaaacataactggtaaaggtttaaaggctaatgtggtagtggatgaaaataattcttcagttctcgccggaaaccttaaacttatggaatcagaaggtgtggaagtcacagatgaagtattagataagttcaatacctttgtgtccgaagcaaaaacaaccattgtaatggcaatagatggcgagataaagggaataatcaccttaatggataagataaaggataactccaagtcagctattgatgagctccataagatgggcatagaaacctatatgcttacaggagacaatgaaaagacagcttccactgtagcaaatgaagtaggcatagataatgttatagcaaatgttcttccaaacgacaagttggataaggttcaagagcttcaaaaggaaggaaaaagagtcttgtttgttggtgatggaatcaatgatgctccagctttatcccaagcagacgtaggtgtggctatgggaaacggtaccgacattgctatggaaagcggtgatattgttattatggaaggagacttagaaaacgttgtagcttccatacagttctccaaaaaggtaatgacaagaatcaaggaaaaccttttctgggcttttgcatataatatgctcttggttccagcagctgcaggtttgctattcctattatttggaatagtatttaagccagaatgggctggacttgcaatggcattaagttcagtgactgtaatcagcttatcattgttattaaaacgttatgtgcctccaataaaaaggaataaggtttaa

SEQ ID NO: 207 - DNA, 1479 bp, Methanobrevibacter ruminantium
  source 1..1479: mol_type = genomic DNA
atgagaataaaatacctatcaaagcaagatattaaaattatcttacattatcttggatacatcatgatcggcataggggcaatactgctatttcctctgccaatcgacttattctatagagaattcaattatgtttatggagtaattccgcctttaatttcaatcatattaggagttattttttctcaaggattcagagaatatgacaaacttaaattcaagcatgggatgatcatatcaagcatatcatggctatgggcaggtcttgttggagcaataatcatgatgctgattttagatgtctcattcgtagacgctttttttgaaaatatctctgcatggaccggaagcggattgaccatgttcagcgatgttgaatccttgcctatgtcaatactatttttaagaagtgtggaacaatggatcggtggacttggagtggtaatcatcttcataagcctactcattaagcctggaacttctgcattcaagctatacaagtctgaagcaagggaagatagaataaagccaaatataaaaaatacccttaaaaaaacaatgcagatatatgccatttataccgttataggggtcatcttatatcttatagcaggacttcccctctttgattccataaatctgacattcactacaatatccgccggaggaatgtcaataaagaatgcaaatatcggattctaccaaaatgatattgtttatataatcactatctttctaatgatattaggggctacaagctttacagtccattataaaatggctaaaacaaaaggaaaagccatattaaaggatatacaattccaactattgattgtaagcatcatacttagtgcaatagcaattgcaatcattacaaaacttgctcctatggatgtggttttccatgtcgtttctgcaattacaacaacaggagcaaacattgcccctccaagtgagatggcagcatgggctccccctgcactgataatcataatagtcttgatgctgatgggtggttcttcaggttccactgtaggtgctataaagcttgttagagtaattacactcttaaaaagcacacatcttgctgtgacaaatatagtttctcctggaaggtttgtaaagatcaagatatctggaaaatcaataaatgaaggagaaatgaaagaggcatcttcatatatggcagtttatatattctttttagccatatcttggataataatgacttattatacaaatgatccattcaatactttatttgatgtggtgtccactttaggtaatgtgggattaagcacaggaataatcagcggagagcttggcactattccaaaggtagtgttgatatttttaatgtggctaggaagactggagataattcctatacttttaactatccaaataggatttgagacatttaaccaaagtttaagatttgttaaaaggagaatgatgaggaaaattaagcctaattaa

SEQ ID NO: 208 - DNA, 1656 bp, Methanobrevibacter ruminantium
  source 1..1656: mol_type = genomic DNA
gtgttttaccccaaaatagaagaagtaaaggaaatagcaaaggatgattcgtataaaagaatcccaataagctatgaaatattttcagacactaagacttcaatagaagtcttaagaagacttagaatcttaagcaaccattgctacatgcttgaaagtgtagaagattctaaaaattggggtagatacagttttcttggattcaatcctatccttgagttgacttgtcaggatggagaactggtcattaaaggaaaatcaagcttcagtgattgtggaattgaagatgaaaaagataaatgctttagcataaaaactgataatcctggagaatatattagagaaataatagaagaaaacaaatctccaaagcttgaaaacatccctccattttcaggtgggcttgtaggctatttctcatatgattatatcaagtacagcgaaccctcactgatattggatgcacagaatcaggacgcctttaaggatgttgacttgatgctctttgataaggtaattgcatttgacaactacaagcagaagatagttgtaatcgttaatatgaaagtaaacgatgaagatatgctaaaaaatgaatcaatcgaggaaaactatcaaaaagcctgcaatgacattaaggacatagtgaatattataaaggcagataatatagtggatctcttgaatgacgactttaaagaccagctaacaaacaagaagacaatcaagtcattagaggaaatgaaaggactaaaaaccttagaggaattggacagatgcagaaaggaaattaccaaacaccttccgattgaactcaagtctgatttcagatatctcttttcaaaagaagaatactgtgacatggtggagcgggcaaagcattacataagagagggagacattttccaagtggttctttcaaacagaatagaagcagacattgaaggaagcttgtttgatgtatatagggttcttagaacaacaaatccttccccttatatgttctatttctccagtgatgatatagaaatagcaggtgctagtcctgaaactcttgtaaagcttgtaaacaatcaggtttacaccttccctcttgctggaacccgtccaaggggaaaaacagatgaagaagacagacaactggaagaggaactgttggcagatgaaaaggaaagagcagagcataatatgcttgtcgaccttggaagaaatgacataggcaaaataagccaaataggctctgtcaaggtaaacagatatatggatatagtaaggttctcccatgtgatgcacataggatcaactgtagagggaattttaagggaaaattatgactatctatccacaatagattcaatcctacctgctggaaccttatctggagcccctaagataagggcatgtgagataatcaatgagcttgaagacaataaaagaggaatctatggtggagcaattggctatattgacttaacaggcaatctggacacttgcattgcaataaggatagcttttgcaagagacaataaggtatttatcagatcaggtgcaggaatagttgcagatagcgtccccgaaagcgagtttgtagaatctatcaataaggcacaggcagttatggatgctttaagattagcagatggagggatagaatga

SEQ ID NO: 209 - DNA, 627 bp, Methanobrevibacter ruminantium
  source 1..627: mol_type = genomic DNA
atgattctattagtagacaattatgacagtttcgtttataatttatatcaattcattggagaggctttagcaaatataaagggatacgatttagccagcaaaggagatttgtataaaatctatgaagagattaaggtaattcgaaatgatgaaatgactgtagaggaactaagagagttaaatccagattatattatcctatctccaggtccaggcaaacctaaggatgcaggaatctgtaaggatattgtaaaagagtatattaattcagatgttccaattttaggtgtatgccttggccatcaagccatttgtgaagcccttggcaccaatatcatacatgccaaggaattgatgcatggaaaaacctctattattgaattggatgaggataagatattcaaggacatttcagacccaattcaaatagcacgatatcattccttggctgtagagaatgatagtttgtctaatgatttgattgtattggcaagaacagatgataatgagataatggcggtaaggcataaaaatgctaatatttatggtctgcaattccatccagagtctgtattgactcctgagggattaaagataatagagaattttttaaatattaaaaattag

SEQ ID NO: 210 - DNA, 1008 bp, Methanobrevibacter ruminantium
  source 1..1008: mol_type = genomic DNA
atgattaaagaagctattttaaaagtatacaaagatgaagatttgacttatgatgaagcttatgcaactatggatgaaatcatgagtggtgaggcaagcgaggttcaaatgagcgcttatctgactgccatgtctatgaaaggagaaacaattgaagaaatcacagcatctgctgaagccatgagggctcattgtgtaagattattaaatgatgaagaggttttagagattgtaggaaccggtggagacggttcaaatacattcaacatatcaacaacctcctctattgtcatttccgcagcaggagttcctgtagccaagcatggaaacagatcggcttcaagcaaatgcggtgcagcggatgtattggaagagttaggagtcaatattcatataagtcctgaaaaaagcttagcatgcctaaaagaaatcaatctatgtttcctgtttgctcaaaactatcatctttcaatgaaatatgttgcaggggtaagaaaagagctttcaatcagaacaatattcaatattttagggccattgacaagccctgcaggggcttcaatggaagtcttgggagtttatgaaagggagcttatagagcctcttaccgatgtgttgaaaaatcttggagtaaagtctgcaatggttgtctatggattggatggaatggatgaaatctctgcaagcgataagactgcagtatgcgaacttaaggatggaaagacaagaacatatgaaatttccccagaggatttctctatggatattgcatctaaagaagaccttgttggtggagatgcaaatgaaaatgcagaaatcacattggctgttctaaatggtgaaaagggaccaagaagaaatgcagttttattaaattcagctgcaggtctttatgttgcaggtaaggtagattccatagaagatggagttaagctagcagaagagataatagattctggaaaagccttaaatcagcttgaaaagttcattgaagttacaaacagataa

SEQ ID NO: 211 - DNA, 777 bp, Methanobrevibacter ruminantium
  source 1..777: mol_type = genomic DNA
atgttaaagaagatagttgctaaaactgaagagagattaattgaagctaaaaagattaaatccttagataagctaaaagaggaagtatcaaagttagaaataaataatgaattcccttttaaagaagccttaaaagaccctgaaattgctatcattgctgaagttaagaaagcatctccttcaaaaggattaattgccgaagactttgattatatcaagatagcaaaggaatatgagcaagctggagcttctgcaatatcagtcctaacagagccatatttcttccaaggatccaacgatttcctaaaggaaatttctcaaaatgtatcaattcctcttttaagaaaggattttaccattgatgagtatatgatatatgaagcaaagatattaggtgcttctgccatccttttgattgtttcaatacttgataatgttcaattaaagaattacttggatttggcacatgatttaggtctctccgcaattgttgaaacccacgatgcagatgaaataagaactgcagtagatgccggtgcagggataattggagtaaacaatagaaatttagctgattttacagtagatattgaaaatagcatcagattaagaagtcttgtaagcgataagatcctattcatttccgaaagcggtatcaaaacagctgaagatgtaggcagactaaagaaaaacaatgtggatgcagttttaatcggtgaaactttaatgagaagtgatgataagaaatctatgattttggagttgaagaatggttag

SEQ ID NO: 212 - DNA, 654 bp, Methanobrevibacter ruminantium
  source 1..654: mol_type = genomic DNA
atgcttaaacttaagatttgtggactaagaagaaaagaggatatagatattgtaaataaatacaatattgattatataggtttcgtatttgcaggcagtcctcgtaaggtatcatatgagcaagctaaagaattatctgctcttttaagagaagatattattcctgtaggtgtatttgtaaatgaacatatgaaacttattgtagacttatacaaggaaggaataatcaagattgctcagcttcatggagatgaggatgaggattatataaagaacctaaaagctaaatcattagagcaaactggccatgaaataccagttattaatgcaattgaaatcaataatgctaataattatgataatttcaatgataagttattggagtggcgagattcagtatctgactattttatcttagacagtggcaaaggctctggaaagacatttgactggagtcttcttgataaaaatagcgaattttttaaaaattccatctttttagctggtggtttaaacagtgaaaacttagactctgctataaaagagttcaacccatatgcagttgacttaagcagttcagtagaaacagatggctttaaggatgaagagaaaatcaaagagatagttgaaattgtagaaagatatagaaattaa

SEQ ID NO: 213 - DNA, 1185 bp, Methanobrevibacter ruminantium
  source 1..1185: mol_type = genomic DNA
atgagtagaggtcgatttggagttcatggtggacaatacatgtctgaaaccttaatgaatgaacttcttaacttagaaaaacaatataatcattttaaagaagaccctgaatttatagaagagttaaacactcttttaaaggaatatgcaggaaggccttctttattatactatgcaaaaagaatgacagaggatcttggaggagcaaagatctatctaaagcgtgaagacttaaaccatactggtgcacataagataaacaatgttcttggacagtgtctgcttgctaaaaagatgggcaaaaccagagtgattgcagaaaccggtgcaggtcagcatggtgttgcaacagctactgctgcagccttattggacatggaatgtgaagtctttatgggtgaagaggacacaaagcgtcaagcattgaatgtattccgtatggaacttctaggagctaaggttcatacagtaacaacaggctctaaagtccttaaggatgcagtaaacgatgcttttagagaatggatttcaagagtggatgacacccattatgtaataggttccactatgggtccacatccatttccaactatagttcgggactttcaggcagtgataagtcaggaaatgaaagaacagattctagagctagaaggcaagcttccaaatatggttattgcctgtgtcggtggaggaagcaatgcgatgggttcattttacaatttcctggatgatgaggaagtggagctggttggagttgaagctgcaggaaagggaatagacactgaataccatgcggctacaattgcaaaaggagagcttggaatattccatggaatgaaatcctatttctgccaaggcaattatggtcagattgctcctgtatattcaatatcagcaggtcttgactatcctggaattggtcctgaacatgcctatttgcatgatataggaagagcaaaatatgtctcagctaccgacgatgaggcagtggaagcctttgaatacctatcaagaacggaaggaatcattccagcaatagaatcctcccatgcaatagcccatgcaatgagggttgcaggagatatggataaggatgatataatcatcattaatgtttcaggtcgtggagataaggatgtggcagctattgcccgatataagggagttgaattatacgaataa

SEQ ID NO: 214 - DNA, 783 bp, Methanobrevibacter ruminantium
  source 1..783: mol_type = genomic DNA
atggagaaagatataaagattagcgatgcatttaaagatggaaaagctttcatcggatttttaaccgctggagatcctacaattgaaaagacagttgaatatgtgctggcaatggaagaggcaggttgcgaccttgtagagattggaattcctttctcagaccctgtagctgaagggccagtcattcaggaagcaaatataagggcactatcaaacaatacaaacactgatgatgtctttgaggcaataagacaaataagagaaaagtcagatgttcctttagtatttctaacttacatcaatccagtgttctattatggatatgacaagttcttcaaaagatgccaggaacttaatgtctgtggaataatatctccagaccttccatatgatgaaaaggatgagatattggaggtaacaaagaaatatggtgttgatataattagcctgattgcacctacttcaaaggaacgcatacaaatgattgcaagtgaagcaagtggatttatctatgttgtttcatcattaggagtcactggtatgagaagtgagattaggacggatttaaaatcaataattagtgatataaaggaagttactgatgttccaacagctgttggttttggtatcaacactccagaacaagctaaaaatatctcaaaagttgcagatggtgttattgtagggagtgcaattgttaatattattgcagagcatggggaaaatgcaagagagcctcttgcaaattatgttaaatcaatgaaagatgctatttccaagtag

SEQ ID NO: 215 - DNA, 1389 bp, Methanobrevibacter ruminantium
  source 1..1389: mol_type = genomic DNA
atgcaaggtaaaacactagacacaagaacacgcaacttaatactcattctatttttaataggcgtattcatgggctcattggacacaggaataattggacctgtccttccctcaatcgaacagagcttccatctgacaagccgagaatcaagctggatatttacattatttgtaatcacattcatgattggttctccagtaatggccaaattttcagacttctatggaagaaaaaagatattcatccttgacgttcttctttttggaataggatcttgcctaatagcagcatccataagcatagaattaatatttttaggcagactcatacaaggattcggctgtggaggaatattcccagtagcgggggcatttgtaggagacggattcccattggaagagagaggaaaggcattgggaattcttggaagcgtatttggaatatcagcaataggagggcctcttgtaggagcagcattaatcccctatggctggaactggtgttttacaataaacattccaattgcaatatttctaattatctttgcatggtacatactgccagactcagataacgatagaaaactaaagatagactatttaggaatactaatattaagcttgctagccatattcttatcctacgggcttaatcaaatagactcaagcaattttatagcgagcctactctctctaaatgtacttccattcttagtaatattcataattctaatcccaatattcctaaaggtagagaaaaaagccgaagagtcaatcgtgccaatccatatgctaaagaataaggaaatatcaattgcatgcatagaaaccttatgctatggaataatctactcttcagcaattttcataccatcactggtaatcctttcaatgggattggacgaccagcttgcaagccttatgctgattccaatacttggagcaaatgcagttgcagcaccgattcttggaaaaatcctggataaaacaggctcaaagaagcttatggcaatgggaacaatgattcttgcaatagggcttattgcaattgcaatctatccaagcaatctaatattcttcataatagccggatgccttattggagtgggacttgtaacaataataggagcgccgttaagatatatagtcctcaccgaagcaaagccatatgaaagaggagcaggccaagccatagtaaatatgctatcaagtgcaggacagctgataggaggagccctgattggaggaataatcgcatcatttacaggaattttaggctatcaggtcagtcttatcatagctgcaatagttgcactgattgcatttgcattcaccttaagattaaaaggccgtgatgagcagatagctactatgaaggccaatcaataa

SEQ ID NO: 216 - DNA, 1365 bp, Methanobrevibacter ruminantium
  source 1..1365: mol_type = genomic DNA
atggcaaatgaaaatgtagagctaatgagaggagcaccggagatagcagttaagaaactggcaattccaatcatgatttccatgctcctaaccgcatcatataacataatcgatggaatattcgtagcaggcttaggccaggcagcaattgccggaataggctttgtaaccccaatattcatgatactaaacggtgtaagcgtaggtcttggaagcggtgcaacaagcagcataagtcgttttgtaggggctaaaaaccacgaaggagcaaacaagtcagccacccatgccctattgatattccttatagcctcaataatcctaacaatcatattcctcttcatccaagaacctctccttagaacatatggagcaagcggacaatctctagctgaaggactaaaatacggaagccccctatttctaggactcttcacattcatgtttgcaaatggaggaagcggaattctccgtggagaaggggacatgaaaagggcaatgtatgcagtaattgtatctgtaatattaaacacatgccttgaccctatcttcatctacacattaggtatgggctcagcaggagcttcccttgcaactatagtcagctctgcaggttcagccatagtcataatgtattggatacttataaagaaagacacttgggtccatgtggagctaaagaacttcaagttcgattcaaatatagcaaaggacattctaaaagtaggaattcctgcttcaatggacatgttcatgatgtcactagctgtcagtctttatctaatattcatctcaacaataggaggagaattcggcatagctgcattcacatcaggtcaaaggctatacctatttgcaataatgcctctaacatcaataggaagcgcagtggcagcagtagcaggaagcgcctatggagcaagaaacggagattacctatcaagaacacatatttacggcgctaagtttggaatagcctttggaacagcagttacaataatccttatagcctttgctccacagcttgcaacaatatttgcatacactccagaaactgcaccattagtccctgaaataacccaattcttaagaatagcaagcttatgcctcccactgacaggagctggaatgtgttcaagcttcctataccaaggaataggaaagggaacaatcagcctcatgtggacaataataagagaggtaatatttacagtaagcgcaacatacatccttggaatagttctaggatggggattggttggaatctggactggacttgctataggaagaataactgcaagtatattaaacttcacatttgccagatttacaatcaagaagattagagagaactttggcacataa

SEQ ID NO: 217 - DNA, 414 bp, Methanobrevibacter ruminantium
  source 1..414: mol_type = genomic DNA
atgccttttattgcattaatacaccacatatcccaaaataaactaagatatgcaagaaaaaaccctaaccatatagacatggttcatgagggtcgctatctaatggagatacacaaaagaaagaatttatcccaagatgatcttgcaaacatattcggtcaaagcaaaggaacaatagcaaaagcacttagaaagttggaagataagggatatgtagagagaatcattaaccaaaacaatagaagaaaatacattcttaaaacaacacaagaaggagaaaaactagctattttattagaagaagatttatcaagctgggaagaagctgttggaatagacaaactagatgatgaaacaaaaaatcaattaagaaagatagctagaaaaacagaagaaatactaaaagaagaataa

SEQ ID NO: 218 - DNA, 684 bp, Methanobrevibacter ruminantium
  source 1..684: mol_type = genomic DNA
atgattggaaacgattgggacaatgcattggaagatgaattcaataaagactacttcataaagataaaggaatttgtagaagccgaatacaaaacaaaaactatctatccacctaaagaagaagtcttcaatgcatttaagttatgcccattagacaatgtaaaagtggtaattttaggccaagacccataccatgaaaagggacaggcccatggccttgcattctccacccctgaaggccatccaatcccaagatctcttaaaaacatctttaaggaaattaaagaagagtacaactatccaattccagattcaggatgccttgaatcatgggcaaagcaaggagttttccttctaaacacagtccttacagtggaggaaggaaatgccaactcccatagcaaatgcggatggcagacatttacagacaatgtaataaaaatattaaaccaacaagattcccctatcgtttttctattatggggaaaacaggcagaattaaaaaaagaactcattacaaatcctaatcatttagtactaatttcttcccacccatcaccattctcagcaagaagaggattttttggatgcaatcatttcaagttagctaatgaatttctaaaggacaagggcttagaagagattgattggcaaataaaaaatgtgcagaccactttgatataa

SEQ ID NO: 219 - DNA, 732 bp, Methanobrevibacter ruminantium
  source 1..732: mol_type = genomic DNA
atgaaatatctaattattaacggttccccaaggaagaaaaacacatgggccatggtaaagcaagctaaaacaaacctagaaggtgaatttgaagagattcaattaatgaaaacaaaaataccaatgtgcaatggctgctttaaatgcataatggaaggggaagataaatgccctcactttgaaacagtacatccaatcgtagaaaagataaaagaagctgacggactcataataacaagcccagtttatgctatgaatgtcacaggacttataaagaacttctttgaccatactgcatatatctaccacagaccagaattctttgataagaaagctctaatcatagtatcaactgcaggggcaggtcataagaatgtagccaaatatatggatgaaacccttagacattggggatttaataagaaccataagataacttatgcctgcggcggaaaagacacaataaacacagaagagataaataagacagcgcagaagttccaaaaggacgttagctccaaaaaactccactcccctaaatttatggatattgtattttacaatgtttggagagcaatggcagtaagtaaagatccaataaaagcagataaggaatattgggaagcaaccggacttgtaaattatgattttgcaccaaatgtaaaattaggattctttaaaggaatatttgctaaaatagtctttgccatgatgaaaaaagtaattaaataa

SEQ ID NO: 220 - DNA, 1344 bp, Methanobrevibacter ruminantium
  source 1..1344: mol_type = genomic DNA
atggctaaaaagaatacaaaagaaaagatatttgactcttcaattgatttattctcccaatatggatatacaaacacatccatacgacaaatcgccaaagaagtaggaataaaggaaagctcaatctataaccactaccaaagcaaggaagcaatattggaatcaatattaaactattatatcagcgaaatgctaaaggaagaagctcctattatgcaatccaacgacaatctggatttaggatttgaatatttctataagcagggcagcgacagattcctatcaaaactctctgaagagagaatgatgaaaatcacaagaatatttctggtaggatcgtatcacaatgaaaagatgaaggcttttgtaaaggaaggaatcattgactatgcaataaaaggttgggaagagctgttcaatctaatgaaagaaaaagaaatcataagaaaagatgcaaacagcaaacagcttgcagaatctttctattcatatggaatattcctattatatgaacatttcatattcaactatcctgaagatgatgaaaagttcctaaaggacttcgaaagaagaacaaccgatcatatgaagataatatttaactcagttaaaataaacaatgaagaatctaaaatagacaataataaaaacaatccatcctccaatcacgataaagaaaacaaagaattagaaacagaaatcatgagattggaagaggaaaaggactacaaaaaagttgaaaatcttgtaagagatgcattttggaacatatatcgtccaggagcttatgaacactttatcgtctacaatctaagagaagacccaagcttcataaaggacctggcatacattatagaggaagatgatgaaataataggacatataaactattctaagggaaatctgaacctttataagaaaaacaatcaaggaatggagaagataaacgattggaatgaggaagcagttgttcttggcccaatagcaatcaatccaaaataccaaaaccagggatatggattcagattgataaagcataccttaagacttgcaaaaaacaagaacattccatatgtctttgtaataggggatgagaactattataacagatttggatttgaaagcgcatctaaatacaatctatttctggagggaacagatacaagcgaggaaaatccattcttcatgataagaatatttaaagacctttttaaagacaaggactacgacagaggaatcttctacaatccaaaagtctttaacgtcagccaagatgacgtagataaatttgatgaaaactttgagtataagcaaaagagggttcaagaaggacagttggaatga

SEQ ID NO: 221 - DNA, 1029 bp, Methanobrevibacter ruminantium
  source 1..1029: mol_type = genomic DNA
atgtttgatgcaaagtttcaatataccaataaaatcatcaataatttgatggaaatttccaccatcaaggaatttattttgaattcccaaattttgccttcctatgacattttactaagaaataaagcaataatcacatcttcttataattcaacatccattgaaggaaatccattggattttaaacaagtaacaaaattatttaatttaaaacaggaaaataaattagatgagcttaaattaaataaatctgaaatagaagttttaaattactttaaaacacttgaaaatttagataactatgaaaaaattgatgaagaaactattttagatattcataaaaatatcactgaaggaacccttaaagatcctaatatggcaggaaaattcagagattctccagtagtaattgggaatataaaaacaggccaacttaattatgtgcctccaagccctattaaagttccttatttaatcagggaattattggattgggcagacgttcaagaggatttaaatccaatcattcttgcaggaatcttccactatgaattcgttagaattcatccttttgtagatggcaatggaagaaatgcaagagcattagctactttaatacttcttttaaaagattttgacataaaaagatatttttcccttgatgaatattataatcaggataggcaatcctactacaatgcattgcaatctgcagataagtctcaagatttaactgaatggctagaatatttttccacaggatttttagtttcattatccaatgttaaaaaggatattgaaagcatatcccgttttgatataaaaatgaatggcaaaattaaattaaacgaaaaagagattaaaatattggagtttattgaaaaaaacaattccataaaaaataaggaagttcaggatctgcttaacttatctgcccaaaggtcccatttttatattaatgaattagttaaaaaaggattgattaagtcaaaaggcaaaggcagaagcactgtttatatatttaaatag

SEQ ID NO: 222 - DNA, 3303 bp, Methanobrevibacter ruminantium
  source 1..3303: mol_type = genomic DNA
atgaagttaaaatcaaagtattttgtatttttactcataatatgtatcctattcagtatttcaacagtttcagcgaatgataatgatatgagtataaatcaaaatctgcaaaatgatgcaaatcaagatataaatcaagatttgcaattaaatgaagcatatcaatcagatacaaatctaaaccaaaatttgcaggcaaataatcaagaaaatgatttgctaaaagcatctgaagataagacctataatgatctctataatgacataaaaaactgcgaagatacgttcaatatagaaaacgactataaatacactgaaagcgataaccacacctttataagcataaataaaaccaatctagtgataaacggaaataaccatgtcattgatggatccaataaagctggaggatttgaatttttaaaggaatcactaaatataatcatcaatgacttaactttcattaactgcaacgattacaccatagttaatgaagacggaggaaatatcagtttaaataatgtcaatttcactaacaatcacaataaattgggcattttgtattcagagggaatgatatcagttttcaatggagcattaactataaataactgtaatttcgattcaaacaataatactaacctcatatacacaaattttgcagagctaagaattacaaattcaaatttctccaacggaaaagggattggaagccctatttatgccaataggttcgaattgtatatagataactgcagctttgaaaatttcactgccccctatggaggagcaataaatttcaaaggaaacacctttgtcattaaaaattcaaaattcaagaacttgaatgccgaaataactgcaggagcaatttttgcaaagtatttcccaaaaacaaataaagatggcccctatattccgggtgaagacatgctttttgagaattgtgaattttccaatgtctcatcaactcataacggaggtgcaatctacttgaatctggattcaagttctgagggctttgcaaaaactatccatattaacaattgcaacataacagatgcctcatccgactttggaggagcaattgcaagccaaggagaaatcctagacttctccaatctaaatatcataaattgccatgccaagataggaggtgcaatctacagttcctgggcagatttaagtcttaaagattgcaatatcataaacaatagcgccgataaggacgcaggagcaatctactttgattatagcaaattaataattgataattccaattttacagataataaggtgaataatatctcttcaggcaaagaaagcatcatatacgccaatgacgtagatgcagagataagaaattccatatttgataacggaggagttgcagtctatgcaaacttcgcaagcaattccaaatttgaaaataacacttctacagatttattcctatggaataataccaattatattgtttctgttgaaaataagggaataaaacttaatctgacaaacaatacaatcaatgtagataaattgccttcaaaatttgacggccgtgattggggttgggctagccctcttaaattccaaggagacaatgtggcctgctgggcatttgcaactgccggagcattggaatgcgctcttttaaagcagactggagtcttatataatatttctgaaaacaatattcaaaatctccaattaaaatatttctccgaaggggatagaagaaacagtgccataggttatgcttacagtggtttaggccattcattaagctggtatggagccatcacatcagaagatgacccatatgatgaaagaggaatgtactctgacgttgcagaaaccgataagagaatccatgttcaggatgcaatgataatcttcggcggaagaaacgatacaaggaatctgatgaaggaagcaataatgaaatatggtgcagtatccatccaatatatgtatgctccttatgattacactgccaattacactgaagtggacctgcagccaggacatttcgttaccttaatcggatgggatgacaattgccctcctgaaaaagtaaataccaaaatggccatagacgagaccaatattcctccaggacctggagcttggctaatgaaagattcagaagattctaaattaggagaagatggctatgtttacctatcctattatgacctttcaatattatccaaggatttctacccagtcattcctcaagctgcaggtgtagcctatatctttgaaaacactaacgactatcatgtcaactatcaaacagacatcacaggccttgcaggatttgatgaaaactacagctattactccaatgagttcgtatcaaagtacgacgagtggattggagctgttggaacctatttcaacgaatcaggaatcgactattcctttgacatatatgtaaatggagaaaaggcacactcccaaaacggaacaagtgagtttgcaggattcagaacaatcgttttggacaaatatgttccaatcaaggcaaatgacacatttaaagtaatattcaaaagcaatgcacttcctttccaagcatattcaaggcaacactatatccctaatatgtctatgataagtgcagatggcagcaattggatcgattatgccgataagaatagaacagtctgtcttaaggtatatacaatagaaagcgataaggaaaacatatccagcagagcatctacaataatagactgcaagaacatgacaacaactgccgtagcaagtgcagacggaagagttggagaatactttgttgtcaccttaaaagaccaaaatggaacagccctaacaaacaagccaataaaaataggtttcaatggaagagtctatgacagagtcacagatgaaaacggaagcgcaaagctgcagataaacctcgcatataagggaacctacacattcgccataggattccttggagatgaggactatctcggagcatttgaagtggcaaaaatcactgtaaatcttcatagccctaagctaagtgcccctaataagtcttataaggcaagcgcaaagacaaaagaattgactgccacctttaagacatctaatggaaacccaataagcggcaagaagataagcttcacagttaacggtaagacttatacagcaagcacaaattcaaaagggcttgctaaagtcaatgtttcattatccaaaaaaggaacttatagctttactgcaaagtatgccggagatgaaacatataaggcaacaagcgtaaaatccaaacttacacttaaataa

SEQ ID NO: 223 - DNA, 1092 bp, Methanobrevibacter ruminantium
  source 1..1092: mol_type = genomic DNA
atgaatatttcaagtttattttcagatgaaaaagttaatacaggaagacaagtcgaactggatatcgctaaggcatttgcaatcatatttatgatttttttacatactgtcatgatagttgaagcatataatgtcggcttaagcccaacttatacttatataatcggcaatgtcttaggaaggccttatgctgcagtcgtcttcatgttctgcatgggagtcggtgtggtatattcaaggcacagccaatggaacttgatgattaaaagaggaattatcctatatctcttaggccttttggtaaatgtctttgagttcttcttacctcattatcttgccggataccttggcgttaatgctgaggctttccctctatttggaggactaataatcttttgtgttgacatcttggcatttgcaggtttggcatttatccttatgggaatcctaaggaaattcgaagtttcaaataaagctatgattataattgcagttataatgtctctaatcggcagtttcacaataggaattgactttggaatccctgcagtatgctcattcttcggtcacttcattggagctaaaaacggacataccgcatttcctttattcaattggtttatcttcccagttgcgggatacgtctggggacagtatttcatcagagccaaggacaaaagggaattctttaaatactggccgatcctattgattgtggcttttgcttacttcttcatatcctcacgctattggggaggagtcttttcagaggatgttcacttatattactttttaaacacattggatgcagtattctgcataataaatgcccacgcattcatcggattatgctattggatttcagattatctgccagattcaattaccaagttcttttcaacactaagccgcaatattaatgaaatttatattgcacaatggttctatatacctgtaacaataatcttaatcacttatttctccaaaggattagtatttgatgatttggtaactacaatagtttcaatatgtatgctgattatatctacagtcactgcactagcttataggaagttaaggactaaaggataa

SEQ ID NO: 224 - DNA, 1995 bp, Methanobrevibacter ruminantium
  source 1..1995: mol_type = genomic DNA
atgtatttaattagcttttttggattaggagttaaattaaccaatttcaatgatgttgcactattcatcatatttgtaagtctaatcaatgcaatcttatggcctatactcaccagaatcctaatgccatttctcgttttatcatttggaatagggacacttattctaaatggcctattattaaacttctgcggaccccttttcggcataaatgtggaaggccctgcaataattttagctccactagcaatgtcctttgttacaacagccctatctacaatattaaccattgaagatgaaggatcctattacaggtcagtctatagggatgctgaaaagaaaagaaaaggggaagtgaaagattatccgggactcataatcgttgagattgacggtcttgcatatgacgtcttaaaggaagcggttgataagggatatatgcctaccctcaaatcaatgattgataatacacataccctaagaatgtgggagacagacctatcctcacaaacaggggcaagccaggcagggatactgcatggaaataatgaagacatcaccgcattcagatggattgaaaagaaaaacaacaatcagatgatgcaatgctctggagtgactcaagtaacaacattggaagagagaatttcagatggaaatgggcttcttgtagataatggagccagcagatccaatctcttctccggtgatacagacaatgtaatatttacattcagcaaaatcctaaacatccgaaaactatacaacaaggcatggttttcagtattctcaaatcctagcaactttgcccgtatagtatgcctgtttatttacgacatgaccttggaaatcatatcccaaataaagcacagcgtaaagaacatcaggcctagaatcaaacgtggcatagcctatattccaacaagagctgcaaccaatgttttcatgagggaaatcaacacctcaacattgattggagacatgatggtcggcgacattgacgttgcatattcaacctatttaggatatgatgagatagctcaccattctggcgttcgcgatgaggactcttggtatgcccttaaaggaatgaacaagcagatagagcgtttaataaatacaaataagtacactcctagaaaatatgagtttgtcattcagtcagaccacggccaaacaaacggtgcaacattcaagcagagatacggccaatcctttgaggattatgtaaagtccctgcttccaaaagagatgaagatgtttgcaaaaatgtcatcaaatgaagaccattatgccgaatcattccttcctttttcaagaaagaacgatgatctgatagatgaaaaggatctagaagagttaggagactctgaagttattgtccttgcctcaggaaatcttgcaatgatctatctaacccaatgggactatagattaagcatagaagagataaataaattcttcccagaactgattcctggaatcgttgaaaatgaatatgtaggatttattgtcatcagatcagatgaaggagaccttgcaatgggtaaaaagggcatttacaatttagacactggagatattataggaggaaatcctcttgaaggatttggcaaaaacattgcaagacaccttaaaagaaacagctcattcaaatacacaccggatatattggtaaacagcttctatgactgtgaaaatgatgaggtctgtgcatttgaagagttggttggaagccatggaggagttggaggaagccaatcaaaaccattcatcttatatccgtcaggatggaatgtcagtgatgaagagattgttggtgctgaaagtatttataaaatcttaaaagagaatttaaagaaactaaaagagtacagtaatgataatactgccctagaaaaagagtacagtaatgatgaaactgccctagaaaaagagtgcagtaatgatgaaactgctctagaaaaagagtacagtactgctctagaagaataa

SEQ ID NO: 225 - DNA, 714 bp, Methanobrevibacter ruminantium
  source 1..714: mol_type = genomic DNA
atggatataagtgaaataattggagatgcaattgcatatcctatacataatattaaagctttagtaatttatatgattattggaatcattactggaatcttaggtggcgcaagtttcatgggcttacttatgagcctaacaggcaaaaacgctcttgctgctggaggatttggtatccttggagtattagttctcctcattggagcattattaattacaggatatggtttggatattgtaaaatttggtattgaaagaagagatgacggtcctggaattgacttagtaagacaagttttaaatgcagttaaattacttattgtcagcattgtttactacattgtccctgcaattattgcttgggtattgtttactctcttaggtaggggtatattaactgtacttattgttatgataatttctattatcttcgcatttgctgaatttatggcaatatgcagattagctaaatatgatagtttaggagaagctttagcaatcggtgaagctattggtgacatatcaaaagtaggtgtaataaaacttctcgcaactattattatagtagttgtcattgcaatgatcgtatgctttatcttattatacgtttataaattaaatagcctcattggaggaattttattgggtatatttgctgtatacctaacattcttcgccaatagggcagctggtttattatactctgatgcataa

SEQ ID NO: 226 - DNA, 750 bp, Methanobrevibacter ruminantium
  source 1..750: mol_type = genomic DNA
atgattatagatacacactgccatatctacaatagcgaaatggaaaatgcaaaggaaataatcaaagaagctcaaaaaaacgacatctgcctcatattaaacggcactgatcccaaaagcaataaggagattttagaactttcaagcaaatatgataatgtctatggagctttaggatatttctatactcttgcagatgaaataagtgatgaagagattgatctattggacagtcaactcaataatgacaaaataatagctgttggagaaataggacttgactattaccatacaaaagaaaataaggacagtcagaaggaactctttgaaaagatgttagatcttgctgaaaagcataaactaccagtcatagtccattctagaaaggcatcacaagacacctatgacatactaaagaatcacaatgcagttggatcccttcattcttaccaaggttcagcagaaatggcaagggaatttgttaaattaggcttttatataggaataggagggacaatcacctacaaaaacagcaagaaaataagaaaagcagtaaatcaagtaggaattagccatatacttatagaaacagattcaccatatcttccaccagaagataaaaggggagagaataatacaccactgaacttaaaatacattatagaagaattagcagaagaattagatattaaagaagagaaaatcattgaaataacaacagagaatgcaaagaaactgtttaaagtatag

SEQ ID NO: 227 - DNA, 717 bp, Methanobrevibacter ruminantium
  source 1..717: mol_type = genomic DNA
atggatgaaaagttttcaagaacagaaatgttagttggaaatgaaggaatggaaaaattaagaaatgcaaaggttgttatttttggtcttggtggtgtaggttcctttgtttgcgaaggacttgcaagaagcggtgtaggtaactttgtcttggtggattatgacaaggtggatgaaacaaatataaacagacaagtaattgccacaacaaagacaatcggccaatgtaaggttgatatcatgaaggagaggattctagatatcaatccagatgcaaatgttgagatttataaggaattctatttggaagattgtgaaatagacattattactagtgatttatcctatgccgttgactgcgttgacacaatcatggcaaagattgcaattatctgcaagtctaaagagcttggcgttccagttatatcatcaatgggaactggaaacaagttggatcctactatgtttgaggttgctgacatttatgagacttcagtatgtcctcttgccagaattatgaaaaaagaccttagaaaaagaaatataaaagattgtaaggtggtttattctcaggagcttccaaaaaacactaatgattgtgatataaataaaaataagggtaaggtaaaggtaaaaggaagcatctcttttgtcccatctgttgcaggtttaataattgctggtgaagtaataaaagatattgtcaatgctaaataa

SEQ ID NO: 228 - DNA, 471 bp, Methanobrevibacter ruminantium
  source 1..471: mol_type = genomic DNA
atgtttagaaaaatgagaagagcaaaacaagaattatccaaagaggaatgtatcgatatcctaattaacgaacctcgtggagtcttagcagttttaggagatgatgaatatccttatgcagttccattaagtcatgtctatgtagatggaaagatatacttccatggaacaataaaagacagccacaaaagagatgcaatcaaaaaacacgataaagtatccttttgtgtaatggataaaggaacaaagtcagatagttggtggtacacattcaaaagtgttattgtctttggaagaatgaaaacaatcaatgacaagcaaacaaaaatagaaaagctcacctatttaggaaataagttcttcccaagcgaagaggaaacaaaagatgaaattgataggcttttggatgtaacagaactgtatgaaatcagcatagagcatatgagtgggaaagtagttaaggaaaaataa

SEQ ID NO: 229 - DNA, 1350 bp, Methanobrevibacter ruminantium
  source 1..1350: mol_type = genomic DNA
atggcaatacatccaattgaatttagatacggaactccagaaatgaaaagaatctgggagcaggaaaacaaacagcaaagaatgttagatattgaatctgcattggctcaagctgaaggtgagcttggaataattccaaaggaatatgcagatgaaatcaaagcaaaagcaagcattgaatatgtaaccttagagcgcgtaagtgaaattgaagctgaaaccaaacacgatatcgcttccctatcaaaaggattaagcgaagtatgtgaaggtgaggctggagaatacgttcactttggagcaacctctaacgatattgtagacagctctaactcattgcttttaaaagactccattgaagttttagaagaaaaaatcgaaagattaaccaagataattcttaaattagcagatgaaaacaaaacaaaggtatgcataggccgtacacacggacagcatgcacttccaaccacctacggcatgaaatttgcaatctgggccgatgaattgcacaggcaatatgacaggttgcagcatgcaaaggacaatgtatgtcttggaatgatggatggtgctgtgggaaccactgcagctcttggaacccaaggatgggaagttcataagaaggtatctgaaattcttggccttaagccagccccaattacaaaccaagtccttcaaagggataatcatgtagagttcatagctacccttgcaaacattgcaacaacccttagcaaaatagctcttgaagttagaaacctacaaagaactgaaattcaagagttaggagaatatttcgaccctgaaaagcaagttggaagtagtacaatgccacataagatgaacccaattacagcagaaagaatctgtggtgttgctagaatagtaaaatcatatgtaaatgcagctatggaaaacaaccctctctggcacgaaagagaccttacaaactcttcctgtgaaagaatcatgttccctgaagcttgcattcttacagattacatcttaaaccttacaatcaagcttatgaacaatcttatcttctatgatgaaaacattgaaagaaaccttaatttcacaaatgggctcatcatggctgaaagattaatggcagagcttacaagagctggaatgggtaagcaaacagcttatggggtcgctagaaagaatgcgataaaagcaaataaggaaaagcttctccttgcagaccttatccttgaagaccctgatgcaagtcaattcctaagcaaagaggacgttgaaagaatcatggaccctcacacttatattggttctgcaccaatcatagtagatgagattctagaagcttctaaagactggttctag

SEQ ID NO: 230 - DNA, 807 bp, Methanobrevibacter ruminantium
  source 1..807: mol_type = genomic DNA
atggatttcagcgtaaaggattttaatgtacggctccggacaatacgtatttgggaagtagtcatagctcttgttgtagcattctttttaaccggatttacatgcgattattttggaatctactctggagaggcagagtatatcatattcttcttgtatatgatggtcttctttgcaatagcctccatcgggacacatgggtttaaagatgacatatacggtgtattcaaggcctccaatctgtttaaggtcattatgatagtcataccaaatatgctcttggctttctttatacagcagcatcttgctggttttgatgctatgtttaataatatcaatttattagctcttccagtttcagatttggcttatgaggcttcaaatcctctcttgttcctttttgaattcttttcagcaatcttcattgcgcctatttcagaggagctcttctttagaggaatcttattcaataggcttaagataagaaaaggagttatatttggagtggtggtatcttcaatcatctttggattatgccatttcaattatccagaccatttggctcatataatttacacttgcctatttggaatgtgcttatgcattctctatttgagaacagacaatctattgataaacatgtttgcacacttcctctataatctattgtcttatgtgatagtatacactccaataggggatctcttcttaggaggtccgtttatggatttcactgtcatagtcttgttgttttcaatagtatttgttccggcgtatatattttatttctctataaagctgaaatga

SEQ ID NO: 231 - DNA, 804 bp, Methanobrevibacter ruminantium
  source 1..804: mol_type = genomic DNA
atggattttaatgtaacagacttcaatgttagattaagaacaattaagcttagggaattattagtaggtattgtcattgcttttattttatccatagccctcttaatcatatttccagttatggatagttatgatgatttggctttgatggtttttgtattcttcttattcattttcttcctttatgctttaaaaggtacctctggtctaaaacaggatttcaataaactatttgaaagggacaacagtcgtgaaattctttatgtgctcattatcaatatgttgtttgcttttttagtcttggctatattttccactttcgatgcataccttactttagctgattcggagtgggtttctatccttgattttactcctactgctattgatcctgcagtttttctatttgaatctttcacttccattataatcgctccaattcttgaagaattggtctttaggggagttttattcaataggttaaagattagaacaggcattcttccggctatgttaatctcttcattcctatttgcaataggtcatgaattcggcggaatgacaagtgcatttgtatttggaatgtgtatgtgtgttctttatcttaaaacagataatatattaatgggcatgtctgttcatttcctgaacaatcttatatttacagtatgggacttatttgcattggatgcaattgttttccaaatgcctgtattgccattgactttactcatttccattatttctggattattaataattctttatttatataaggagattggtaaattactggctgaatag

SEQ ID NO: 232 - DNA, 243 bp, Methanobrevibacter ruminantium
  source 1..243: mol_type = genomic DNA
atgaaaacaataatacgatatctaaggcaggaggttaagatgagtcagcaggatttagcaaaatctgctggagtaactcgtcaaacgattaatgctttagaaaatggacgatataatccctctttacttttagcatataatataacaaggattctaaataaagccacttatggtgacgatgtagattcctatctaagtattgaggacgtatttaaatttgatgatgatgaaatttcagtttaa

SEQ ID NO: 233 - DNA, 630 bp, Methanobrevibacter ruminantium
  source 1..630: mol_type = genomic DNA
atgttcttgatttacggctattcctacagggttacaaaggtctctgtagaagggatgattaacggtaacgatccattgccagaatttgatgatgtgattggcatgtttgttgacggcataaaggtttgcctggtctatctgggatatgcgctggttccaataataatattcatggtctttgctttagtctccagcgctattggaggatatggcgaatctgtattgatggcatttggctctattattactcttctagccataatcggcgcttatgtgatgagcatgtttggagttgcaaacatggctaattacgacggcgcattggcaaaggcatttgacattaaggagattattgaaatcatacagtccgtcggcgttgtaagaagcgtaggggcatatattggattggctattatttgcactgcaatctttatgattgttggactattgctcttctttgtattcggattctttggaataatcactggaaccttagggtcctatactgcagcaggaggcatattcattgcaggaattatcttaggttacttcttaatgctattcattgtaagtccttatattttgattatgcaatcaagagttgctggattattatataaccttcattaa

SEQ ID NO: 234 - DNA, 849 bp, Methanobrevibacter ruminantium
  source 1..849: mol_type = genomic DNA
atggctagcattacagacattataaaggaaggacttaaatatccattcaatgacactagaaaggtattgattcttgggctaatattcctcatctctgggctcatttcccttttcacacagtatgtggtttatgattccatgacccttatggtcaatgcctccccatatacctcagttaatggaatgtttgcatcaattcctccatctaattcagctttaattttcctgtcatggattgtaacattcattttgttccttttcacttcaggatacatatatgatgttattaaatatgcaatagatggaagatacgaacttccagactttggcaatatatttgcaatccttaagaacggattacgcacattaattgttggaattgtttattccattgtgccagctcttatattcatccttggattgatgctgatggttaatgaggcttcaggtgaagctgtaaacatgtttggacttatattgctttttgtttcatttattgttgcaatattcatttatcttattgaagtcattgcaatctcacatatggttgaaaatgacagtcttaagtctgcattccaatttagtgagatctttgatataatttcaaatatgggctggggaagatttatcggagccttgatatttgctttcattgtaattgcaataatttcaatgttctttggaatgatattcggagcaatatctactggaattggcatattgttcgattctgcattggtttcaactcttgttagttctatattgactggtttgttattaagtccatatatcagtattgctttaggcagaatgtttggatctgtttataaggaggctattagtgagtaa

SEQ ID NO: 235 - DNA, 798 bp, Methanobrevibacter ruminantium
  source 1..798: mol_type = genomic DNA
atgaagtttaattcaagagttttagggattttatctctattatttgttcttacaattcttgtttcaagtgtgggggcagcagaatataaattaacagaaaaagattttaataatacctttaaaataggtattccagaaggtacagacttccagcaagatgcatattcaaatattgctgctggtaatgttaactttgcaatgaaagtttttgacaatattggaaataatactgatggtgttgtttctgtattgtactttaaggactcttcttctgattcaaatcttatttccgatgtgattgatgatttaaatagcagtggggaagttgttgaagaaaatgacaattacatcatagttaagaataattatgatgctgaatggaatgctccagatgccagcacatcttcagatgagttctggagctttatcggtgatttatgctcctctggctctgatatgaactttggagatggtgattcaaatatccatctttccgatgatggagttaacatagaagattctagtgcaaatgtatcattttccaaaaatggaatctatgtttctgattccgatggtcagaatgtttccataagttctgaaggagtaaaagtctctggcgggtcttccaatgagacagtggacgtaaatgctgatgtggattcagtcatgaattcatattctgaatttgcagactattctctttgcttaaagaatcctaaaaaagatcaattgattattatttgtggtaatgatttagatctattaaagcaaatggcagactctgcttctttcaaatag

SEQ ID NO: 236 - DNA, 384 bp, Methanobrevibacter ruminantium
  source 1..384: mol_type = genomic DNA
atgtccaataactatcttccaaaaaagctagaaattaaatattctcatcaaatcgatggaacaaagtcaattaagctattgaatggcactcttttagtgaataatccaaatccagaattaatagatataaatcaaatagatgaagaaaagtggattgaattttgggatgccgttgaaaagataggcctttgggacttggaggaagtctatgaaagctgcacattagatggaggattcacctggaagatagaaatagaatatggcaatcgagaaattaatagctatggagccaatatggagcctaaaataattatgggagataaggtttattctgttttagaagagttatataaatccattgaagaattaatctctttagattga

SEQ ID NO: 237 - DNA, 777 bp, Methanobrevibacter ruminantium
  source 1..777: mol_type = genomic DNA
atgatatttgactttcatttgggaagtctattttttaaatttatcctttatcttgtaatgcttctattttttatttataaatttaattctatctctaaaaagaattctagttcaaattttaattataattcaagttcgaatagggattctaattcagtaaataactcttctctttcagatgcttttagaaacgatttaaacagcatattcaaggtttctaagatttatcacattctatttattgttttagcaaacatactatttgtatctgcaatatactttgtattaagttatttgggatccatatccattattcagtttaatgcccctttattcggtgatttcactggtttaggctttgatgtaacgctcctttaccttataactgtagttatcctatctccaataatcgaagagtttctctttagaggaatcttcttacgaagattcaatcttgagcttgacaatttgacacttgctatcttgatttcctcagtcttatttggaatttgtcataactttggaggaatattgggagctattctctttggaatctgcgtttccattctttatgtcaagtccaggaatgtattagtccctattttggctcatttcattaacaatctcatttcctttttgctggcccttattggaatagagaatttcattcatggaaatagcattgtcattgctttaataatcattttggccattataagtaattttgtgctctttagagctattgtattagagtggcctaaatcttttaaagaatag

SEQ ID NO: 238 - DNA, 606 bp, Methanobrevibacter ruminantium
  source 1..606: mol_type = genomic DNA
atgttaaaatttactggaaaagaaataagagatttaataatatcattcattgtaattgctttggcattctctattctttattcaaatcgtgattttaatggaattctattcatatttccaatagttgcaataggagtaggtgccggattcatctttcatgaattagggcataagtttgcagctatgcactatggatattgggcagaatatcaattatggccaactggacttgtcattgcattggtaagttcctttttcggattcatctttgcagctccaggagcagttgtcatatacagtcaaggaatggaaaagtctgagaatggtttggtttcacttgcaggtcctgcagtcaatatagtccttggattgatctttttaggtattttaaattcattaggtcaggtcactgattataatggctatatcatagctttgatttgcttgcttggaactagaattaatttcttcttggcaacatttaacttattgcctatcccaccattggatggatctaaagttttatcttggaatgctcttgtttggatagttgcatttgccatatctgttatattgcttgttgtctatggcggttaccttggatag

SEQ ID NO: 239 - DNA, 162 bp, Methanobrevibacter ruminantium
  source 1..162: mol_type = genomic DNA
atggcaaagaaagatgataaatacagtatgcctatgagtggggcaggtttagtaagatactttgatgacgaaagtgtaggtccaaagatagctccagaatacgttattgctttaacagttattctcggtatcttttgtttcattttaagatactccatataa

SEQ ID NO: 240 - DNA, 3564 bp, Methanobrevibacter ruminantium
  source 1..3564: mol_type = genomic DNA
atggattctggaatggattattttgaaagattggaaagtgaaacacaacgtctctacgagatagcaaatgaagcaagatctaagggttttgatgtagagcttgaaacagagattccagtggcaaaggatttagcagagcgtgtggaagggcttgtaggtcctaaaggcatagctcgacgtattaaagagctagaggctactggcatatctcgtgaagaggttgcatttgaaattgcagctgagattgcatctcaagagtctagcgaaactggagcaaagcttgaagctgagaaacaggcttttgcagatcaaggccttcgtacagcacttgctatcatcactgaaggggtggttgcagcgcctttggaaggtatttcaggtgtaaagattaaaagtaattcagatggcacaaaatatgtggcagtatactttgcaggacctattcgtagtgcaggaggtactgcagcagcattatccgttctccttggtgataaaatacgtgtagctactggacttgacagattcaagcctaccgatgatgagattgaaagatatgtggaagaggtagagctttacgaatctgaagtaacaaaccttcaatactctccgactccagaggaagtaaggtttgcagcaagaagcattcctgttgaagtcagcggagagcctaccgaccagattgaagtttcccacagggaccttcctcgtgtagagaccaataacattaggggaggagcccttcttgcgatggttgaaggggttattcaaaagtccaagaaaattctaaaaatctctaaaaaactcaatttggatagctgggaatttttagcagagtatgctaaaggtatcggctcatctcaagaggaagaaaagtcagaagaggaaactgaagaaatcgttgaggaaatcgacgataatattattgataaggatgaattgtttgcccattcaaaatacgcccacgatatcattggaggaaggcctgttttaggatacccttctgaaaagggcggtttcagactaagatatggaagatctagaaacactggccttgctacaatgggggttcatccggcaactatggaactattggaatttttagctgtcggaactcaacttaagatagaaaggcctggaaagggtaactgtgtagttccagttgattccattgaagggcctacagtaaaattaaagtctggtgaggttcgcagattagattccatagctgatgcaagggaagtcaagggaaaagtggttgaaatactctttttaggagacatgcttgttgcattcggcgaattcttaagaaacaaccagcctatgttaggctcttgctggtgtgaggaatggtggattgagtgcataagaaacagcgacaaatacaaatcattctccaatgacagcgagctttatgactatcttatagagagaggaatcgatttaagcattgaacatttcatctcacatgaagactcttcaaagtatatggactttgatagggaaagcttcaatcttaatttccttgagaaaaagcgttatactgccgaagaggcctttagaatctcatatgactttagtgttccacttcaccctgaatacacatattattataatgacatatcccgtgaggacttggcttatctgaatgaatggctagacactaaaagggattatctgtcaactgactacttgaatggagaggatttaattcttgatttggctcctcaaaagagaatccttgagatattgggattggttcataagctgattgataaaaaggtagtcattgatagggatcatgcttatgccctaatgaaaaccgttggaaacggctctgcattagaagataatgatggggacttatcatctgaagttaaaacaatagattattccaaataccttgatgatgaccattataagtcaaaggttgttgacatactcaacgaaaacatcgactttgagattatggataaggctccatgctatataggcacaagggtaggacgtcctgaaaagtctaaggaaaggatgatgcgccctgctcctcatgtccttttcccaattggaaacaatggaggaagcagacgtctagtggctgaagctgccaaaaagagaaaaatcaatgttgaaattgcaagaagacaatgcacaaaccctgattgtggattaagctcattcatggcaatttgccctcactgcggcgctccaactgaaatcaccaaagcaagtcaaaaggacattaacctgtccaccatgctatcaaaggcttcaaataacattggagttcgtaaggttgatgaggttaaaggtgtaattggtcttatttcagaggataagctccctgaacctttagaaaaaggtattcttcgtgcgaaaaatggtgtcttcacatttaaggaaggaaccattcgtcatgactctacagacttgcctcttacccacttcattccaagggaaattggcgttactgttccaaaattaatcgaaatgggatatactcatgactgctatggacaggaaatagtgagcgatgaccagataattgaactgaaggttcaggatattgtagtttcagacaattgtggcgattaccttgtaggtgtagctaatttcgttgacgatctattggaaaagtattatggaatggaccggttctataatgttgaggacaaatatgaccttatcggccatctcattgcaggtcttgcacctcacacatcagcaggggtgttgggccgtattgtaggattcactaaggcattgggctgttatgcacacccttatttccattctgcaaaaaggagaaactgtgacagtgacgaagattctgtcctattgcttcttgatgctctaatcaacttctccaaatcatatcttcctagtacccgtggtggaagtatggatgctcctttggttttatccacacgtatagacccagaggaaatcgacgacgaatcacataacctggacatatttgaacgtttcccattgggattctaccagaaaagccaagagcctttaaagcctgcagatatgctggaatttgttgataatgttgaaatgcatcttggaactgacagacagtatcatgatttgatgttctcacaccatacctcaaacattcatgcagggcctaaggtttgcctttacaagcgtttaggctctatgaaagaaaaggtggaggctcaaattcatttggcagagctcatccgtgcagtagaccaaagaggagttgtagaaggtgttctttcatcccacttcctgccggatatcatgggaaattcaagggctttctccaagcagaaggtcagatgccctaaatgtggcgccaagtatagaagaatgcctcttacaggcaagtgcaaatgtggaggggaccttattctaagcgtttccaagggttctgttgtgaaatatctggaaatttcccagaatcttgtaaacaggtatcctgtttcacattatcttgagcaaagattggagattcaagagtttggtatcaattcactctttgaaagtgataaatccaagcaaagctctcttgatgtgttcttcggcaaataa

SEQ ID NO: 241 - DNA, 2343 bp, Methanobrevibacter ruminantium
  source 1..2343: mol_type = genomic DNA
atgggtttaaaaattaatgaaggtgttaaagtggaaaatgtgtataatgtagaaaatgatattaggaaagctaaaatcactgttaagaaaaacaacggtgtctgtgaagctttcagttatgaaaaattgttaaagtctttagttatggttgaagccccatattttgagtctgaaaagattgtttcaactgttgtagaaaacttatacgacggtatcactactaaagaaatcaagaagatcgtttacgaatgcttagaagaggttgactctgaggcagctaacaaatatctcgctaagactaccttgaaggtacgttcctcaagagataagattgaaccattcgacatggctaagattgcaagcacccttgtagaggaaaccggtgcttcccaagagactgcttttgaaatcgcatctgaagtatggaaagaacttaaaaagctcaatgtagaatacctcactgctcctatgattagggaaatcgtaaacacaaagcttgtagagtatgggcttgaagacttaagaagcagatacacccgtttaggaattcctgtttataacattacatcattgattgaaaatggtaacagagacaatgcaaacatgatgcataaccctgaatccattcacaaatatgttgctgatgaagcattgaagcaatatgctctcttgcatctattgccatcacacttggcagatgcacacatgtccggtgacattcacattcacgatttggaattcttcgctggaagaccattaaactgtctccaacatgatataagggcattcatcaaatacggccttaaagtggacggtacaggtgaccacacttctgtagctgcacctccttcccatatggaaaccttgatgaaccatactggcgaaatcatgcttgcagctcaacagaacatgtctggtggacaagctatgtccctttggaacgtatttgtcgctccatttgcaagaggaagaacctacgaagaggtaaagcaatccattcaaatgcttgtctacaacttgaacatggcttatgcagcaagaggatcacaagttccatttaccagcatgcaattggaattcggcgttccaaacttcttaaaggacgtaactgcatacggtcctaaaggacaagtcgtaggtacttacgctgactttgaagatgaaaccagaatgattcaaagggcattcactgaaatcttgcttgaaggagattcagaaggcaagcctcacctattcccaaatactatctacacattacgtgaagagaccttgaatggtgactatgatgatgacatgctccttgttcacgagctttcagcaaaatacggatcttcctactttgtaaacatgttgcctgactacagaggtcaaatggctaactatatgggttgcagaacctgtctccaggacacttggaccggtgactgggaacaagactgtttaagaactggtaacctcgcttatgtaaccttgaacatgcctagaatcggttaccaatccaatgatgaagatgatgtattcgaatacttagacaattatatggacttagctgtagaaaccttgatgattagaagaaagcaaggtcttaactgcttgaataactttgacatcctaccgttccttgaccaagaggttgacggagaaacctattacagaatccaaaactcaaccttatcctttggtttctgcggattgaacgaaatgttacttgcattgttcgatgaaggcatagaaaaccctgatgctaacaagttcggtatcaaatgtttagaatacatcaatgcaagagcaaaagcattgcaagaggaaaccggactcagatggtctgtactccagacccctgctgaatctaccgcttacagatttgcaaccttagataaggaacagttcggagataaggcaatcttgcaaggtgacaatggagctaactactacactaactcctcacatgtccctgtaaactctgacattgcatttgctgacaagatcaaaatcgaaggccaataccataagctaactcctggaggacacatcttccatgcattcatgggtgaatcctactctgatcctgaagcattgatgagccttaccaataagattgcaagaaaatcagacattggtttctgggcttacagttcagcattcagtttctgcttaaactgtaaaacattgatgaaaggattaagcaacaaatgtccttcctgtggtgaatctgcagatgtagaatggtatgacagaattactggttacgtacaacaagtaggtcatgctaaatctgctaacggcggatggaatgcaggtaaacgtcaagaattaattgacagacgtagatttgaacaataa

SEQ ID NO: 242 - DNA, 1587 bp, Methanobrevibacter ruminantium
  source 1..1587: mol_type = genomic DNA
atgaaacattggattgaaagaatcgctgatgaattaaatgaaatggatgtagaaaaacatgtcattgcaagtggtacatctatctcaggttctatacatataggaaactcttgcgatgtatttatagcaaatgcaataggaaaggctttaagagaattaggcaatgatgctgaaaccatttggatagcagacgatcatgaccctcttagaaaggttccttatccacttccagaatcctatgaccaataccttggtatgccttattccatgataccatgtcctgaaggatgctgcaagaactttgtagaacactttgaaaaaccattattcaatgttcttgatgattacggcatagagattattcctaaatctggttttgagatgtataaagatgggtcttatcttgaatcaatcagaatctcccttgaaaagcataatgaaatcaaggctatctttgaccaatacagaagagagcctttggcagaccactggttgccttataaccctatctgtgacgaatgtggaagggtaaacaccactgaagcatatgactatgacggagacattattaagtataggtgtgaatgtggccacgaaggtgagatggatataaaatcaggcaatggtaagcttacctggagagttgaatgggcagcaagatggaagatctttggaaccacttgcgaaccatttggaaaggaccatgcagcagctggaggatcctacgatgtaagtagcgttatatcagaggaaatctttgattatcctgctccttatccagttccatatgaatggatcacccttgacggtgaagcgatgagtaagtctcatggtgtattcttcactccagagcaatggctagagattggaccagctgaaagtcttaactactatctattcagaagcaaaccaatgaaatctaaagacttttcacctaaaatgccttggttagactttatggacacttttgatagggtggaaaaggtattctacggcgaagaggaagctccatcagaaaaagaaggcagaaaattcaagagcatttataagatggctcaaatcaatccagattctccattacctttcagacctccatttaggttcttggtaaatgcttatcagattgtcggtgaaaaggaccttgagaagatttttgctattgttaaaaagaattctcaactcactaaaagctttgcagataaggagtttgaagacttaagcgaacttgaagtgtctcaatttagtgaaagggtagataatgtaatcgcttggttagagaaatatgctcctaaatttgtcaagttccaagttcaatatgattccattccaaacttgcctcttccagatgatcagattgcattcctaaaggatcttgcagacttaatggaagagaaggagttctcatctgctgaagaattgcatgatagcatgtatgagattttggaaagccatggattaaaacctcaaaaggcattccaagctatttataaaatgattcttggtcaaaagcaaggtcctagagcagcttcattcttgctgtctttagataaggactttgttgttaagaggttaagacaggaagcttaa

SEQ ID NO: 243 - DNA, 861 bp, Methanobrevibacter ruminantium
  source 1..861: mol_type = genomic DNA
atggtgatttttatttcagaagaagaaattgaaactttaaaaaagcaattagctgataaagacacaaaactcaaaaaccaagcaagcgaattaaatcatttaaccaatgaggtaattcctgagttaaaaaaagacaacaaaaagttaaaagcgcttaaggaagagcttacagatgcattggaaacaagtaccaaaaaatacttcgatcaattggaaatcaatgcagacttaagtgaaagcgttgcaaaaaaaggagctggtcttcaattagctaaagtaagattaaacgaaatcgaaaaattagttgttgaacttgagactgcaagacttgaagaggaagagaaaaaagcagctattccaactgaagagactgacgaagatgaagtaaccaagatttatcaagaaaaagaggaagcaattgaacaattgcattctgaaattgataaattggaaaatgaaatcaaagaaaaagacgcagaaattgacagaaaagaaagcttaatcaaaagcaaagattctaaaatcaaagagaaaaatgatgaaatcaaagacttaaatgacaatgtcattccttctcttaaggcagaagtagctagcaaaaatgcagaagtcaaagccactcaagaagaagctcaaaaagaaattgatggtgtcggaggcaaaattgctaaattagaagctgaaattaaaaatcttaatgaaagcttagacaaaaagaaaagggattatgatagattatacaccgaattaaacgctaaggataaaactatcaactctcttaaaaacaaaaaccaacaattaactgagcaactcgaagaagaatctagcaaaggtttctttagcaagcttactggtagataa

SEQ ID NO: 244 - DNA, 240 bp, Methanobrevibacter ruminantium
  source 1..240: mol_type = genomic DNA
atgagttttggtatggttttttttagttgtttggggatttgtttgttttgtaatgagttttggtatggtttttttttagttgtttggggatttgtttgttttgtaatgagttttggtatggttttttttagttgtttggggatttgtttgttttgtaatgagttttggtatggtttttttttagttgtttggggatttgtttgttttgtaatgagttttggtatggttttagttaattaa

SEQ ID NO: 245 - DNA, 2364 bp, Methanobrevibacter ruminantium
  source 1..2364: mol_type = genomic DNA
ttgtcaaatattgaaactgatgattcatttattagtgaaaattcaatatcaagcgatattaatgataattcattaattaatgaattcacagcatcaaatcaaatcaacgacaatatagcaattaatgatggcttaagcaaaggcgacaaaagccaattatctgaatccaaatcaatatacgtatccacaaacggcagtgacgattcaggagacggaagtgaaaaaagcccataccaaagcataaaacatgcagtatccaaggcagatgatgattcaatcatatacctatccagcggaacttacaatggagagaataaccaaaacataagcataggaaaaagcttaagcatctatggagaagattccactataatcgacggtgaagacaaggcacagctattcatcatgaattccagcgcaaaattaagcttaaacggacttattttaacaaatgcatataaggacggcaacctaagcgactatggaggagccatcataaatgaaggcggacaattgaccataatcaactctacaatcaaaaactcttatggaaactactatggaggagccatctacaacaatttaggaagattgaccatcataaactcaagcattttaaacaatagcgcaatacaatatggaggagccatctatacacttggagtgacaaacatccagaactcagttttcgagaaaaacaccctaacagctgaaaaaggtgtgggagcaagcatagcagcaggaggaacaataaccctcaacaatacagatttcctcaataatcatgcgatatattcagcagcagcgcttctcagcttaggaaacgcaacaatcaacaactgcagtttcataaaccagaccacaaactatacagcaggggcaataagcaatcacggaaacatgtttataaacaacagccttttcttcaattgcagagtaagattctatgcaggagcaatacttgcacctccaagcggacaccatgtcgtaacagaggtctacaatacaatctttgactataacaatgcaggaaaccacggagcagtcacaaacaacttccaagatgcagagattacaatgataaactgtgcaataaccaataactacatccaaaagaacgttttctatggagatattgcattggatgacaacgctacagtccaatactgctggtggggccaaaacaacataagctcttactactattcccctcacagcaataatgaggatccaggtcaaataaacgcttcaagatggcttatgatgactttcacatcaagcaatggaaacatctcagcagatgaagtgaacacattgactgtaagcattaagcaatactttgacaacgatacaaaagaaatatacgaatataatgaggatataaacctaccattaaccgttaaattcttcgacgacaataaaaagaccattgcaacaaaaactttaaagaatggtacagcaagctacaattacatcccagtgaaaggtgtcaatgctgtctatgcacaaatcaccaatgaaatcattgaaattccagttgtccagaaaaaggaatcaaatcttagcacaagcaatctgaccaaatactacaaaaatgaaagccaattggaagcaaaactgacagatggcgacaataatcctctttccaataaaactataagcatagaacttttaggaaaaacatacaataagacaacaaacgaaaacggaatcgttaaacagaatatcggattaaagccaggccaatacactgcaaacattattttcaaggacccagaatacaaaaacaaaaacattacagtgcaaatcactgtcttaaagaacagcacttcaataagcgctaaaaaccttgtaaaatactataagaacagcagccaattaactgtcaaattgcttgacaataataagaaagcaatgaagtccaaaaaagtcaaattcaccattggaaaaaacacttacacaaggacaacaaatgcaaatggagccgctacattcaacatcaatctaaaggtcggcacatataatgtaaaggtttcatttggaggagatgactactacaaaggatcttcaaagacagtcaaggtaactgtaaagacaacaaagatgcaggcaaagtctactaagatacgcaaaaactctaatttcgtagcaacatttaaggacgctaatggaaaggtcataaagaacactaaagtgaaattcactttaaataaaaagacctatacaaaaacaaccaatagcaaaggacaggctacattaaaggtaagtgtaaaattaggcagctatacaattaaaagtcagtacgcatccactaagacctatggggccactgtctttaatacaaaaattaaagttgtaaaataa

SEQ ID NO: 246 - DNA, 918 bp, Methanobrevibacter ruminantium
  source 1..918: mol_type = genomic DNA
ttgactattaaaaaagacttattagcgataggacatactgcattggattatataatcacagtagatgaatttccaaaggctaacaattcagctcctatgaagaccatgctaaacttgaatgggggagctgcagctaatgtggctatgattggcgcaagccttggattgaaatctggattggtatccgctgtaggtaaggaatttattgactctcattatcataaggaaatgaccagattaggtgttgacactgaagcgatgattatttcagagactgaaaacacacctactgcttttgttatgacaaataaaaatcaggaccagattagctatttctactggggagcaggtaaggatttccatgatagtgaagttccaagggaaaagataaaggaatttaaggcagttcatttggcaactggagatcctcatttcaattgcaaatctggaatcgttgcaaaggaagaggaaagattggtttcattcgatccaggtcaagaccttggaatgtatagtcctaaaaagcttaaggaagtcattagcaattcaaacattctttttggaaaccatcatgaaatcaaaaggattcaagagtcattggctgttgacattaacggtttgatggaattaggtccggaaattgttcttacaacttgcggtaaggaaggaagcataatctatagccttgatgagggcaagtttgagattgattccatctataggcctgcagttgatcctacaggtgctggagactcctataaggcaggattcctatcccaatttattaatggaaagacattagaggaatctgctaagtttgcatcttctgtttcatcctttgttgtggaaaagcaaggatgtcaaacaaacatgcctagctatgaagatgcttataatagaatgatggacttttattag

SEQ ID NO: 247 - DNA, 1299 bp, Methanobrevibacter ruminantium
  source 1..1299: mol_type = genomic DNA
atgacacagataagcgatgcaaaaaaaggcatattaactgaagaaatgaaacatgttgcaaaaatcgaaaatgtttcagaagactttattttaagatccgttgcaaacggtactatcgtaattccaagcaatgtacacagagacattgaagcatcaggtattggtgcaggacttagaacaaaggtcaacgcaactgttggaacttcaacagacattgtaaactttgatgaggaagtattgaaggcacagattgcaattgaccatggtgcagactgtcttatggaattaagtatcggcggagacttggatgtaataagaagaagagttcttgacatgtccccattgcctgtaggatctgtacctgtctatcaggctgctattgaaagcattagagaacatggctctgtaatttatatggatgaagatgatttattcggcgccattgaaaagcaagctaaagacggtattgactttatggctgttcacagcagtatcaacattgaaaccttgacccgtcttaaacggcaaggacgtgtaactggtcttgtatcccgtggaggatccttcatgtctggttggattgtagagaatgaaaaggaaaatccattatatgctaactttgattatgtattggaaattgcaaaggaacatgatgttgtactttcccttgcaaacggtatgagagctggttccattgctgactctactgaccgtgctcaaatccaagaattgattatcttaggagaattgattgacaggtcccgtgaagctggagtccaatgtatgattgaaggaccaggtcacattcctatcaatgagataccaaccaatgttatgattcaaaagaaaatgtgttcaaacgctcctttctatatgttaggacctattgtatgtgatgtggcacctggatatgaccacattgtatctgcaatcggtgcagcatcttcagccaaagccggagccgacttcatctgttatgtaacccctgctgaacacttggcgctaccttcccctgaagatgtgaaagagggagttattgcaactagaataggagcatatgcaggtgacttagctagcggtcaaatagatggttcccaagaccttgcaatggctgaagcaaggaaaaaactagattgggaagctcaatatgagtgtgcaatgttccctggcgctgcacgtgcaaaaagagaccaaagacctcctgaagaggaagacacttgtacaatgtgcggtaactactgtgctgtaaagattgtaaatcaatggttggatcagtctgattctgatcttattaaatag

SEQ ID NO: 248 - DNA, 1062 bp, Methanobrevibacter ruminantium
  source 1..1062: mol_type = genomic DNA
ttggatgcattaagggcattagcaattatctgcgtaattgccatacatgcttacgcatgctcaaggaattttgttattagcgaattggtgggaaacttaccttcattgaattggattattattcaattttcaggcaatacatttagaataggagtagatttgtttttaatgttgtctggtgctttatctttaggtagggattggaagatgaaggacttctttgctcatagattccctagaatagtatatccatttttattttggagcatcctcttaggaaccatatttcttctattgtcatattatgattcatttaatgtgataagctcatttgatttggtttcaatagccaattacttctatggagtatttatgggaattattgatttcgctaagccttattggtacttttggatgattttagggatttatctgataatgcctgtatttaacaaatggattttgcattctgatttggatgatcttctttatttcttattcttctggcttataacatgcttgtttgactatacattaggagttgaatttccaatcagattgtcatactttacaagtccgataggtttggtggttttaggctattatttaagatatacaaggagaataattctaaataaccaatattttgcattatttttgattattttctcaagcctattgatgcttgtcctttcggccatttattcaacagacactcatttctataattttaatatatattccattttagtcagcatggaagttataggagtgttcttattgtttaagaatttctataagtttaatttaaatatagggttcttctcaaggcctgatggattctttaataaatcagtttatgctttggccaggtatagttatggcatatttctgattcataatgcatttatatgtgtgttggtgcactacttgggcaatacaggcattccgccagtcttatatatgattatattgtttgttgtttctttactctgttcggtgattgtaatggctgtattaagtaggattccttatttgaatagggtgattggtgttaaatag

SEQ ID NO: 249 - DNA, 930 bp, Methanobrevibacter ruminantium
  source 1..930: mol_type = genomic DNA
atgagggatattatgctagagaatactgataatgaaaagggcaaagccatcattgaaccggaaattggaatcacaatcaatggaatatcctttaatcataaactatttgaaaccttagaatcattatctcgaacatattctcaaagaaaaacagcaaaagaattgaaaatagcccattctgttttaaatagaagaataaaaaatgctgaagacaaacttggtgaaaaattagttgttacaataggttcaggctctgaattaagtccaaaaggctatgaattgcttaatgcataccacaaatataagaatcgccttgaagacagagaagagattgtcattgcaggaggccacatcataacaggcctgcttcaagcaatcagctacgacttgccctttaagacattaatctacagcagtgacgatgaaagcgcttatgaacttgcaaaaagcaatcagattgacattttagcattagacgatccattgcttgcatttgaaaatgacttgaactttacagcaatagcctatgaccatcttgtcttaatctccccaaaaaaggaaaagcctatagaaaaaataagagaccttagcgatttggaattcattggagttaagggaagtgcccaaaggctagcttggagtactctaaaacaggaaaacattccattcaatatagtaaaagaagtaaaatcccaatttgatgcatttaagatagttaaaaactcagacgagtattatacatttttaaatgcaagctatttcaatggaaatgaaatattgaaaaatgaaacccgtcacgtaattagcttagttcaatgcaatgatgaaaaggaagacatttataatttaatggaatatttacttatggacgggcaaagtcaaataggagaacaaggatttgttcctatgaaaccttggaaaacaagataa

SEQ ID NO: 250 - DNA, 591 bp, Methanobrevibacter ruminantium
  source 1..591: mol_type = genomic DNA
atggaatatatgaaagacgctatagaagcaattttagataatatacgtgatgctgaagactatttagttgaagaggatgttgctacatttattgatattataacctcttgtgagaatatttttgtaactggtgctggaagatccggtcttgcagctaaagcatttgctatgagattgatgcatttaggattaagttcctatgttgtaggggaaaccatttctccagctatcaatgctgatgactgtattttagctatctctggttctggagagaccaataccattgtaactgcagcgaaaatctccaaaaacagaggggctaaggttttagctttaacaagttatcctgaaagcactttaggtcaattggcagattgtgttattcttgtaaaaggtaggacaaaagttgaagcggatgatgaaaactatcttaaaagacaaatcaagggaaattatacttccttaactccacttggaactgcatttgaattgacttcattggttttcctcgatggtatggtttctgaattgatgaatgctatgggaaaaactgaagctgatttgaaattaaggcacactgtcttagaatag

SEQ ID NO: 251 - DNA, 1107 bp, Methanobrevibacter ruminantium
  source 1..1107: mol_type = genomic DNA
atggaaaagaaaactacaattatattggttattttaattgctcttattgcatgcggtgttggaataactttattcgcttcaccatcatctatttctacagatgggaataccacaataactgatatggcaaataggactgtaaatatttcaagtagtgttgatagggtggttgctacaagtccacctatgaccactatcgtttatatgctggcacctgaaaaattggttggtgtaaacttccaatggactgatgaggaactaaaatatgttccggatcagtataaggataaattcccagttatcggtggatggtttggaagtcaagacggtaattatgaagagtttattgcttctgagcctaatttggttattgaaggtattgatgaaggaatgggtgttgacctatcaactgttgaagaaagacaggagaagtttggttcacttcctgtagtggctgtaactgacaatacaaatgttacaaagatagacaatacgatagagttcttaggcaagcttttaggtgctgaagataaggcaaatgagttaattgcttttaatgataagtatttgtctcaagttcaatccactgcaagcagcattccagattctgagaaaaaatctgtttattatgcttctggtgaggatggattatccacttatgcaagtggcgcttcacatggtcaattgatttctcttgttggaggcaaaaacgtagcagacactgaagttaaggatagcggaagtgaattgactgtttccattgaacaggtaatgtcttggaatcctgatgttattatagccacagatgaggacttttataataaggtttataatgattccaaatgggctagcgtaaaggcagttaaggaccatagagtatatctttctccacagtctccatttaagtggtttgataggccaccaggtgctaatataattataggagttccttggactgctaaggttatttatccagataaatattccaatatagatatggttggagctactaaagagttttatagcaatttctatcattatggcttaagtgatgaacaggctaaagagattctaacttcttctggtctaaaggggtctgatttgtag

SEQ ID NO: 252 - DNA, 1026 bp, Methanobrevibacter ruminantium
  source 1..1026: mol_type = genomic DNA
atgagtgaaaattcttccttttctgtggataatctggttatttatctgctgctaatagcattgccaatctttttgttctttgtatcatttatgttaggtagatatcctgtggcacctatagatgttataaagaccattctaagtcctatatttccatctttggctgtgtctcctgaattgaattccatcgtctttacaataaggctgcctaggattatagcggctttgcttgttggtgctgccttatctatagctggagcttcatttcagggaatatttaaaaaccctcttgtctctcctgatcttttaggagtatctatgggagcaggttttggagcggccattgctattttagcaaatgctggaaatgctttgattcaactttctgcctttgtctttggtcttattgcagtattcattacattttcaatatcaaagacatataaggccggaggaattttactccttgtgctctctggtactgcagtctctgcattcttcaatgcattgatttcaggagccaaatttatggcagatccttatgataaattgcctcagattacctattggcttatgggcagtctctctgcagttaattttgataagctggcaatgataatcattccattggtgctgggaataattgtcgtcatgattttaagatggcatttgaatgtcctctctatgggtgatgaggaagcccaatcattgggattgaacccatcaagacttagattgattgttattattgcctgtactttagtaacatctgctgcagtttcaatcagtggaattatagggtggataggtcttgttgttcctcatatgactcgtataattgtaggtccagaccataagatacttattccagcttcattaagcataggggcaagtttcctattgctcattgacaatatttcaagaactttcatatcaattgaaattcctattggtattttaactgcaattattggtgttcctttattcctttacttgcttagaaaaggctattctgagtggaattag

SEQ ID NO: 253 - DNA, 831 bp, Methanobrevibacter ruminantium
  source 1..831: mol_type = genomic DNA
atgacaaaattagtagaagttaaagatgtttcattttcctatgacaaggattctccgattgtctttgagaatattaatttctcaattgaaaagggggatgtattatgtattctcggtccaaatggaacaggcaaaacaactttgataaagacattgaacggtcttcataaggttaattccggtgagatactcttaaatggaactaatatcaaggagctttcattcaatgacattgcaaagcttgttggatatattcctcagggacatattccttcttttccttttaaggtattcgatgttgtattgatgggcaggtctccttatatcaatcttacagcttctccaagggaggaagataaggaaattgctcttaacgctcttaagactcttggaatagaagacttgaaggacaaaagctataccaatctaagtggaggagaaagacaattggtctttttggcaagggtattggctcaagagccagaccttttaattcttgatgagcctacaaatcatttggactttggaaatcagataaaacttcttgaaatgattgaacaactgtccgagcttggccttgcagtcatcatgtcttcacattatccagatcatgcatttttagcagcttctaaggtagcaatcatgaaagacaagagctttattgattttggaactccagaagatgttttaactgaagagaacttgaataaggcatatggcatagatgttaagcttgttgaattggaagacgatagaaaaatatgtgttcctttaaggactaatttggagttggttatgtctaattattctaagaagtactctaaggattga

SEQ ID NO: 254 - DNA, 573 bp, Methanobrevibacter ruminantium
  source 1..573: mol_type = genomic DNA
atggtaagtgtagaagactatgaagaacaattagctaaagctggtgaattccacggagaaatctgtggtggaatagctatcggcactaaacttgcaatgtatggtatggaattaatgggctttgaattaaacaaacgtcataaaaaccttattgtatttttagaaatcgacagatgcatgtctgatgcagttcaatcagtcactaaatgttctatgggtaaaagatctcttaagcaaatgtattatggtaaatttgcagtgactttctataatatggacacaggggaagccattagggtttccgatgcagatgccaataagcaagaaaagaaaagagaaaccagagatgaaatgattgaaagatttaaaagaactcctgctgaagagctattcaatgtggaaaaggttcatgttgaattgcaaccttctcaaatgcctggaaaacctcataccagtgtattctgttcagtatgtggtgaaaaggttactgacggtcgccatgtaaaccgtggcggtaagcctgtatgtattccatgtgcagaaggcgcttattatgagttaatagatgaataa

SEQ ID NO: 255 - DNA, 4188 bp, Methanobrevibacter ruminantium
  source 1..4188: mol_type = genomic DNA
atgaagaataagagtttaatattaatttctttattattactgattacaataataagcataggatctgttgttgcaacggataatgaagaaattaatatggataatataaataatattgataataatgaggatatcgctaatattgataatgtcgataatgtcgataactccaatataaacaatccaactgacataagaatagacaattcaaacctaaatagagaaacagaactagattcaaatttaaataaatctaatcagattagggaagacgaattagaacaaagcaatgcaaaatccaatctaaaatcaagcaagctatcctccacaatcactgtagacggctcagatgaaaaccaaatgtctaatccaaccattcaaagcgctatagacagtgcaaatgctggagatacaatcataataaccggaaagtcatatgttcactgccatttcatagttaacaagccactgacaataataagcgagattggaacatcaatgagcccatgcccttcaaatacaaaaggctctggtgcacatggaatattctacataagccctgaagctagcggaacagtcctaaagggattcaatctaacaaacacatatggtgactatgacgactatggaatactcataagaggagcagagaatgtagaaataatcaactgtacaatcaatacagtcagcgacggtgacggaataagaatagaaaatgccacaaacacaaaaatagctgactgcctaattaaggattcaaacattggaataaacattacaggttcaagcaaaacaaccgtaacaaacaataacataacaaacaacaaggtcacaggtgtcaatgtaggaataaataacaacgatacaactattcacactaacaatatcacatataaccagcatagcggaatagacctctactctggagattatgtatacatcctaaacaacttcattggtcacaatcaaaattctaaaagctcaagcggagctggaatatatgttaactcaaatatcaccaaagttgaaatcaaaggaaacttcctcaagcaaaacggacaatacggagtcctaaacgactatcgtgtaagaaatatggatgcatccagaggagctgaaaccctagagataaacaataacaattactatttaggacataccgaaagaatcacataccatatcgaatacagcaaatatgccggaggcccattcacttacgacagcgaaaatgatctatacgtctatgtgggggacggaaatggagactgggacattggaaagactgtagtctaccttggatatgcattctacagagacgaaaccgtttgcggatccactctctttaaagctccaagcaccacttggggaactgaggtctataagttagagatcagtccaatcagccaagtcaaaaaaggagtatactctgtttcgattgtagatgtcaacggcatcgttgcaagcgacataagctcaatatatgtgactttctatttaaataaaaacaataccgatgcagagcctcaaagcggagacatctataaaactgtcctaatggaaaacggaactgcaactgtaaatcttacagacaaagagtttaaagaaagtggaaataagataaccgcatgtttcccagggctttataatgtatataccatcaacccatatgcgacctttgatgtaaatgactcagatatccctggaagctatagaaacaccacaatcaatgcaacagatatgagtcttgttccaaactctggaaacaagattactgcaagattaactgatgaaaacggaaatcctgtagctggagaaagccttcaattcaagatctctggaatttcaacaacatatacaagaactacagacgaaaacggtgaggcaaatcttaaggtaagcctatcaaatccaaagacatacactgtcaacatcaactttaaaggcagtgaaaactataataaaagctcaaaaacaattaaattaaccgttaaaaaacaaacccctaaaatagaaagctcaaacatagatctattgccaaaatccggagagaatttcacagtcaccctaaaggatgcaaacaacaaggcaatagcaaataaagaaataagcttcacattaggcaaaaaaacatacacaagaactacagatgaaaatggtcaagcaagcttaaagataaaccttgcaaacactggaaaatacacaataactacaaaatccgaaaagacaagccaatacaacgaggtttcaaagtccaatacaataacaatcaaaactggtgcaaacaaagtaaatatcgaaagctcagataagacctacattcctaaatccggtgaaaatttcacagtcaccctaaaggatgcaaacagcaatccaatagcaagcaaggaaataagcttcacattaggcaaaaaaacatacacaagaactacaaatgaaaatggtcaagcaagcttaaagataaaccttgcaaacactaagaaatacccaattacaacaaagtatgccggagatgacacatattcatcagcaagtgccgaaaatacaataacaatagcaaaagcagctgcagaacttacaacttacaacagaacatatatcaacaaatcaggacaaatgttcagcgcaaagcttactgataaaaacaatattccattggaaaatgaaaagataagcttcactatcggcaagaagacatataacagaaccacagatgcagatggcttagcatatcttacaataaatcttgcctatgataaaaatatcagcacaaaattcttaggaaacgatcagtacaatgcaaaaacaaacacaaattcaatcacaataacagatgagatagaaaccgcttatatcgataaaggccttaaaaacgacgagattcaaagaatcatagatgaaattaagccaaattatgatgtaaaattcttaggtgacagttacgacgatgtcaatctaaacattaacaaaaccttattaatctacacagacgtaaataccacattaaatggaaaatcagcaagccctgttttcaatttaagagggggtaatattggagtaagcttctttaatataaatgtaaactccacagatggggaaggatatggaataatccttaacaatacaaaagaagcagtgatagatggaaacacaataagcaacatattggattcatctaaaatgactgattacaataatggaagcacaatacttccagggcatggaattgaaatattaaacagcaaagcaacattgattgaacaaaacaatatagaccactttgaaagcggaatctatatggaatacagcgatgatgcagtgataagagaaaataccattactgaaaacaattatggtatcaaatacggatttggaaactccaacacccaaatttacaacaatacaataattgacaatatcggatggtacacagaagaggttccagaaggccctagaggctatggagcattccttaataattcagcaaccaatataacaatcacagataacaatatcagcaataattatatgggaatttccgttgatgcaaacaagagcacaggaatcgtcatcacaagaaatctgattgcagacaactcacttgaaggaatcagattcaacgaaggctatgacctggcagaaaatgcaattgaaccagtggtaactgacaatgcaatctatagaaatgcagaaggccctagcctaatgattcttggtgaaatgagcgcaaatccaaatggaatctatggagccggccaatgggacgacagcatgaagctaaagatagatccaaactggtacggcgtaaacaatcttagaacctgggactatgaaaccggcattgtaggggttggaacaatgtgtcctagaatcaagtccactacaatcaagttcaacacccttgaatatgaaaatggaacttataaaatcaatttctataaaaacggcacttttgcaatcaatctcgctaaattcgacatctatgccacaataaatagaaatacagacaaaaaggccgaagttcatttctatgtggaaaacggtacaggtacattcagctttgataagtcaaactacctagacagcaataacacaattgaaatatctgtaggatctttgataaatgtggtggatagaatttatagtgttgtttatgcttatgacgttccagattcagagattccaaattaa

SEQ ID NO: 256 - DNA, 1341 bp, Methanobrevibacter ruminantium
  source 1..1341: mol_type = genomic DNA
atgggagggatatatatcatcatgaagacttttagacaacagctattggaagaccctgaattccagaactacctgttgcagagaccgaacctgacggagagcagcctgcagtcatacctcaatgccgccaccaacttcgtgaggttcacaggggagccgttctacaagaccgtgcatgagctcagaagccagcagaacgataggattgagaacaacatcatcataaggttcaacccgaaccagtcaaggataaacatcatgcagtttgagttcatagaatacctcaagggaaggggctgcaccgaggtgagcatagactcctatgtcaggtacatgaggaccatactgagcaccttgggaatcatactgcccaagtctccgaagctggacgacactccacaggactggtatctcctgacaaaggacgacataaagtatgtcctcgacacagcaaatctgcagtacaaggcggtcatcaatttcgctgccgttacaggactgagagtgagggacatgaggtcattgaccatcaaggacttcatgactgcgaccgaggagtaccatggctgcacggaggtcgaggacttcctggattcagcacctgacgggatgataggcttctgggagcttttccctcaaaagaccagaaagttcaggcttccctgcaaggtgtgcaacacccctgaaagcagcgaccttttgcttttctcattgaatgagcgtgtgaagtactttgaatggaagaacgagaaggacggcactgacctgaagatcaccaagaatgaccctctctttgcaagccgccaaaggaagtacaagaacttcatagcgcccaacagcataagctggaccctgtcccaatacagcgagaagctgagcgccgagagggaaagggtcttcaagtacaagctggagcatggcgagatcagtcaggagacctatgacgaaagcgttgcgacaatccccaagttccatgcgcatgggctcaggaagttcttcatctcaacattggctaagaaccgtgtggatgcaaggataagcgcacttatggaagggcacaaggctccgctggtaacggatagccactacatcaacaacgattacctgaaggagacaatcaaggaggagtacatgaggtgcattcctgacttgagcttcgagaatgttgaggtccgtttccttacaagcgaggaaaggaaatccttgcagcagaagatagatgagcttcaggaagagaacgagaacatgaagaaggacatggagaagtacattgacgatgccgtccatgagaagatgaaggacgccttcgagaactggctgaacattcaggactcaaaatga

SEQ ID NO: 257 - DNA, 297 bp, Methanobrevibacter ruminantium
  source 1..297: mol_type = genomic DNA
atgaatacattaaaaatagaatgttcaaaagatgattatatcataaagactgcaaaggcaaattctgaaaatgagttgaaagttgaagttcctgagaactggaactgcgactatgtgaatgctgtcctgtgggaagaggacatctgcgaagtgcttgaaaagggtgatgaaagaatgcttttgattcctatgtgcggtgaactgcttcttgaaggagtgcaggaagatgaatacataaagtacatttgccttcctgtaaaatatcaagatcagatggttttgattgcaaaaatttaa

SEQ ID NO: 258 - DNA, 885 bp, Methanobrevibacter ruminantium
  source 1..885: mol_type = genomic DNA
atgggaatgaaaaaagttaagatcgaaagtaaagcaaaaaataatatgacaagaaacgaaaaactcttctataaattatatgacgatttatataatgaagatagattaattttattctccacatattttaacatatatgataaatttatttttaaaaaagatataatccattatgttttaatgaactactctgaaaatgaaattattgaagcaatgaaaaaaattgatgaaattcagtcagaaggcattgatattaaaacattcatacctaaaaagtattgtccaaaatgtaaaaaagtaatggacagttatgggaaaatctgcccagattgcggtacaatattaatagaagatgaaaagaaaattcaagagcttcaagcaaaagataaagcatatgaagaatatctagaaaaagagtataatatttatttacaaaactcttatcacaatatgattcaagggtcatatactattaaaatacgaactcgaaagcctaagactgaaactgagatagtgcgcatacctgctcaaacagtaacatcaagaggcaagttcaattcaattagccagcattatccaagtgaaacctatacaagacaaaaagtgactcgtgcaaagtataaagagtgtagagttctttttgacaaagagaagatgatattaaatattgatggaaccgcaactaaactttattatgatgaagtttgtgaattggaatatcctgaacaggaagtgaatgaactagttactttaacattgcacaatggcacagtacttacttttaaaataaaaaatggatggtttgcttctgataatgaaaaaaaggcaagatttgacgctttcgtaaaaacctttattgaacaagggaaaaatctgcctctataa

SEQ ID NO: 259 - DNA, 828 bp, Methanobrevibacter ruminantium
  source 1..828: mol_type = genomic DNA
atgaaaacacaagatctaattaatataataaatgatgaggaatctcctgtattcctcaacagggaagtctttgagatggactatgtgccggacatctacaaatacagggacgagcagctggcgaaaatggcgatgtactgcaattcaatacctgacaacatagctcccaagaacctgcaattgtgcggaggcaatgcgacaggaaagaccacaacattaaagcagttcttcaagatgttgaacgaggcttttccaaacatagtaacagtctacatcaactgtcagctgttcaacacagaaaacacagtctacggaaaaatatacaacaagctgtacggagtaaagggctcgataaacggcaagtcaaacaccatgctcttcgacaagattgtcgcaaggcttaagaaggaaaataagatattgattataggcttggacgattttgacagcttcaagtctcgcgatgggctcaacaagatgctttacaacttcctgagaatccatgaggctgaggaaggcatacagatctgcatcttcaccgtcagcaacaaggagaatctgaagcttgctccttccgtcgagacaatcttcaacagggttccgatattctttgaccagtactccttggagcagatgtaccacatactggacgacaggtgcgccttcggtttctatcctggcgtgataagcgatgagctggtgagggttgttgccggcaagtcctatgacctgggcaatctgaggtatggcattaagcttctgagcgctgccggtcagaaggctgaagtctttggtgatggaaagataataaggaattttcttgattga

SEQ ID NO: 260 - DNA, 858 bp, Methanobrevibacter ruminantium
  source 1..858: mol_type = genomic DNA
atgtttttggaaaaatgcgatggaaaagatacaatcagcatgtctcttcaagaaaagatgaatcttatattggaaactatggaaagcaaaggaagccccttcatatcctgtattcattgtaacatacctataaatgaagcagaagaatggtacaaaaatggagaaataggagatcaggactttataaatttctatgatgatgtaaacttgattgaagaaagttttgggtttgaaatttataaaaaatcagaatatcctacattacatactcagagcataaatcaaatagcctctacttatccaatgaacagaacccaaaatgaaaagacaccactattccttagacgagaaagaaaattatacgaaataactaatatttttaaatcccattcaacaaatgaaatttttatatcaatggattctaaatcaaaactaaaacatgaaataaagtatgattttactcttaaagaattaaacgaaatttttaaaaattatttagaagaggattgttcaatttacatattaaacgataatagagcgtttgtaatgacattaggacacttccaatttgaatttgatgtttttggttctgcaaaagaaagttatgtatttgatgttgaaattgacgatgaaaaatacgataaaatattcattcgttcttcatactattttaatattcctgttgatgaattggatggcttggctaaaatattgaaacaaaaaagaataattgaagaaggattttttgaaggccaattcttatatcacactccaggaaacggcatgacatatggagacccagtaagaattatagaaaatgaaattgaaaaatacgcttttagattcataactttttaa

SEQ ID NO: 261 - DNA, 219 bp, Methanobrevibacter ruminantium
  source 1..219: mol_type = genomic DNA
atgcaatattggcgtattgtaaattactctccactagctgttgcatgtaaaaaaagaaaacattggacgtgtaatcattctttttatgcaacattttatatattgaactttcaaatatttaaaatcttgctttttatggctaaacagcagctattaagccgtattgatttgaatctactttttttaatatatttccaaaactttttgcttattatctaa

SEQ ID NO: 262 - DNA, 168 bp, Methanobrevibacter ruminantium
  source 1..168: mol_type = genomic DNA
atggaaaaattaatcgaaattgacggagttcaatacacagaagcccaaatcagaagggctttagccattgaacgagacgtgcgctctcctaatttcgttgatatgttattgggaaagatcaaacctagcgaacttgcaagcagagtttctgaaaaaggtgatgcctaa

SEQ ID NO: 263 - DNA, 156 bp, Methanobrevibacter ruminantium
  source 1..156: mol_type = genomic DNA
atgtgctatgtgggaaacaccaggacattggtctatcacacagaggactgcttctgcaaccactggctgttgaacgagaacaagaccattctagaggaaaagcctgtagacatgaaaccttgcagcttctgcaaaccacagtttgacactgaatag

SEQ ID NO: 264 - DNA, 225 bp, Methanobrevibacter ruminantium
  source 1..225: mol_type = genomic DNA
atggttgcagagatggttgaaaacatcaggaaaggagaaggagatggatattccatctaccctcctttttcctgcattgttttcctacaaggcaaaaagtattccgaatgctgctgcaaggctgaggcaagggatcagaagtttgcacttgtgaaccttgtaggcttcagaagagaggatgtcaaggtcatagacccaaggaccaacgaggagctgttcgtatga

SEQ ID NO: 265 - DNA, 162 bp, Methanobrevibacter ruminantium
  source 1..162: mol_type = genomic DNA
atgagcatgcttgcagacttcgagcctgcaaggctccacaagaggacatgggctgaaaggcatgatgtcgaaatccttgctgtcatatgccttgccataagcattgcaatgctacttcttttctttgcgcttgcagagccgactgttgcaggagtgatttag

SEQ ID NO: 266 - DNA, 453 bp, Methanobrevibacter ruminantium
  source 1..453: mol_type = genomic DNA
atgactaaggaatttgaggacttcatgagaaggaacacaggactgcttgttttcttgagatgggacacagtggcatatctgaaataccttgagtcccattatgacgaaaggaagtacgaatgcgcttacagattgttggaggcaatcgacaatctctttgacttctaccagataaccttcagcaaaaagactgaaagggaaattcctgaccagctttttgaaaaggacaagataaacaaaggcttcctttcacacataggaaaggcttgcaaaaagcagtctgatttttacggtcagagatggaagtccacaagaggaatcagagatgcctacggacactattccgcaggaaacttcctgtttgcagacatctacggttgcctgcacaggataagcgacgattgctacaggattttgaactttagcgaatatgaaattgaggagaaagcatga

SEQ ID NO: 267 - DNA, 756 bp, Methanobrevibacter ruminantium
  source 1..756: mol_type = genomic DNA
atgaatgagatagttactacaactaacgagaataatgtacctgtcgacgttgactatgccatcgaggaatggaaggcataccagcgattgaccagagagctattggacgaaacagattatcagacacacagaggcaggaagtacaagaccaagagcgcttggcagaagtacgcacgtgccttcaacataaacacacagataatcgacaaggaaatcgtcaagaatgacaagggaatcgtcattgaggctgagtatactgtcagagccaccttgcctaacggacgctttgtcgagtcagacggaagctgcgacagaagagagtccggaaagagggaaatgagcaaccacagcataaaggcgacagccaagacccgtgcaaccaacagagccataagcgagctcatcggtgcaggggacgtcagcgctgacgaattggatcctgcattcgacaaggtgcagcacagcaagaccaatcatgtcattgaggcggaagttgcagagataattgaatctccgtatgacaaaaatgcgggttttgagactgccgacaagattgagcctgtggatgaggaccctgtctgcaagaattgggtgaagaccatctgcaagacaatcaaggcagagggaaagccttgccttaaaggtgtcctcatccagaaggctaggaccataggcaccatgaccgacgaggaaaggaacaggctcatcgagtacataaagacacttccgaagggagaggtgaacctcgatgattga

SEQ ID NO: 268 - DNA, 231 bp, Methanobrevibacter ruminantium
  source 1..231: mol_type = genomic DNA
atgattgagtgcatacaggaagagggagacttcacggattgggaggttccttcctcctcttccgacatcaagtacatagtttcagtggatgatgagggaaacctgttctgcagctgtcctgacttctattacaggaagtccaggatgaaccctcacatctcaaaccctgaatcctattgcaaacacatcagacaagtcttggaggaggacaatagattgcaaatgctctag

SEQ ID NO: 269 - DNA, 1005 bp, Methanobrevibacter ruminantium
  source 1..1005: mol_type = genomic DNA
atggataatataaataagacaaaaacaagtttagctaagtttgaagagtttttcagcactgtatacaaggacgaagtcatggaagttttggaaaagtatcctgaggaaaggacattggttgtggactatgagaatttggaaatgtttgatcctgatttggcagacttgttgattgaaaagcctgacgaagtaatcgcagcttcacagaaagcaatcaagaacattgacccattgatgaaagatccaaagttggacatcaaattcaaaaatgtgtcaaactgcattgattttgtgaatgcagacagcaaatacattggaaagttaatatcttttgaagccaaagtcatggaagctaaggaacctaaaccaatacttgacattgcagtctatgaatgtaggggttgcatgagtttgcgtgaaatacctcaaaccatcaattcaagtttagaaccatcactatgtccagaatgtggagggaggtcttttagactgctacaagatgaatcagagttcttggaatcacagctattgattgtctcttctgatgacacttctaaaagtttaaaggttcttctgctaagggatgaatgctcttttgacttgtattccatgggtcaggaagtaagaataactggcatattgaaatctttttcttctaattatggatatgaatattttttagaatgcaatttaattgaaatattaaatgattctgaagattctgaatatgatgaatatggcaacagaaacagtccagagtatcgaacctggcaaaaagtagtcatagattcagacagagtatgccaatgctgtggaggatctaagcatttggaggctcaccatatcttcagctatcaaaataatccaagttacagggttaatttggagaacggcattgctttatgtaaatggtgccatagcaaataccatagttattatggcaaggacgcctctccaaaaagcctaattagattcttaaaaagatttgggaggtatgatggctaa

SEQ ID NO: 270 - DNA, 435 bp, Methanobrevibacter ruminantium
  source 1..435: mol_type = genomic DNA
atgatggctaacaagattagagttaatctcacggttgaccctaatttgtggcaattagcaaaagacaagttaccttgcagcagaagcgaattctttgagaatcagttgaagatgttcttagggattgaagatgacgagtcggaaatcattaaggacatccaaaccaaagaaaatgagattaacgcactaagagacaagttatgtcatgttcgcaaatcaaagcagttgaaattggaatcaaacaaatctatggagaaggctatggcaagcttaaacagaatgcacaagaaatatgggaaaatcggagagaaccagattaggaacctcgcccatgttcacaaggttgactttgatgacttgaagaaggaatgtcaggacaactgcatgaacatatttgaatttgcagaagttcctaagcatgatagcgtaatgtga

SEQ ID NO: 271 - DNA, 420 bp, Methanobrevibacter ruminantium
  source 1..420: mol_type = genomic DNA
atggagttgtttttgatgacaattggaagtttggacaattttggaaagtcagatggagaaaacatgaaccctgaagatttcgactgttctgttttctttgaaatgtacaaggcactttttgagatattggatgttgaagttggcagcttcgctgaactcttggatgtgtacaagaatgtcgagatggattacaccttgaagagacatgccctcaagcagaaggaaatcctttactggttcaataccgactggaaggaggaacttggaaaggaaaagccgaccgaaaaggacaaggagaaatggatcaggcagaagattggttatgactccttcgtggtcgagcagctagaagtcaagctcaagcacatcagaagaatgtatgaaaccgctttgaagcattcctttgaggcaataaaatga

SEQ ID NO: 272 - DNA, 276 bp, Methanobrevibacter ruminantium
  source 1..276: mol_type = genomic DNA
atgaatgtgaaaacagtcatgaatgaccttataggattgtcaaaggagttcgagggagtggaatatgagattgaatccaaaaattcaatctacttctattcctttccaaagtacatgaaggaaggcattgtgattctgaaatattccgcaatctatgacctgcacaccatattgaaaggcatggatggaatcatagtggacattctggaggttgaggacaatcctggtgatgagaagaaggatttgctatatgtgcagattgaggtgaaggaatga

SEQ ID NO: 273 - DNA, 234 bp, Methanobrevibacter ruminantium
  source 1..234: mol_type = genomic DNA
atgattagcgacgaatgggaagaggaatactatgtcaaggtcaacgaggaactggagcaggtggaagtcaggtttttcagcaaggtcgacaggctcgtctttgctcaatcctactcttcttcatcttccttttcctttgaggaggctgaaatcctgtgcgacaggatatgcgacatactgacaaacgatttgggaaatgccaagtattatctaggaggaaaagatgaattatag

SEQ ID NO: 274 - DNA, 150 bp, Methanobrevibacter ruminantium
  source 1..150: mol_type = genomic DNA
atgaattatagggaatgggttgcaagccagttcgagctgaggatgactgaggacggaagggtttgcttcaagacaccatgcagctactacacattttcaaaggaggactttgagataataagggagatgttccttaatttcgagtcctga

SEQ ID NO: 275 - DNA, 174 bp, Methanobrevibacter ruminantium
  source 1..174: mol_type = genomic DNA
atggatagaataaaggaattgaatgtatgcggaacctgcaagcacagccatttgattccagacatcaacggagagatagcagtgaacatttgcaggataggttcagaggctgtcaacaaggacggaggacttacatattgcgtagactggacaccaaggaggaagctgtcatga

SEQ ID NO: 276 - DNA, 336 bp, Methanobrevibacter ruminantium
  source 1..336: mol_type = genomic DNA
atgttaagtaaaaaagaagccatacagatgacgctggacaatgagaagcactatcctgttaagtgcaagtactgcggaaagccgttcaccaagtctcacaacaggcagatgtactgttcagacagttgcagacggaatgccttgagggaacagaaggcaagataccaggctaaaaggaggctaaaaataaagcagaaagtgctgattgtagatgaatacaagaaatacggtttgggtagctatggaacaagtgcgaacggacacagaaagaacaatttttcacatgagtacatggctattcaaaaggagatgaaaagaataggattgaagagataa

SEQ ID NO: 277 - DNA, 552 bp, Methanobrevibacter ruminantium
  source 1..552: mol_type = genomic DNA
atgtatttggctaaattttgtcctaactgtggaaataaagtagaagaaaatgataaattctgcatttattgtggaaataaactaagagttataattcctgaaaaaaaagtgaaaagaagctcaaatagtattaatgatgaaaaaactagcaaatatgttgaagtcattgatgggctaatgagatataaagtttttccatcaagtttacctgtgaaatatattatttataaagtgaattatggaacaacatctgatgaaataaaaaatatattagaaaatgggaattataattataaaataaatatccattacttcctacaaaacaaaaaattatatttccgtagcccaaaaaatccgaacatgttttttaaatttcataatgatagattcaatgaggagatgaggaaagacaataaagaaataatacatatttcttcatatgctagggtacatagaccttcattaactaaaatatttaattttaaccaagaaaaaacatttatattggcaaataaacattttgaagaaaatataaggaaaacaagattatga

SEQ ID NO: 278 - DNA, 237 bp, Methanobrevibacter ruminantium
  source 1..237: mol_type = genomic DNA
atgatgatttatgataaagcgacagttacaagcctcatagtggctatcctattgccattgatgagcatgttaggaatcggagaattgactcagaactacatattggcaatagtgagcggtatgatagcccttgtggtttggtactacaacgagaagcacaacagcgatttggtgagcggaaccaccaagtgcgactgcgagctttgctatgggggagacgatgaagcacttatatga

SEQ ID NO: 279 - DNA, 339 bp, Methanobrevibacter ruminantium
  source 1..339: mol_type = genomic DNA
atgaagcacttatatgagataatcccttacaggaggactgtttggattacagggttcctgaagacaacagtctcctcggcaatgataaccactggcgtagtgatattgttcaacagcataaccgagcacccttacttcatggagtgggacgagataggaatcgttcttggaatcgtttccatcaccatcgcctgcatttacatagcgatgatagacagatggaaggaacgcaggaagaaggaggagcttgacacgatagaggactacataaacaggaaggctgaggagatagcgaacatgaaggtattgaggaaacttgaggaattggaagaggaatga

SEQ ID NO: 280 - DNA, 621 bp, Methanobrevibacter ruminantium
  source 1..621: mol_type = genomic DNA
atgactatgatagaaatcagcaccataaagatcaccgacataaagcctgccgaatacaatccgaggataatgagccagcttgaacacacaaagctcaggaactccatggagacattcggagtggttgacccaataataatcaacctgaagaacaaccacatcataggagggcaccaaaggtacgaggtccttctggacaagtccatggaggacaacgagttcataaaggagctccacctcatcaggcttggagatgtaggctgggcattccctgagtcagacctcgaggtcgaggacgatgaccatgagaaagccttgaacctggctctcaacaacatcgagggtgagtgggacctgccaaagctggaacccatattgacagatttaaaggatgtaggattcgacattgaacttacaggattcagcgacatcgagcttaccgagctcaatctggagaacaaccttgtctttgcggaggagttcgagcctgacgagagcgaggaggatgtcgacttggaggacatttacgatgagcctgtaaaggaaatgctccaatgccctgcatgcgaccatgttgatgttgtgaaaaggttcaagagagtcgattcacaaggagattag

SEQ ID NO: 281 - DNA, 201 bp, Methanobrevibacter ruminantium
  source 1..201: mol_type = genomic DNA
atgaagatctacttggcggcagcggacaccatgagcgaggacatcataaggctcctgccggttgccaaaaggcttcactggaacctgttcagctactactatctcctgacccttaagaagatggaggactatgacatcataaggaaggcttcaaaaaagcgtccttatagacagcggagcgcacagcttccagaagggtaa

SEQ ID NO: 282 - DNA, 459 bp, Methanobrevibacter ruminantium
  source 1..459: mol_type = genomic DNA
atggacgtcgacaacctgctgggatatgacaaggtactggaattgaggtctttattggaggaggtcacggacaaggtgatacccgtatggcacaagaaccgcggaatcaaggacttcaagcagatgtgccaggactacaatttcgtcagcataagcggctggagaaacgaggacgtcaaggatgaccagttcatccatttcgtcaggcatgcacacaggaacggctgcaggattcacggattgggattgacacggagaaaggttctcgacagggttcccttcgacagcgtcgacagcagcagctggctccagaccatattgtatgcaaggcttgggcagaagcagttggattccaagttcgcaaccgaaaggagaggcgatctggcggtgctgtcctacatcaagtggatgaagacacaagaagagtactacaagaaatggagacattatcatgattaa

SEQ ID NO: 283 - DNA, 657 bp, Methanobrevibacter ruminantium
  source 1..657: mol_type = genomic DNA
atgattaatgaaaggataagaccttatttgaattttagcttcaatgacaagaaagtcattttcgtcacattgttcgttgtgagcaatctgataagcaacctgttagccatcaaggttttcaacttgggattttggggattgacaaccgattgcggaaatctcctgttcccgttaggataccttatggcagacgtgattacagaagtctatggagagaggacagctcgaagggtcatattgcttgggctctttgcaaacatattgctgattgtggctaccacattgactgtctacatgccgtatccaagctattggacaggacagggagcgtatgcctacatgttcggattcactcctagaatcgtgcttgcagggttcatagcatacttggtgggacagttcgtgaatgcgagacttatggtgctcatcaagaaatggaccaacagcaagtacctgttcatgaggacaatcggatctacacttggaggggagctttgtgatagttgcatatgcagcagcattgcttattacggtattgtgcctaactctggcatattgctatttattcttatgcagtatgttgttaaggttacttgggaagtggtgatgcagcctctgacatacaagtcaatcgcttgggctagaaaagacggatag

SEQ ID NO: 284 - DNA, 591 bp, Methanobrevibacter ruminantium
  source 1..591: mol_type = genomic DNA
atggcaatgcccgaaccttgggaaaggcaaagggacgagaacggaaagcttgagccaataaaggcattcgagtacttcaccgagtacctgacaatggacaagccacgaagcatgagggttctgtgcgagaggctcggcaagaaagatgggtatattaggcaacttcatgcctactcatccacatggaactgggtcgaaagggcagaggcatacgatgaacacataatattgaagaaacggttaaggaaagagaagttttacgatgaacttgtcgaatccgagcttcccaatttaaggaaacggctcgaatactacaacaagaatatgaatgacatcgaaaccgacatgacaaccaagcccacaagcaaggctcatgcctatgacaagaacagcaaggcgcacagcacaaccctgaatgaaatattgctgatgatcggcaagcctaccgaaatcaaggaaaccagccttgaagcagacattgaaagcgacaacaagattgatttggagaacagggtcgaggtagacattacaagcgacgagttcatggaaagcgaattggaatacatgagaaagatgattgaagaaaagtga

SEQ ID NO: 285 - DNA, 1476 bp, Methanobrevibacter ruminantium
  source 1..1476: mol_type = genomic DNA
atgacagctgcaagcagggtgaatgctcacggaacaatgggtcttggaagatggagcatttacataaacaacggattctggaagcctagggactttgatgtcctgataatagagcttctgcaatatgcaattcagggacgggtgagcggcatattgctgggagttccctcaaggcacggaaagtccacacttatcagtaagaacttttgcagctattttttatcatatttccctaatgagcaggtcatcctttcaagctattcgcaaggattggcaagtgagttcggaggacaggtgaaggacattgtcaatcattacggctacctttcaccgtacaagccgaccatcaggtctgatagtaaggctaaaaacaagttcaagctcaatgagccttatcgtggacagatgttgagtgcaggtgctggcggttcaatcatgggatacggtgcaggtctccttattgtcgatgaccctatcaagaacgtcgctgaagccgaatccaaggtacgtcaggcaaagctcaaggactggtggggaggaaccatcaagtcaagggtccagaggagaagcaacggacttcctcctatcaagattgtcattgcacaaagacttcatttaaaggatttgcatggaatcataaaggagacagagccgacaatacctgcaaatgacgcattcaggattttaaggaacggaggctcaatcgaccctaacacatgggttgacttcaaccttcctgcaatctgcgacagcgaggacgatattcttggaagaaagataggtgaagtgctttgggaagagcagagagactatgaatggctcatggctgaaaagagaagcatgggctcatatctctttaatagtatctatcaaggacagcctgtagagcgtgatggtgagatatttaaaagagaatggtttcaggatgaggtcaatcacaagctcacatgcctcattgaccctaaggacattccgaaggacttgcctcagctcagatattgggatttcggtgcaagcggagacgctggtgacggaacctctgcaatcttgactagctatgatggagaatatctgtatgttctggatcttgttgcaggaaagttttcaagtcttaaagtattgaaaacatttaagagactttgtaaaaaggacggaaaacaaactcgtgtaatggtcgagcaggagcctggaagtggctcaaaactattgattaagaagtttaggagagaagaggatttaagaggatacaatattcgtgcagataaggttcaggtcagtaaaaaagtcagggcttttgaccttgaaggtcttgcagaggacaggagaatcaagatggttccagcccattggaacaataagttgattgaccagttggtggcatttacaggtgaagatggtggagaggatgatatagtggatactattactggctcttgcaggttctggacaagacctagaagaagagttaaagcgtga

SEQ ID NO: 286 - DNA, 1326 bp, Methanobrevibacter ruminantium
  source 1..1326: mol_type = genomic DNA
atgagtaagaaacaagaaatgatgagaattgaaaggttaaaacactatgcatatcaaacaggactaataatccctatttttaaaaatcatgatttaattaaaaaaatagaaaatggaaaaataactaatactgacgaaataaagatatatattgaggaaaatgaaaagcagataaaaagaagaagagaatttataagtattatttatgataattgcaaatattttaaatacgacagcatatgttataaattaatatccaaagtaaataattttgaaataaagagcctagaagaattaatgaatgaaatagaaagtgaaaaaaagaaaaatggttttagaaagaacatagaagaaaaagaattaataaaagaaaatgaaaataaaggaaggctaaaagaatatgtgagaattgttaggagagaatatggcttagattttacatcagtaaagaaattaaaattaaaaatcgataataataaaataagaagcaaagaagaattaaatgaagaaataattgaagaaaaaaagaaaactgaattgaggagaattgtttatgatagtgacttaaattgggacttaaaatgggaattagaatccaaaataagacataacgaaataacaactaaagaagaattaataaaagaaataagaagaatagaatttataaatattatttatgataataacagagattttaaattagactatgtcacaatacaaaaattagtatcaaaaataggaagtaacgaaataacaactaaagaggaattaataaaagaaatgactgaagaaaaaaagaaaggcatagaaagaagaacggaatataagaaaattgttaatgaagcgcatgccttagataatacatcacaatggaaattagaattaaaaatcaataatgatgaaataagaaacaaagaagaattaatgaatgaaatagaaagtgaaaaaaagaaaactgaattgaggagaattgttaatgatagtgacttaaatgatacctcacaaagaaaattattatcgaaaatagatgaggatattgaagtaataactaaagaaaaattaaaaaaagaaatacaaaaagaagaaagaataatagaatataagaaaattgttaatgaagcgcatgccttagataatacatcacaatggaaattagaattaaaaatcaataatgatgaaataagaaacaaagaagaattaatgaatgaaatagaaagtgaaaaaaagaaaactgaattgagaagaaaatcagaagaaataataagaagaaaaaaagagcggagcgactcatatcatccaaatgctaataaaccatggaaattttaa

SEQ ID NO: 287 - DNA, 1659 bp, Methanobrevibacter ruminantium
  source 1..1659: mol_type = genomic DNA
ttgagtaagaatgctaaagcagacgcctttgttgtgaccactgaagacggatcctatgacattgtcgatgcagatgtcttggagaggtatgcaataaagagcgaatctgacgagacaggaagcaagcagttgaagactgatggttgggaatatgatgatacattgcttgagccgttgtatgacccattgcagttgtgtgagctattggagataaacacatatcatgagaactgtgtcgatgttgttgcaagggacagtgcaggaataggatatgacatagttccagttactggagagaaagaaaaggaacttaacaagccaaaattgaccaattttctagaaaacatcgagcctaatatcaatgaattgctgtaccaaatgaactatgacagaagggctactggctacggagccttggaattaatcagaaaagataaatcgaaatcagagcctgttaacctatcccatatatcttcttacactttaagaaggacaagtgatgggaaaagagtaaagcagagagtgggaacaaagacagtatggtttgtaatctatggaaagaactatgacaaggaaggcaatctgtgcgatgtacactctgagacaggagagttccacccttacaattccttaagcaaggaagaaagggcaaacgagctgttgtggactatggaatacaccacaaaaagcaagtactacggattgcctaagatagtgggtgcaattccagccatttatagcgacataagccgttccaagtacaataccagcttcttcaagaactacggaatgccatcattcgcagtcttggtaagtggagacttcgtggactatggccaggaggagttccttgaggacggaacaaagaatcctgaatatgacgttacaaagactctgaagtggaagatttcacagcaattgaagcaggcaataaagaaccctcacagtgcagtaacaatccttgtcccatctgagggagaggaaggtaatgtggagattgaactgaagccgctgagtgtcgagaccaaggaggcgagcttcagactcttcaggcaggataacagggatgaagtaatccatgcacacagggttcctccatacaaggtcggaataaacgagacaggcagtttgggtggaagcaatatagagggagccaccataaactacaagaacgatgtggtgctaccaatcagattcaacgatgagtttctaattaaccaagtgataaagaatgactttaagataaaggactggagattcaagataacggaacatgacacaagggactacaccacagacattgcaataatcaaggaactgttccttatggcttcaatcactccaaggcagatcatcgagaacattggcgaaaggttcggtctgacagcttcagacaatccttttttagatgaatactacttgaacaatgttcctttggagaatgtatggaatggcggtgatgtgccgatggaagcggagacagttcttgacagcttggagaatgacttgatgaaggacgcaggtgttatggatgaacagcttagagagaagagacagactcgtgatgatggcgctcaaggtgcgtcattcaaagaggcagattcagaatatcaagagagaatacagaaggcgtttgatactcgaagagcagtgcagtag

SEQ ID NO: 288 - DNA, 2328 bp, Methanobrevibacter ruminantium
  source 1..2328: mol_type = genomic DNA
atgatggcgctcaaggtgcgtcattcaaagaggcagattcagaatatcaagagagaatacagaaggcgtttgatactcgaagagcagtgcagtagggagattgcggacttcttcagaaggcttgagaggaaaatccacaaggtcatggatgagcactgggaaagcgaattgggtcttttccatctgaacaaggtttcagacatcatacaggacagcaggcaggagtactatgacatcctgttcaagtactgcaaggactcctacatgaagggaagggaagctaccgaaaggagattcaacagaaaactggaaaacattagcatgaaggcagatgtcaacatcacaagacttgaggacctgttcaagcccgaccctactataaggtacaatctcaacaataaggtctttcaggcttcagcccatacaatggacagggtcgacaataggataatggagaacataacccaaagctatgatgacggattaggcattgatgaggctaaggacaggctgaccgtcgagtacaatggattgaagtcttgggaggcacagaggattgcaaggaccgaaatcaattcagcccagaatgacggtgcctttgacgtctatggagagcttggagttgagtaccatcagtggtggactgcccaggacgaaagagtcagggagacaccgcaggcagaccacagggaacttcacggcaagatagtgaaggtgggcaactcgttcagcaacgggcttcagtatcctggagacaggacaggcaggatagttcactggataaactgccgttgcacaacccttccgttcctcatgcctctcggaaagatggctcctccaggaatgattgagttcaccgaagaggacctgattgacattcctaacttcgagatgcctacaatagatgacctgatgaggagatacgaagctgttgaacccaaatcccagtggatacttgatgactttgaggatttgatcaacctcaatgaagatgaggaaagaaggcttgctgaaatacaggaaatctttaagaggaatgctagagacaatgttcctccatcatatattgtccaaaggcagtatgacgaattcatgcttagaaagaactttgcagagaatcttagaatgcttaaaagaggacagaatccgttcctcaacgagtctgaaaagcagatgttcataaaggattacagcaggttcctaaagcagtacgaaaacgagataagaatgaacaaggaacttcagaaaatgtatccgaaggagttttcaaaggttgcaaaggatgtcgacctgcaattctacagggagaactacaacaatcagttcagcatttaccatcctgatgacatcaggtcatttgaagtaacctccaaaaccttgacttctgaggagagggctaggctgaaggaaatcgagaagctctatcctaaggaatccaagagaatcgcaaaggaaatggacttgaagtattatgagaaaagacatcctgaaagatttggcaggttcatggaggaagaggaaaggaagaggctggcaaaaattgagaggatgtatcctaaggaaacctccaagatggcaaatgaatttgctcctagagatgtcagcaggctgagaaccaaggaggacattgacctgtacgagaaaaacttcatcatgaacaagtcatacaggaagaaagccgatgagattgtgaacggcaatggcatgacaataacaagaaatgtgaagtatgacctgaagggaagatacgaggactacatcaacataactgacgatacgttcgatgttttgaggttcaaggactacaattgcgaaatctggatcagcagcaaaagcgaagtgtccacagtcgaaatcatgcaaactcttgacaagattcctagaaagctcatgaaccaaaaccacaacagaataatattctctgctgacagggatgtctataatctcaagaagaaccatttcgtcggaggagttacaaagagaaaggacaatgaaattgtgatcttcaaatgcaaggaaggaatcctttcacaaaccaaaacccttgctcatgaacttggacatgcttgggacaacaatctgagcaagattgccaatagaggaggagcctactataaggttgccgaagaggaaggaggatttgtaacctcatatgcaagaaagggctttgaagtcttcaagacccattacagcgaagactttgcggaagcaatggaactgtatgtaacaagccctgaaaaactgaggagaaaattcccaaaaagatatgagttcataaagaacatgatggaagacgatttgttcgttttggggctcatcccttattga

SEQ ID NO: 289 - DNA, 264 bp, Methanobrevibacter ruminantium
  source 1..264: mol_type = genomic DNA
atgataattgaaattcctggaaatgacaggacagaagaaataaatttgccgaacggacagtttgtactgataacctacttgcaggaaaatgacatgatgtcattgcctgacgggaagtatgtctgcccattcagaatgattcagcttttcactgaagagggcggtgaactgattggagagtgcattgaggaaaatcctcactacaacactcgcttctacaatactgtctttgagcatttggatgaaggaattgagtacagataa

SEQ ID NO: 290 - DNA, 540 bp, Methanobrevibacter ruminantium
  source 1..540: mol_type = genomic DNA
atgttaagagtcgtagagagaacctattatcaacaagaagaaatcaagacactagactgtcgaattagagaggcaggagtcaacacttactcccttgctcgtcaaggagcagttgactatcctacctacgaatcctacaacgaggtgagagaggaaaggataaaagaggctaaggaaaaatacggtgaatcctactactatcactggagagacgttgagacctacttctattacttaggaagattctttagtgatttggaggaaatcgagaagtacttagaaaggactgttacctataagcctcacagagaagaacttaaagaagcaatggaaaggttagacaaaagattcgaggaagtcatcaacgagttctggtattctcttgaggaatacgaggatataaccgaggatgtacttgagcagttgaaagaaggtgattgcaccgttcattgcgaattccttataaaagagtttaagaaattcgtcaatgtcatatgcagaatcataaaacaaaacgagattaaccataaggagttttaa

SEQ ID NO: 291 - DNA, 291 bp, Methanobrevibacter ruminantium
  source 1..291: mol_type = genomic DNA
atggacgcgataaacgttatcaaccaaaacaagatattagtagatgttttgtaccgtgggactgtaaacctgattgacatcgtcatcggtgatgcattggtctatgacaatccgacagttgtagtcaagtgctacaccacagatttggcttttgcaaccacagagattgatgagattgtattagagaacgaagaatttgagttattaataacttacgaggacggagagttctcaattttgttgaagtcccacaatcttggggaattaggatacattgaatgggtaatttag

SEQ ID NO: 292 - DNA, 330 bp, Methanobrevibacter ruminantium
  source 1..330: mol_type = genomic DNA
atgggtaatttaggtggttttcgtatggtttttgtcgatttgtgcgagaacgaaatagcagacatggtcgagagcttctatcgcaatggagacggtagcagcaggatattgaccaacagagcagttggagagatagtggagcactactgttcctttgaagtagacggtagaatcaccactaatctccgagatttcctattatatagtgttgtcttatatgacaccattggagaggctgtcgatgacggagtcaaccttgaggaagtgttcatcatagaagacaggaactgctacacagggaagtctcaagtcatattgattggagggtga

SEQ ID NO: 293 - DNA, 567 bp, Methanobrevibacter ruminantium
  source 1..567: mol_type = genomic DNA
gtgagaaaagtggtgaattggttgaaggctattggagataacttctcagtggattatctccttttagcattattctctagtggagatttgatattggttgccatcgttctcaattcttatggtgtcatctcacctgagaatgtaagggaactggtgattgactatataagttacaggaaagttgatattttttggagacatctaaggagacctagaatgagttttgaagattatgtcttagacaattttgaagagatggaaactggtgaactcaccagagagcaggttgttgaatttgtctctcgacaagagaggaaaggactcaccttctgcaatgagatcttcattgctgtgcctttgaagaaggggagcaaggacgatatcgttgagatattgtggaatgagtattttgtggaggactataaggagaactggttagagcaacacgagaatcttggttggaatgactggaagaaacttttgaagaaagagatagttgagaatggtggcgatgacttccaaatctttaggaatcacctgattgactgtgtcttaatggagtattga

SEQ ID NO: 294 - DNA, 192 bp, Methanobrevibacter ruminantium
  source 1..192: mol_type = genomic DNA
atgacaatgaaagttacttttgaagatgagaacggtgagagaacagtcgagttcggcgatgacgtcgatttcgttttaatcgaaagcgatgatgacggaaacattgagattcgcgaaggagactgggaattggacggagattccgacgatgattgggaagagtacgatgactgggacgaggaggagttctga

SEQ ID NO: 295 - DNA, 282 bp, Methanobrevibacter ruminantium
  source 1..282: mol_type = genomic DNA
gtggacgaattcgttgagaccctgttcgacacctactggaaggtgaatgagaacggagagtacatgagccttaccgattgcggtgatttctacatcgcaaaggttgctccctgtgttcgcaactggagcatagtgatagaatgcaattgcttctgttttcattgcaaggaatttgtctaccatgagaacggagcaatacttgagataggtatggagattagctctctttacctaagccaaatggagataaaagatttgaagatatacatgatagattgttag

SEQ ID NO: 296 - DNA, 372 bp, Methanobrevibacter ruminantium
  source 1..372: mol_type = genomic DNA
atgggattagacatgtttttggaaggaatatttgaacaagacggagagaatgtaagagaacaggtgatttactggagaaagtccaatcaggtacacaactggttcgtagtcaacgctcaggacggagaggacaactgccaaccacactcagtaagcagagaacagttagaggaactaagagacctatgcagagcagtgctcgcagacaatgacaaggcagaggaacttctcccaacaagacctggtttcttctttggtgcgatagactatgacgaatggtactactacgatttgcagtacaccgtcgagaaaatagacgaagtgcttaaagacgacagatacctgtactttgagtattgcagttggtggtag

SEQ ID NO: 297 - DNA, 198 bp, Methanobrevibacter ruminantium
  source 1..198: mol_type = genomic DNA
atggaatgcccttgcgataattgtgagatgttaagagagaacgaaccaatcaaggtgattgactggaagtccaattctccatttggaatggatttgtatcactttgaggacggcttcagatgttgctataatggtgaggaaagcttgagaaaagaggatctaagcaatcatggttgcagattaagaggaggaatttag

SEQ ID NO: 298 - DNA, 351 bp, Methanobrevibacter ruminantium
  source 1..351: mol_type = genomic DNA
atggaactgatgactagggaaatggaagggaaactcaaatccttccctttctattcccaagacggaaaaggagatgacgcgatagtggtgatgaagttcttcaacccttacggattgggaacttggtatgtattggaggcagagaaacaggagaatggtgattaccttttcttcggatatgttgaatcaccgataacacctgaattcaacgagtacggttacttctcattgtctgagttggagaaccttaagataccaataaaaatcaatggaataaccgtgtcctacggtaggattgaaagggatttgtactttgaaagggtgagaattggagacataataggaaattag

SEQ ID NO: 299 - DNA, 225 bp, Methanobrevibacter ruminantium
  source 1..225: mol_type = genomic DNA
atgttcggacagaagaaagaatttgtcaaaaagatgtatcatgtcggagacgttgtcgaactggttcatatggacgatgcacaggctccacctagtggaaccagaggagaaatactcttcgtagacgatattggtcaaatccatgtgagatgggagaacggctcaggtctggcactaatatatggtgaggacaggttcaaagttgtagagaggaaaggagaatag

SEQ ID NO: 300 - DNA, 153 bp, Methanobrevibacter ruminantium
  source 1..153: mol_type = genomic DNA
atggatttgttgtatctttatgatgacctgactgcaaggagagaagtctacgattcagtcggattgagttttgtggtcaagtataaattctcatctcgtaaggaagcacaggatttcgcattgaagtacggtgcagaactgattgaggaatga

SEQ ID NO: 301 - DNA, 189 bp, Methanobrevibacter ruminantium
  source 1..189: mol_type = genomic DNA
atgattgaacggaggagattaggaatgaagtacgatatttttactatcttggatgaaatttcaaggaagttagatgacggtgaattatccgatgagcaggttgatttcctgttgcagatggagattctagtagaggaaggcactatcacagacgagcaggcacaagatgtcatgaatggagattattaa

SEQ ID NO: 302 - DNA, 168 bp, Methanobrevibacter ruminantium
  source 1..168: mol_type = genomic DNA
atgatgaaattaagtttgaaggaactcggtgaggaaattgagatgatacttgcagaaggtggattaacctttgatcaagtcgattatctgttgtacttggagacctgcattgcagacggaagcataacagaggagcagaagagagaaattatctgtagggacttctaa

SEQ ID NO: 303 - DNA, 207 bp, Methanobrevibacter ruminantium
  source 1..207: mol_type = genomic DNA
atgtatttggaaattgacgaggtcaagtgcgaaaacattgacagaattgagtttgacgatgtcgcaatggaaatcgtcctgacagacgaaaaggtgtacgagagaataaagagatggctcaagtccaatgagattgactacgattgcagggaagaccggtatttcgccaatctcatagaatatgtcattaggataacttggtggtaa

SEQ ID NO: 304 - DNA, 249 bp, Methanobrevibacter ruminantium
  source 1..249: mol_type = genomic DNA
atgtcggattcaccattgaggaacggttcttccttactgctcaggaattggagtattccgaagtgggagaggaacacgagagcgtcattgacagagccatcgcattgctgtacacgaagctcagaaccagagacttcgagttcaccgacgaagaacgggaactcttggaggatgcttttgtcattgtcagcgaccaatagagcacaggtgtttttagagggactttacgaagttcctctttttttatga

SEQ ID NO: 305 - DNA, 1353 bp, Methanobrevibacter ruminantium
  source 1..1353: mol_type = genomic DNA
atggctaaagaaaatgttatagattataagattgagcgacaaaatgataacacttggagttatttatatgtaactgaaagagggagaggaaatatcattgcttcatcttttggagaattgaggcagaaagttttaaaaagaggtttgccttggaatgatatatctaacctattcactaaaaagagttctgattctaatgttcgtcgcgaatctgtaaagaatattgatgatgaatctgttttggctgatgtcgctaaaaagagttctgattctaatgttcgccttgaagcagttaggaagattagtgataattacgttttaattgatattgttaaaaatgcttctgattatgatgttcgtcgtgaagctgtaaggaagataaatgactcatctgttttagaagatattgctaaaaataataatgatgagaatgtccgtcttgaagctgtaaggaatattaatgatgaatctgttttagagaatatatctaaaaatgcttccgattctaaagttcgtattgaagctattaagaagattaatgatgagactattataatcaaacttgcaaaaaataataatgatgaggatgtgcgtattgaagctgtaaggaagataaatgataagactgttataatcgattttgctaaaaatgcttccgattctaaagttcgtcgtgaagctgtaaggaagataaatgactcatctgttttagcttatgttcttaaaaatgaccctagttggatagttcgtattgaagctgtaaggaagataaatgataagtctgttttagctaatattgctaaaaaggataataatccgtctgtccgtcttgaagctgtaaggaaaattagcgatgaatctgttttaataagtgttgctaaaaatgattctgattattttgttcgtcttgaagctgtaaagaagattaatgataagtctgttttagaggatattgctaagaatgatattaattccactattcgacgtgaaactattaagaagattactgatgaatctgttttaataagtgttgctaaaaatgattctgattattttgttcgtcttgaagctgtaaagaaaattagcgacgcgtatattctaaaggatattgttaaaaatgcttttgattctgatgtacgtattatgtctattaatgagattactgatgagactgttttagttaatcttgataaaattgatccaaatttgagattagttcgtgactctctaaagaagaaaaatagaagaatacataaatttaggactttggaagaatgggaagaatattactatgataagaaggtgccaaaacattggataactcctcggtggcattacggattagatgattaa

SEQ ID NO: 306 - DNA, 696 bp, Methanobrevibacter ruminantium
  source 1..696: mol_type = genomic DNA
atggtagtcaaatgtcctaattgttttagtccacgtgtttcaaaatgtgaagatactaatattaaatggcaatgtgataaatgcaaatgcaaatttaaccatggtgctttcgatattaatgctgaaatggagaaagtagaacaattaacaatagaaaaaattgaaagagaacgagaaagaactgaacaatttgaaagagctattaaagaagcaaaggaacaatttgaaagagaaagaactgaacaatttgaaagagaaagaaaggaaagactagaaagagaaaagagagaaaaagaaagagaaaagatagaaaaagaaagagaaagaaaggaaagactagaaagaaataggattaaaatagaagaaagagaaagagaaagaataaaaagaaatgaaagaattagaagagagaatgaaagaaataggattaaaagtgataagagagaaagagaaaagagtgaagaaaaaagaataaaaaggaatgaaagaattaggaaagcaaatgaaagaaatagtattaaaagagaaaagagagaaagagaaagagaaagaaacgtgatgactattgatgaatattacaggtcaataggatacgggtcaacaggaaaaagtaaggtatggtcagcaattattattccaatattattggttatatgtattatattgattttaatgttttatggaggaggaatgtga

SEQ ID NO: 307 - DNA, 1044 bp, Methanobrevibacter ruminantium
  source 1..1044: mol_type = genomic DNA
gtgattaatattttagaggttgttaccaaatcaagagattccttgcttattactgctccagtactgattccaggtgaaagggattgtgagtttgactacggagaggagccgttgaccgagggtcagataaggcagattgcacatgagtatctggcaaattacagccttgtcgacaagaaccatgagttcttcgagaccagagaagttataggagttcctgtggagtcatatataacaaacgagcctataagcctcaagggcttggacggaacagtcaatgagtatccaaaaggaacctggatagccaccacaaggataactgatgaagaggagatggaaaaggcactcaatggagagtacactggatacagcataacaactgtgagcaagaagttcgcagacaagcagatccagctgcctagaagagtcctgatgaaagacatcaaggacccagtgggtttcaccataagccttgtcaggaagccttgcgtaagaggagctaaattttgcagtatgaaagaagatatagagaacggtgatgttgtgagcgaaaatatagacgataagttggaagaggaaaccaaaggtttcgtgcagtccatcaagggaatcttcaacaaggaagataaggatgaagacaagaatcctgaagatgaggatatcgaattggacatcaaagccattgtggatgaggtaaccaaggatttcgtaaacaccgacgatttcgagacattcaagaatgagttggaaaaggctttgagcgacaagttcgagactcttggagcagaacttttcaagtccttgaagaaatccttggagaaggacaaggctgaagaagccaaaaatcaggaagatgacgaaagcgatgaggatgatgatgaggaagaggcaaaggacaatggagaggcacagaacgtccagtccagcaaatccattccgaatcatgacatcaaggacaaccagaaggttgcaaagaccggagccgcacgtgtctatgaaatcatgggcagggacaacacaggctctgcagtcaggaaattataa

SEQ ID NO: 308 - DNA, 1038 bp, Methanobrevibacter ruminantium
  source 1..1038: mol_type = genomic DNA
atgggaaacgaagctactttaaaccaattggtaaacgagcaggaaaaggcagtcttcaagtccatgaggactgacatggagacaggaaaggctgtattgaacgtcgagcagctaggttacttccttagagaagcaacattagacaatacaattttaagagatgcggacttcaagctgatgaaatcattcaagaagcatctcaacagggtaggaataaacggaagggtcctcacaaacggatatgacgtgaacggcgagaccgaccctgagattcctgcggctgacgtcgacttcggagcaaacgagttggacgtcaagaagctcaaggcaatgtgcgaaatcgaggatgacgagaaggaggacaacatgacacaagcccagttcgagcagacccttctccagatgatgggagaaaggattggagaggacttggaatactgggcattgtttgctgacagcgaagttgcaagaagcgacgaccctcttctcaacacaaatgacggatggctcaagaaatgcgcaaaccacatatccagcaggtcaatagctcctagcaatggaatgtttgacattgaggacggtcctgaagcgatgttcgacgcaatgatcaaggcattgcctccaagattcaggaaaaacaggagaatgctcaagttctatgttccttttgaagtcgaggacgcatacaggaacatcctcataaacaggggaactggcttgggtgattccgcacagatagggttcaacgccttgtcctacaagggaatacctatcgagcactgctccaccttggacgatgaggacggaaggggaatgctcggcaacagagtatgttccatgctcacaaaccctaagaacttggcttacggaatatggaagaatctttctgtagagcctgaaaggattgccaagaacgagctcacaagatactggttccgtatccgcggcgatgtggactactacttccgtaacggagcagttgtaagcgtaatgaattcaagcgatgcggaggcgttgcctgaactctccagagcataa

SEQ ID NO: 309 - DNA, 405 bp, Methanobrevibacter ruminantium
  source 1..405: mol_type = genomic DNA
atgatttcgcatatcattgtgcttctcatttgctttataggattggttgaggcgatactgatggcattggttgattgggaggacttggcaatatccgttcgcaagtctcctagaaagctttataatgttttgaaggatgagttaggtcttcctgaatggaacgaactgtctgtgattgaaaggagaagcatgaagaaaaggtatgctgtcataagagattcctttcctgagttgcctccatgggaagaactttccgtcatagacaggagaagccacaagagactctacaaacttatcaaatcagtttatgatggagactatgatgacagtccaagcttggaaggtccaccagcagcagtcggtcctcagaaggagattccattggaagaggcagagtatccttga

SEQ ID NO: 310 - DNA, 414 bp, Methanobrevibacter ruminantium
  source 1..414: mol_type = genomic DNA
atgacttggattggtacggaagatgtcatcgagttcacaggagtcaagcctcagacattcaggttcgagaagggagacacctccagcctggaaacattgcttgagaagtggattctgcaggcagaaggacttataatatcctactgcaactacgatttcaatgacttggaggagatacctccagcagttgttaatgtctgccttaggctcactgcaaacatggtcgcattggcacaggcaaggaaggacactcctgtaattcaggtcaaggaatggaacgtgcagactgtcagttccaacatattctcaaatgacttgaaaagggacttgacccctttcgtgcatgaaaggaaaagctacaaaggagacgagattgacttcttcgtcatcactggagatgatgactcttggtga

SEQ ID NO: 311 - DNA, 444 bp, Methanobrevibacter ruminantium
  source 1..444: mol_type = genomic DNA
gtgaaattgcagattgacgttgaggaactcaagccattggagccaaggttcaaaaaggttgccaaaaggacagttgtgttgactgcaaatgaattgcagagaaacctcaagaagttgagtcctgtggatcatggaaggcttcagggctcttgggtaatcttccagacaggagaattggaaaggactgtgaaaagcagtgcaaagtatgccattttcgtgaatgacggaacaggactgtacggtcctttgggtcataagataagacctaagaacggaaagttcttagcctttacaccaaacaaaggaaagttcaagggaaagcttgttgtggttccatggactagaggacagaagcctcagaggtttgttgagagaagcatggaaatgactgaaaggagagtgcaggaattcatgataagggcaatgatggagatggactcatga

SEQ ID NO: 312 - DNA, 510 bp, Methanobrevibacter ruminantium
  source 1..510: mol_type = genomic DNA
atgagattcgtaaatactgcttcgcttgttcctcagactgtcaaggcatatcttgaaagggaaatctgcgaaggagggttgcttgaggatgtagagacactcattccgtccgtgaacagcgacgttcctgttgacccacctgcgatatggatagtccagcaccccactaccagatggtctggcagtcagccaaatctctcaaacaagatagctatgtcagtccctttcgagttcgtatgcgtggaatacagcgatgacttggaagaggctgagatattgggaataagcctagccagcagggttggctcaagcctgatgaagaacttcaacaaggtgaaagttgatgattccatgccgaacaggttcttccacaagctggagttcgagacattgtatccggtaggagaggtaacggttgtgggaaagagcgaaaggatacctgcaaccagcatcatttttaatttcgtttatgttgttgattggttgaaatgtaatagaagatatgattaa

SEQ ID NO: 313 - DNA, 1281 bp, Methanobrevibacter ruminantium
  source 1..1281: mol_type = genomic DNA
atgggaattcgtgttgtaggaatgaaggaagaggcaaggtatggagttgcggagtcagcgccggacttccatcaggaagttagcaaggcaaaggcttccttgaactccactccgaacacaaagtcaagcggctcaaggatgaagaagaaggcacgtgcaggcgtgtacaagcctactgccaacatcgaaggtgaagttgacttgaagaggataggacattatctcaaggctttcctggacaattaccattttactgacggaggctccaatccaaacgtccatgagttctggggcggagagaacaataaattgtcaagcttcactctttgggtaacttttgacatatttgagaagaccatcgttggctcattgcttgacaacttcaagatggaggtgagcgacgagtacatgaagttcaccgctgactttgtctacaagacagaggaaagcgatgagattgagaacattgagctctataaggtgaagcttcttgacggcgattgggcattgatgttctatgacgtttccgttgagatagacgagaacgctcctccaggaattgtttcaagtttcagttttgacggaaagaacaacatcaatgtggacaagactatcggcttaggaagcagaggtccgcagaggaaggctgctgctcaaggaagggacatatccatttcctttgtctccactttggaaagggagaccttggagctgattcaaaaggctgaatacggagaggtaggcacagaaccgtctgaatgtaagttgtgcaagattccattgaagctcatctgcaatgtctgtgaggacacaaccgacaggcttgagatcactttccctgaatgtatctttgctgtggactatgagttgagcgaggctgacgagattgaggttaccttcaacttggacgccatgggaacaggatatgccacaaagttggacggaacccgcgtattgactgacatgtattgcaggcttgtgaatgaccagcctgagataaagagcggagagggtgttacaagcgccaccgtaaggctcactgtcaaggacgataataatcagcctgtggcaagcaatgcagtaactattgtgaatagagttactgatgagagctatgaggcgaccacaggcagtgcaggaggctgctccttcaatgatgtggagcctggaaggtatgatgtcatcgttgaaggatatgatgttgttgcaggaagcataatctctgtcaatgacgatgaggaaagctttgacattactgtagaggaaattgaagaggattag

SEQ ID NO: 314 - DNA, 441 bp, Methanobrevibacter ruminantium
  source 1..441: mol_type = genomic DNA
atggttgtagttaagaaatccgatattttaaagggcgtaaaaaagattgaaaaggtgaagattgaggctttggacggagacgagatgtacttgagaccgttgtcccaagccgagatcaacgaggtcgacgagattgaggcaaaggctatgggaatcttcgagaccaacgagaccgcacacaggggaagaaggcagaagcctaagagtgtggttgagagcaaaggaaagataaatctcgaattgcagcagaaggcacagcaccaagccaagaccaaggcaatcttcttatctttagataatgagaagaatgtgggagaggaggcttggtccgaaaccgagattgagcaaatgcctcacaaactatttgaggaacttttcaatcatgtgaaaaggttgagtggaatagaactcgatgaggatgacgtggatacctttcattaa

SEQ ID NO: 315 - DNA, 3300 bp, Methanobrevibacter ruminantium
  source 1..3300: mol_type = genomic DNA
ttgccgtcaagcaatgtaatgaacataatagtcaaggcagaggacatggcatcatctgtcgcccaaaaggttgaaaacagcttcaggaaattgggaaacacaatagacagcaccttcaccacatctctttcaaacaccaagttcaatcaggaactcacttcttttggaacagacttggacaaggtaacccaaaggctgaagcaggtaggcgtgaacggtcagtccagcttcaaccagcttacaaatgctgaaaggagaaccttggaaaagctgagcgaatttgatccagtatcagcacaggttcttcagcatctgtcaagaatcggaatcaccggtcagcagacattcaaccaattgtcggtttccgagcagaagtcattgatgaacatgaagtcaaccgctcagcagctggaggaagtaaattccaagctgagagttgtgggaatcggtgcggctcaggcagcgaacatgctgaaccagatgaagcttgacccaagcgttggctccaatctggacagggctaagctgaaggtttccgagatgggctattcccttgacagcacaaaagggaagatacttgtcttgggcacagcaatccagaccagcttgggcaacaagtgggactcaatcaagaccaaggttcagaccacagccacaaacattaggacagcattgggaaatgcactgacttccgtgaagtcaaaggtccagaacttgggaaatgccttcagcggtcttggaggaataatatcctctgcaatcggtgcgataggaatggcttccatctcacagctgactgttggcttggctatgaaccgtgagaggatgactgccttgacaaacgccacaatgggaggcgctaaggcaggagatcagctgctcaacggattcacaggcgtgaacaaggtcttcaaggacttgaatggaaactcaacaaactacttcatgggtcttgacgagatgactaaccacagccttgtctcattggacgatttgggacaggctatgtcaacaatcaagatgtccacaggaatgagcaatgaggaattgatgatgttctcaagcaccgtgaacgatgttggacagagagccattttgatgggaaagagcggtgaggaggcgatttccctcatgcaagcggcaggaagaggtctgaacggcgagtttgacatgctgaagacaaacttcggaatcaccaaggacacccttactgaccttggatggagtggtgccgctgacgatgtcaagggctatcaggaggcattggacaaggctcttgagaagggtggagacatggacggaatgctcgacaccacaacaggacaccttgagacattgaagaagaacttccgtgttgcaggaaggcatgtgggagagatgttcactccatacatagacatggcagtccagaaactgaatggcttgaaggagacatgtcctggcttgtttgagaaccttgtcatgatagcgggtgcagtgagcggatttgccactgtggctccaagcattgctcctatgataagcgtctttggagatgtgggaagtgcgataaagaggacagcaggattcttgggactgatggaggttgcagaggacgcagtaaccttgaagtcaacattcctgacaatagctcagattgcaggcgctgacgcagctgtgcttcagactgccgcaaacagcggtttgactgcaagcttctgggcaatggctgctgcaatcttggctaaccctttgacttgggttgcagttgcacttatagccattgcagtagcagtctatgaggtcggaaagagtttcggatggtggtctgatataggctccatgattggtgctgtttgggcaggaatccaaaggctttggagcgccttcataaacaatcctaacgtgcaaggattcctgaaggacctgtctaacgcatggaatgacatatgcgaggcattggcaccagtcatcgattgggctaggaaggcttgggctgagctgttccctcctagcgccacaggaagctttgacattgtcagggcgataattgacgttttcggacagttgggagacttcttaggcaaggttgtgaatgccgtaaaatctgcttggaacgcattgggaggatttgccggattccttcctatgctgttgggacctgtaggaatggttgtcatggctttgagaatgattgtctgcatacttttaggttgcagtccaggcatagttcctgcattgcagaaaacacagtcagtgttcatgagcgttttcggtgcaattgcagagttcattggaggtgctgtaagcaatgttgtagccattctcacaaggataatatctgcattgacaggaatcttcactcgtgtgagttcaatagtgagcacatatctggctaagatgataagttccgtgatctcttgggcttcatccattgtcagcaaggcaaagagtgcaagttccaagttcctgacaaatgttgtgaattacttcagcaagttgccaagcaaggtctggaaccatctgaagaacatcattcaaaaggttaccagttgggcgacttcaattgtctccaagggaaagaatgctgccagcaagttcctgactgctgtggtgaaccatttcagcaagttgccaggaaaggtcggcacctatgtctccaatactgcaagcaggatttcatccggtgccaacaagtgggtttccaatgctcgaagcaaggcttcaagcacagtgagtgccgttacaggaccaatcagcaagttgccgggaaaggtctacaatgagttcatgggaataggctcacgaatgctgagtgcaggaagcgcacttgtttcaaaggctcgtcagataggaagcaacatagtcagcggactgttgaatgccatgaacattcactctccaggtacaattcagcagaaggttgttgcagaatttgagaacaccctttcacgtgtaggtagcatggattcaactgctcttgatgtcgggcaatccgtaggtaacagcattgtccgtggattcactgatttcggcttggataccggtagcttcaatgcggactattccacagactacaatctcaacaggaaaaatgacgataaccttgacgtgaacataaagcaggaactggaattcgtgtttgacttcaagaatctgcctaatgatgtagatgaggacaagctattggaaatgcttaaggaaatggttaccgacaagagcgtcatacaggctctcgtgagcaatcctgatttccaaagcatggacacaaaggtgaagaacagcataatcgcaaaggtcaagagagcaagaggtgtctag

SEQ ID NO: 316 - DNA, 3039 bp, Methanobrevibacter ruminantium
  source 1..3039: mol_type = genomic DNA
atggcaagtgttacaaaatatccgagcaacgtttcacagaccactggaggaaagttcgtgtccttcagcaatctggcaaacataaagaacaatgctgacggagcgcatgccgtgagcagtgttcttatcaaaagcaagaagcagtctccaaacagaccgtccacagtctcatgcaaaggcttcggattcagccttcctgaaggtgctgaacctactaaaatcacagtaacttataggcataggaagaatgctggaagcgactacagctcaaagaacaagactcacatatgcaacatcggaggacctacaatctcacttttaggagtcagcggattcagcagcaagggaagcgggtgcaccaccactatgaccactcacacaaaggctttcagcgttcatggaaagctctctagagcacaagtaaatagtgcaaattttggagtgaagcttgactatcctaccaacagcaacacctacaacggatacatgaggataagctatgtccgtgttactgtcgagtacatcacaagccagtacagcgtaagcgtcaagcatgtcagcggaacctatgaggatgaggactatgtggtctcattaggcataagcaacaagaacctcacaagctacaaccctacatgcacgctgacggttcctgctggattcacctataagggcgttacaggtgcagccaccggaaccgtaacaaaggtcaacaacaggactttcagctggaaccctcagctgcagggcagggcaggaagcaggcagataagccttgcatttgagcctaatgtaacatttccggaaggcactgactcatattctggaacattcagactgtccgagagccttaacggtgcaaacagtagcctcaatgccgtcatcagcaagagacctgctccttcaggcagcgagactgctggcgaatcgacacaagtcttggagaacgaggacacattaagcggaaacgattcctatctcatcctcaatgtaggcgaggagttccttttctccgtcgagttcactgatgctgagaatgctgtctataatcgcataggcaatggagaggacgattggggaaggattgcattgacattgttcaagcttgtcgacggcagttggatcggaaggagccattacgatgtgtcaacccaattggagtatgacgaatcaattcctgaggaagttgcattggctgaaggcgacaagtggagcctcaataagacattgagcataggtcaggtcggaacatacaggttctccttgagatacgagaacgagcacaaccatgagcttgactatgacatgaggcagttccttgcctatgtcagaccttccgaggaacagttgggcaatccttgcttcactgtcttgaggctgtccgatgaggagtgcgacaggcttggaagcctccacacatacatcgcacaggcatacatgaagcacattacagatgacacacatcctcgggactggtacaggaaccttcgccttggagtgttcaacaatgcaatagccgataacataacagtaacctccgaagaggtcgacggtgaaatcattgaaactgttgaggacagcacagactatgaaagcctcaccaatgaggacatcttcaataatgccgaatactggagcgatgccttggcaaatgtgaatgagttcgacaatctggaatgcgagttcacctacaatgaggactatcctctctgcatcatcatgaccggagactacaatgaggctgatggctatgattatgatgtgggaactgtcgaatacacaaatccttgcatagttgagaaggatgtctacaagcaaagagaacccagcggaaactatcctattcctttggagaatgttctctcaaatgacgattcaagcgaattgggaatagagcagttcaacatcagcactccaataatcctctacactcttcccttcgatgagggctacggcaccaacgaggagatgactataaggggaatcgaggttagcggaacacttgagcagagcgatgagcttacagtgaatgctaagctcaagtctccaactggaataagcggtacaagaagcattatcatcgaggagaatgacctgacccttgacagcacaaacgagttcaggattggagggttcggagacctttggggcttctccacatttgaccttacaaatcttgatgactttgaacttgagctaaccgtgaacaacaatatacatgatactgaggcaaacataaatttccaggacgtgaagataacattctatcttgaattcatacaggaccagaagataaacatcaagataaatgaagaggacctaagcttttatggggttttcaccgatgacgttatcattcctgaagggcttgagacagatactagcttccttacgatagacggcaccgacacaaatgacgcatataggcagaacatcaaggaaaaggagattgagcttattctctacattgcagaatgcgatttccaaagcagcactgacatgctgaggcaactgtcaaaggttctcgtgaatgaaagggatgactataaccgtccgattcccaacaggattgagttctcgcactatcctgacgtctattttgagtatgtgatggagagcgcattgagcgtcgagtcagacatcagcacctacaacataaaggcgaagctcaccattcctagcggaactgccttcagcaagaagacctattccacaggagtagatggctatgttcagggaattgctcctgtcaatcctgtaataacattcaagcctcagagcgacaccgttgaaatccttgaaaggaagagcggacagaggttcaacatgacctacactgctggatgggaaacaatgattgcagagatagactgcgaaagccatactgttgttctgaaaacggatgaggacgattccgagatgactgacataagcggagcatgcgacttcaatgtggactggttcagccttcatggagagtatcagtttgaagggacagggtgcaacataaggacagtaagctacaacgagaggtggtga

SEQ ID NO: 317 - DNA, 3309 bp, Methanobrevibacter ruminantium
  source 1..3309: mol_type = genomic DNA
atgggcatagctattgttgttatggacaatgaggagaacttcctgcaattccttgaccctgatttatgcaccatcaatgagaccatagaggaattgggcttgaggactttggagttcaactacaagtttcaggactatgttgaggacagggatcttttcaggataggtaacaagatctggattagcaattcccagagcttggaggactgcctttatgtgataaacactcctgtggagaacagcgtctatcaggagaactactttgcatgcgagattgaggaggtcttggctgagctatactatgctccattgttcagccagaccgaactgacaagtgccaacggcttcacattgaggaccaccaacggagagcagaccgttgatgtggactggaatgccctgaactactggttcggattgtatttcaatataggtgttgttcaggaatgcttgggaacctatgcgaacaggataactgtaaacggaacaatgaaccgtttgaaccttcttagaagcattgaggagcagactggaaatcgctttgtaacaaggtatgagaaggacttgcttgacaacaccatacatcgctatctggatttcctgaatcctgtgaacgtgagcaagaactggaaattgaacatcgagtacgatttcatctatgaggatgacggtgagtactgtgaggcatacacaagcgatggaaatcctataagcgaaatatatgatgacatcgaggaggaggacgatattgtggacttccctccatcaactccaaggcttaacgttgatcctgaaggcattgagttcaggatagtgaacgaggactttgaggtcatcaacagcgacggaaatgtctatgttgatgacagacagcagactcctcttgtctggagcagtgcgagcgttggctttacaggcgagaacaggcatgtcctaatcacattgtccaaggagaaaagcttcgtggaactgagcgtcaatgggaaaagctttgtgatgttggacaatgcagttggcgatgttgtgagcacaggatttgtgaacccaagcagtgagccggtgcagaggagcagcactgtaatccctgacgattcgtattttgaaatctttgatgtcagcaggaacagggctgtcttccgcacctgcataaacagggagatcgggcatgtgcatgaggaggtgcttgacttcggatacaacttggaggaggtgttctttgagacaaacgaggaggacacattcacagccataagccctgtgctgagccttgatgacgattccgagggtctcaccagagccaatatgaacaccataatcagtaactacactaatctcagcatacctaaggggaagattatcccgatgattcttgaaagggtgaacgtcaaggcaacaacacttgccaatgcaaagtcaagcttgggcacttttgatgtgagcaggaactactattcaagacccgtgcagccgaatgacagcattgacacatcagacagctcaaacaacacttgggagttctggagggcgacagcttactggagagctccgtttgcaaagttcggcggagacttgcacgtggcgaccgatgccgtcctcaagacacagtacactgacatcagcggaaggtccgacaatggagacgaaaggagagttacaagacccaagatgggcatggtggagacaggcgatgaggacgcctatgcaatctacaatgatgtggcattgaagctcaaggagaagatgtatcctgaattcaatgtttccgtggatgttgcaaatctccgaaagggaaggttcaatgactacagcctctacgataaggtttacataaagctacccaactccactgagcttgttaccgctcgcgtgacaaagacagtgaaggacgccaatgacatttcaaggaacacggttgagctgtcaaactacaccttcagctccaccataaagaacattcagaatgagacattcatcgacgcctacaacgtcagcttcaagtatcctaacagcaagaccctttctgcaaggcttgtgaaccttgactatgacaattccaatccggattccgttcagtatcctgcaaaccagatgataacgttcacagtttacaataaggatagccagtccatagttgcctcctacaacaagctaaccaatgcacagggctatgcaacaatcaacatgaagtacgatcctggaaactatgagatcgacataggattcggaggggacgaggaataccttgactgctcaacatccgttgaagccaatgtctacggaaagaaggttgtggagaagcctgttgtggtgaagacaaagtccaagacaaccaagaagacatcctccaagaaaaaggcttcttccaagagtactgccaagaccaaagcaaagaccaggagcaccaagagatactacagcaagtacggcgttagccctgacggaaagtatctcatggcgataggtcgcccaagcgcaagcggagagcttgcgaaatacggatacaagttttacaggacagtgttcgtaaggaaatgccctatgtgcggaagcactgagatctactggtcaatcttctgggcaggaaacgagcatggaagctggggaaagttccctgctaccggaaggagagaatcaggctccgcagaaggtcaaatcttttgcaagaagtgcgatgcggactggtcaatcttcgggaacaaccacaattcaagccataaggacttgaagatttacaagaagcctgcaaggagcacaaagtcagaagcctacaccttgaagaagggcaagatgtactatgacacagtaacagtaaccgtcaaggagaagaagaacacaagctccaaggaaagggttgtgttggctaatgacattcctaaagccattgtgcagttggctttgagcattgtgggaaacagtacaggtcttgctgctgcgaagaagatagcgaagtggtgcggacacaagaggaacctgaaatgggttgaatacaggaacttcaagcatggagtctcttgggttcgcaggaagaggaaatgcaactgctgcgatggtgcaaggttcatgcttacgctgatggacgcagcaggttgcactgagaagttgaggttgcagtatgtgaatgtgagcggaggcaagggaggtcatgtgttcaccaagataactgtcaaggagacaggctcttggtgctatgtagaccccacctgcaagttcgagaacggaaagaacccttggaaccactacatcaagggatacggcagtcctccagggcatgtctacaattacaatggtccgatcaatccgccattttag

SEQ ID NO: 318 - DNA, 1518 bp, Methanobrevibacter ruminantium
  source 1..1518: mol_type = genomic DNA
atggtcgagaagattacagtgagtcctcaggaagtcagaggatacggaaatgttgttgatgagaaggaattggaagattacggaagctacaggtgtgatgtgagcgagagctcggaggtgatcaagggagttgaggaaaggatattcagcgtttctggtgttcctgctcctgctctgagcattgccaatgttactgaggacactcgcaggggcaggtgcgcccacatctccgcctcatttgaggatggggaaggcgatggcttggatgataaggcaatttcccttaaaagcggcgatgatgtccttgcaaccattacaactggaagtggagaaaacgtgtttgatgtggtcctttatgatagcgctcagctctatgctgtctttgatggagatgactattatcctcctgctgtcagcgaagcaatcacagtcaatcctgcaaagtcattatgggatgtcgagttcatccttgacgaggaggagtatgaggttggagacacagccatactgtcagggaccgtcggaacgattgttgacgagattgttgacggagagattgttacccgcaggcaaatggaggcgaatgttacattgactctagtaacggatttaggaataaggcgctgctccaccaatgccaacggagagtttgtgcttcaggtgccgaacattcagcagaaccaatggagagtagtcatagccgccactagcacccatctggtcttcaatggcttgattgatgttcctgtccatgactattccttagtgatttcaggatccgaaaattcaactgccgcctccactatattggtggtcggtctcaccgacttcaacagcatggtagagggagcaacaatatccatcgctggaagcgacggctcatcatacaccgctgtaacggattcgatgggaggagcaacagtgaatgtgggcagactgaacggagccacaacattcactgccacttacggcaatgtctcctcaacggttacggttgtgcctcctttggactggtacgatgcgtcaaactacaccgcaggctcaggcagaatgccttcctcaagggcaagttcaatctatttgcaggctgtgggcggaagatggctcaacaaggagtttactgacagtgagtcatatgtcctcgagttcgaccttatcctgagcaagaacaaccgtgagggtttctacttcggtgcaaaccctaactcaaacacaaactcaggaatctcaatcttcaaggacatctcaaacaccatgattgagacattcgattccacaggcactgcaataaggcttgaaagctcattgtcaggaagctatttcaacacaggcactcatcacataaggattgaaagggactatgatgtagcctacatatactttgacgaggacctgatattcgagtttgatgatgagatattgagctatggtgcggaggatcagatgtacaataccgtcggaatcctatcttggggctcaggcatcatcgagttcggaaactttgagttgagtgattga

SEQ ID NO: 319 - DNA, 159 bp, Methanobrevibacter ruminantium
  source 1..159: mol_type = genomic DNA
atgaatgatgaaagttgcagaaattgtgtcttcaggaatgaggattatcctcctttctattgcgattttggagatgacaatcctgttatatgtacagtgaagatgaagaagatgagagaatacaagaaagagaagttaaggagttgtttggatggttag

SEQ ID NO: 320 - DNA, 687 bp, Methanobrevibacter ruminantium
  source 1..687: mol_type = genomic DNA
atggttagattcagcagagacatgctccaggacggagcgaagagaatgttcaagtggctaagaaagggcgaagggttgcctaactacttgataatgtatgacatggacaggaataaggagtataagttggttccaaaggaatatgcaggactgtatgagtccagaaacatattctggattaagaacggaagggagcctaactatgttacactgacttccgttgcaaggaatcctcttgtgatggactaccagaacaccaattacacctgttgcccaaccagtttgtcccttgcctcacaaatgctatatcactataagtcagaaagtgaatgcgctaaggctttgggaactagcaagggcagtggaacaagccctgcacagctgatagccaatgctccgaagttagggttcaagataattcctatcaaaagagacagcaaggaagtgaagaaatacttgaagaaaggtttccctgtaatctgccattggcaagtgaaccagagcaggaactgcaagggagactatactggaaacttcggtcattacggtctcatttgggacatgacctcaacccactatgttgtggcagatcctgccaagggagtcaacaggaagtacaaattcagctgcctcgacaatgctaacaagggctacaggcagaactactatgttgtctgtcctgcatag

SEQ ID NO: 321 - DNA, 2250 bp, Methanobrevibacter ruminantium
  source 1..2250: mol_type = genomic DNA
atgaaaaaacattgcttttattttttaggggacagttttgccgatatatgcaatgaagccatgttttgtgaaaaacatttagtagaaggaaactatttggattcaattatccgtgcaggaaaggcttcagagataataactgtaaacatttgtgaacttgaaggtcaagatggcttaataagctctggtcagaagaaaagattggaaatgcttggatataagggtatcatttcttatgatatttataaaagattaaaccatattcgtaaaattagaaataaggctgtccatgggcatttaagtgatattgaagacaatgcaaatattctgcatgcctatctgtatctaatttgcgcatatttctataaggaatatagagacactaatttttcagcggaagattatacgggccctattatggacattgcctctaagcctaaagagactgcttcagagacttcagaggataatgaaaatattggagagtttatttcaagtccattggatgattatctttttgaaaagtatgatgacagttacctgttaaatgaactgtctaaacttaaggactcttcaaaggaagctgttgaagacgataacttaagcgaatttaaggaatatcttcatattgacagatctattcaagaagattttttaaaggcattgaacagagccactagttttaattcatctcatctgattatgctttgcggtagtgttggagatgggaaatcacacttgattgcaaatttaaaaaagaaaaaccctgaactctttaatcaatttgctatccattatgatgctacagagagttttgatcctgaaaagaatgcaatagacactttagcctcagtattggaacctttcaatgacaataatcttaacaattcgacagaaaaacttattttagccattaacttgggtgtattgaacaatttcctggaatcatcttatgctaatgaagattacactaaactcaagttaattatagaagaagcgaacatatttgaatctaatgaggtttcagataacatttatggagataaggttagttttgtcactttcagtgattacaacatgtttgaattgaatgatgatgaaaattcaaactacacatcatcaaagtacatctcttccctatttaataagataacccaaaaggaggatacaaaccctttttatgttgcatatctcaaggataaggactctcactttatcaatcctataatctataattatgagatgctgatggatgaggaggtccagaagacaatcattgattatttaatcaagattttcataaaatacagaaaaatcatttcaactagagacttattgaacttcatttatgagataatagttcctccggaattcctgaaaagtgaggatttggacaatatcaatgatttcatggactattcattgcctaatttactcttcggatatccagaaaggtcagatttattgaagctatgcaatgaattggatccgacattgcatcgtaatgaatctttagataagttcataatagacttgaacattaatgacgatactgaaaagatattaaatcgttattttgatttcactcgttttaatttccttgaagagtatggagagtatctggttgattttagggagtttaacaattctgaaaaagagaaggtcaccaatattctaattaggtttgcagtattctatggaaagagcattatcaagaataatttcaaggataaggtttatttaaattatttaaaatatctgtatgcctataatacacagtctcataaggattacaaatatctgttcactgaagttaaggacgctatttttaattggaaaggttcctataagaagaatactatatgtattgacactttggattcatttaaagtgtataaaaatttaaaattaaaaccatctgttgataaatttgaaaaaagtttattagatggtctctttttaggaaatagatttaaaacagatataaaaatttatttttcagttgaatctaacaaaaagaaaatacctttaaatgttgatttttcattatatcaatacataatgaaattatataatggttttaagcctaatcaatcagataaagacgatttaataattttagatgaatttattaataatttattagatgaagatacagatgatgatttatatgtaattagtttagaaacttatgaagaatttttatttgagtcaaatgattttggcacttttgaatttaagaggggttaa

SEQ ID NO: 322 - DNA, 1371 bp, Methanobrevibacter ruminantium
  source 1..1371: mol_type = genomic DNA
atggatttttcagaaaattataatatattattaaaacaaatgacttgtgatgtaaataaaaggaaattaatacatcagattaatcaaaattctccattgttaccttttaaaactaatactcctaaaaaagctaattttgaaaatggttttgatataatattgggtgaattatccagaatcttattaaataaaactattgaaaaaaattttaaattagataatattgtttcaaatttaattgataataatattgaaattgaagatggaactaaggagtatataacaaaattgctaaatgaatatttattcgatgaaaaaaatgatttaaaaatatctcatccgaatttgtatttatatattcctctttcaaataataaaagttctaatggagaacaggaagtagcattgtttttaagagatattttttgtaagaataatcaaaatcttattaacttttttgaatcatatgattcaaatcacattatcttaaatttaattttaaaaaatactcctaatttacatcataaaataactgaaactaagtatgtaattcattttgaggaaattgcaaatttatttaatgaagatatcaattatgcaatactttataagaaattttttatggaaaacattggtaatatttttgcttattactatttcttttatatctctcaattaattctaaaaatttctaaaggctttaatgataataatgaatttgaaaaattgtactatttattggactgggaatctgcaagtaaaaatcgtaaatcattaaatagttatagtttactaaaacatcattctaaaccattatatgcaaaaatggcagtcatagatcaaataaatacactattaggtacaaataatttattggaaaaagatatttcagaatattttaataatttggacatcaattctaaaaataattttttacattttcttaaaaaatgggtttcagattataggtatgtaaggaattttgatgataaagaattaccagataatttattagaattaactgaaattctttttgaaagtttaaaaaatgaaaaactgggtgtggatggagctgtacaatctaggtacgctttaaatcttgaagatatagctaaaaaatatttgttaaagcgtagaggttcgtatggttatgtattaaatattaatagagatatgttgcttgttttaactgcattatgtgttaaagataagaaaattaagttaaatcaactatttattgaatttgagaaaagaggagtttattttgacaaatattcaaaagaagaagtagtaaattttttaactaaattaaatttaattgacaagaaaagtgatagtggagatgctcaatatgttaaaccagttttatga

SEQ ID NO: 323 - DNA, 5223 bp, Methanobrevibacter ruminantium
  source 1..5223: mol_type = genomic DNA
atgttaaaccagttttatgattatctatctaataaattactaaattattttgatgatactaagattttaagtggtgaaaaatttttcattagttttgatgaagatgaccaaataatgtctttttataatagtttaagaagtattgcagaaactaatttttcttgttctgaattcatatatgtccatactatttcaggaaaggaatataatacttattccataaacattaatggagtcaaatttgtcatttctgaaagtttaacaattaacgtagatttcttagttactttaagaaatcaagttacttctcaagagggtgtttggaaggatactgcattattagttatctgtaatgaagcaatagatagtattggaaaaggtatgagaaatttacagaaagaaggaatgccattaaatgtaaaatctatttcaaaaaatttagaggatgaaattaacgattctcaaattcttaactattccgataagcaaatcgctaagttttctttgaatattcaagaagaagaattgtttcaaacaacattatgggattatgaaactatcttatcaataatcaacaagggttttgttagtgatgaagatttaagagagttgaatctttttaaagatgaccaactaaatcaaaattctcctcaaaagatgttaaaaagattaaaagaaaattatgacacatttaatgaagtaaataaattttcacaatatggagataaaaaagaacagcttaaaaatatgtttactgattctggagtttctattttaagtaaagatgactggtataaagcagaatggaaaatggttaaaaaatcaaaggatgactttattaatcaacaaaatcctttaaattacaatgaaaatcttgaaaaaatcacagaaaatggcttaaattattgggaaattcctaactcatttactaaaactggaaaaagaaaacgaaatatcattgtttttaatccaaatcattctcatgaagttagtttaaagttcagttttgatcagattcttagtaattcattccttaatacaaattcaaaaaaattcactattgcaagaggcaaatcattaatagtcaattttactctggattctagtgaaccaattttcaaaactataaaatataaacataaaaatgaaaatatctctgaatttacttttaatattgttgttttgaattttgagcctgaaatttttaattctattaaatctcgttttagtgtcaatgtcaaatctaaacagattattgtaacaaatgatgaggatagttttgatattgtttttggtactggttcaaaagaaatagagaaattaattaaagaaaatggtgaaaagttatatctttatgatgatgaatctttaataatttctgaacaatctcctgcttggaatgatggaaaattaagttttaaattatataaagacaataattatgccccatttttgattaaagaaaaatctaagaaaacactgccagtaaattcctatgtaatttggaatttgaaaagaagaaatatggaaaactttatttttaatggagtaaaagctgttcaagatgtaaacagtttctatctcgtagaagaatttaaagaatttctaaaaatggaacgagaaatcattaaacaggacatattttatgctaaaaggaatattgatggttctttagaaaaaattgaagtttcattcagtaacgagttagaaactgcttacatggacatatttaattattataagacttttgatgattctccagaagacaatcttccaagtttagtttatttaaatgatgatttaaaagagttatataagaaatttataactatcttcaataaggaaatatcagaaattgaagagaattctattttgtctgattttaaatataaaaagaatttgcttaagttaggtcgtattgaaactgataacaaaataatgtattctccattatctccactaaatatcgcttatcaattagaagtttctaaacaatgcggaaatgaggatttatccgtaaatatattagaacggttagttccaaataacttaattccttatatttgttcagatgatggaaaagaattgtttagacctatttatcaagaagaagctcatgaatggttgatttatgagaaaagtgaagaagtatcaattggaacaacaaatgtatttatttctaatgttgttactgaaaaacttaatcaatttgtcaaacattttaattacttatttagttttaacaactcctcaccaattaaaattaacttaatcaatataaaagatgataaagaagttgtgaaaggagtatttaattttattagatctagattgcctgataaaactaaaacaaaaaaagttattcctgttgaaatcaatatttacaacgacgctgaaaagagttcttttgacaatttatttgattgtcagtctgaaattcagttactggaagaatttggaattaaaaaattaaaatcagatatttttgatcctatagatattatccatatgattcaaaataatatttcatattataaacatccatttaaaaaagaagaatatgaatatgctcatctttctttctataaagtcaaatcacataacaatattgcaaatgacaatatggataaaattgaaactggattatctttaaacggtttattatcttcagttacatcaactactaaacattcagaatatagaacgggtttcggtacaaacaatattttaaatatgagtaatcctcttattaaaacagtgattaacttgaacgaacttgttgagaatagcaagaactttggaaaaaatacttattcaaaaaataaatcagttatcactactgttgaattagaagaagacaatattgaagaattgtacgacaaatctcattgggtaacatttattgaacctacatttggtatcgaatactttgacagttctgatagtaatttgatcattattcattacagcgatcaatatagttcctctagcaagtatgatactattactgtaactaataaatcaacacaatatgaggaaattataagagatttcctccaatctaaatatgtaaaagttacagatgaagaattgtatgatgtaataaagatgtttaattcaattaatggtgaatggttacttagagtaatttctaattccggccattatgatagggaaaaattaagtattatttctgctattaaatattgcttatccattttggaccataaagatattgtttggattccagtttctatggaagaaatcttaagaattgcaggaaatgttaaattagataaaaataaaggaatttttgactctaagttaataaaaggaaatcatagtgatgatctgctattcattggtgtaaaattcaatgaagataatagaatcgaagttatattctacccaatcgaagttaaaataggtttgaataatgcttcaactattaaaaaaggtaaaagtcaattagataatacttataaacttcttaaaactcaactacaaaatattaatgtagagaattctgaatttagaaataaattctttagaaatttcttcatccaaatattattgtccaatgagcaaaaattagtaactaatcatatttgggatgaaaaaggattggatagaattgaagaattcaaagcagaactattaaatgatgaatatgatattttatatggtttagaagagtacattggtaaaggttctttggtttcatttaaaaaagaatctcatcacatctctatctatatggatgttgataagcaagtaattgagttaccagaagattttgcttattacggtttagccactcctataagagaaatccatgatgagattcagtcagacaatacagatattcttgcagaaacattgttatcacatgtagatataagtgaaattagagcaaagaataatgatatatgcgattcaaatgaggatatgtcaatagatgatgattttgataatttaagtgaatttgaggatagttttattgaagaagaatcagaaatttctgaagagcctgatgaagaattaactgatgcaacttcaagcagtgataatgaatcaattgagaatattggagaatctccttctaaaatttctaatgtcagagcattaattggaactcagaagggttataatcataaagtttattgggaatttggacatccttctttagcaaataggcatatgttaattcaaggaaaatctggacaaggtaaaacatatttcattcaacgaatgttaaaagagttgtctattcaaggcattcctagcataattattgattatactgatggattcaagccttctcaattagaacctaattttaaagactctttaggagataaaataagccaatattttgttgtaaaagaaaatttcccaataaatccatttaaacgaaacactatcatgattgataaggacatatttattgaagaagacaacagcactattgcgagccgatttaaatctatcattaattctgtttatgggctaggtattcaacagtccaatactttatatcaaacagttttagattgcttggataagtatgatgataattttgatttgaatatcctaaaagaagaaattctaaaagacgaatcaaatagtgcacaaacagtcttgaataaattaaatgagttattggataaaaatccgttcgcatccactgatttcgactggtctgtcttagataataaagacggtaaagtttacattatccaattaactgcactttctaaggatatacagacaattataactgaattcatcctttgggatttatggaattacaaattaacaaatggtagtgaagataatcctttcattgttgttttagatgaagctcataatcttgatttttccaatgactctccatgtagtaaaattcttaaagaaggcaggaaatttggatggtctgggtggtttgcaacacaatctgttaaaggatctatgaaaattgatgaaatagctaaattagagaatgcagatgagaagatatatttccatccaacggatgtttcaacaatagctaaagatttgtcaaaagacaatgaagataaaaaaatatatgaaaaagagttatctcaattgacaaaaggatattgtattgttcaagggtctgcaatagattcaagtggcaatttgtatcagccaaatcctgtaactgtaaaaattgaggagataagttttgatgaaaattaa

SEQ ID NO: 324 - DNA, 3165 bp, Methanobrevibacter ruminantium
  source 1..3165: mol_type = genomic DNA
atggaaagtaaagacagaatagagaatactattttcaatgataaaagaatggatgcttatatagacaaatattttgaagagtttactctgagttctgaacaagaagaggcactgaatatttggatagataaattaaataacgatcaattaacaagtgaaaaagggaattatcataatttttttgaaattattcttgaagatttacttggttataaacgttctgatgttaaacatgaagagaatattggtgatgaaggccatcctgtagagtttgtattagaaaaagatggaaaagattatgtgattatagaactaaaaggaacaacttataaagacctcactaaaagaagacctggacagcaatcaccagtagagcaagctacaaattatgctagtgctaaaaaagaaactgaatgggctacagtttcaaattatgatgaatttagattttttaatccaacagcaagagataattatatttcattcaagtttaggcaattgaaagatttggaaatctttaaaaaatttttattagtattcagtaaattttcacttatcgatgaagacatacctaaaaaattacttaatgaaacaaaagtcattgaaagagaattagaaaatgaattttatcaattgtatagtgacactagattaatgattattaaggaattggaatattcttcagaagatattaataggattgaagcaataaaattatctcaaataatattaaatagatttattttcctttgttttgcagaagatttagcgcttatggaggaagagacaactgctgatgtattattaacacctttaaagcatagaaatttaatcggaaatacaatgtggaataggttaaatgaattatttatttttgcaaatcaaggaaataaacataggagaatacctgcatttaatggaggattatttgaggatgatttatctaatttgaaaataagggatgaaattgaagataggtctttctttgaaaattggaatttaaaagaagattttgaagacaaatatgaggatattgctaaactaattggagtttataaagatactcttaatccaattttcattaatttattaataatttctacatatgactttgattcagaacttgatgtaaatatcttaggacatatttttgaaaacagtattagcgatattgaagagttaaaaaatgataatcaagagcaaagaaaaaaagatggagtgtattacactccagaatatattacagattatatttgtagaaatacaattattccatatttaagtatttctggtaaagccagcacagttcatgaattattatacgaatatgaatcatctaattcattggatgttttagattcaaaattaactaacatcaaagttctagatcctgcctgtggtagtgggagcatgttaaataaatcagtagatatattatttgaaattcatgaagcattacatgcaagtaaatatgctggagattcatctttagatagattttttgatagtttagaaaaacgaaaggaaattataagtaataatatttatggggttgatttgaacgaggagtccgttgaaattactaaattatccttattcctaaaattagcaactactgttggacttaaagaagggtttcaacttcctagtttagataaacatattaaatgtggggattcattagtggatgatgagtcaattgccggaaataaagcatttaactggtatgaatcattttcagaagtttttgaaagtggcggatttgatattattgtaggaaatcctccgtatgtggatattaaagaaatggatgaaaaaacagcaaaatacatatttgataattatgaaacttcttttaacaggataaatttatattctacatttgtggaaaaaagttattatttgctaaaaaatgaagggattttttcatttatcatgcctaattccattttatttaattctacttactctaaaatcagagaactaattcttaataatacatccatattaaatattgtaagaacttctgatgatgtttttaaagatgctaaagtggaacctattattttaatcttcaaaaaaggatatgatgaaggaaataagactaagatacttataaaaaaagatgatatggatgaaattccaataaataattattcagaacatttctttacacaagaaagatggtttgaaaataattcaataattaatattttttcagatgattttacttttgatttattaaagaaaattgatggaaataatgaaagattaattgattattgtgattttagtttaggtttaactccttatgataaatataaaggtatgagtgaggatattattaaaaatagaaaattccattcaaaaataaaacttgacgatacttttaaagaattattggatgggtccgatattacaagatataatgtaaaatggggcgaaaaagaatatattaaatatggggactggttaggagcacctcgggaagaaaaattctttaaaaatcctagaattttaataagacagattttatctatagctcctaaggaatctcgaaaaaggatttttgccgcttacacagaagaagaattatataacgctcaaattgcttttaatttagtattgaaagaaggctttgatgataaaaatttattgaaatattttttaggaataattaattctaaaatgatgacttggtattatgaagaaagatttatggataaaaataaaaagaattttgcaaaaattttgattgaaaatgctaaaaatcttccagtcattattaattcaaattttttagatgagatagtatctaatgtggattcaataatagagttaaataaagagttttatagtgtaagaaatgcatttcaaacatggcttaaaatagaatttgaaattgaaaaactctctaagaaactagaaaactattatgatttaaactttgaagaattcttaaaagagataaaaaagaaaaaagtagtcattagaccaaatcaaatacaggacttgtccgaattatttaatgaaagtttaggaaaaatagaatatctgcaaagagagattaaagaagcagacgaaaaaattaacctactggtctatgaattatatggtttaaatcatgaagaaatagaaattatagaaaatagctttaatgattaa

SEQ ID NO: 325 - DNA, 261 bp, Methanobrevibacter ruminantium
  source 1..261: mol_type = genomic DNA
atggacgatgaaacattaatcctaattgaatacatcagaaacgcgccaacaagagaaatggtgcttaagtcatttgaaggagtggactttataagaccaatccaaatttctaggaaaacaggcattcacccaaacaatgtcagcaagaaattaaaggatcttcgcgaacatgaactggtctatgtcataaatcctgagtaccatgttcctaaactttacaggcttactgaaaagggtaaaaatatgcttcaattcttgtag

SEQ ID NO: 326 - DNA, 2061 bp, Methanobrevibacter ruminantium
  source 1..2061: mol_type = genomic DNA
atgaataaaaaaattatcttatccctccttttagtattattagtagctatttctgtctctgcagttgcagcagcagatgctgatgtcacatatataaacgatgctgcagatgtagacgatgttgcagacgaaaaagttgctcctcttacagctagtgctgatgcacaagacatccaaactaagcttgataatgctaaacctggagacacaattgaattagaaaacaagacatatgacgttgatacaacatttaatgtaactaaacaagttaccatcaaaggtcaagacactgtcattaaagctagcggtgcatcccaaggtggtagcggagcactcttcattgcaaatgaagctggaactgcttttgaaggaattaccttcattaacactgacggccacaaaaactatggagaacaagtatcaggatatgctatccaattagctattgaaaacggtactgtagacaactgtaaattcatcgactggagtagcggtgtatacggtaaaggcgcatctttctgtagcattaccaactcttacttcaacggttcatccgaacaagtaaccaacggcggtaaaaaagaatacggtactaaagcaattaaccttatgggttcccacgacattaccgtaaccggatgtacctttgaaggacaagttcttgacgctatttccattgcaagtaactcaggtaacaacatcatgaccgacaacactttcatcgacaactgttatgctatctacttcggtggagcttccacccaaggatgtgtaatcgctaacaacagtttcatcagatgcggatactgtgttgatgacaaaggaaacgtaatctttaaagatttacctataatcagtactcaaaaagcagctaacggatacatcattgctgataacactattgaagcaaatgaaggatctatctttatgaaagctgaatcaggtaacacagcacacggatacccaagtaagatcggtgacataaacattacaggcaacaccattaccgcaactgcaggggctaatcctgaaggcattactttcatgtacatcttaagtaactctggtcctttaaacccatatgcacctattgcaatcgttaacaacaacttagacgcaggcattacccctgtaaccgtatggtatgctgactgggacaatgaaaatggtactgtaattcctgcagcagataaagcagtaacctccatcaacattgcagaaatcgctgcagcagatggaaccgtcactgttgaattggtagacgtaaacggcgctcctcaagcaggacaaaccctttcctacaaaatcgacgatggaaatgcaactgaaatcgaaactgatgaaaacggtaaggctgtaatcaatgtaccaattgatgaaaacgctactgcccaaactgttgccgttgaatttgccggaactaacgaccttgctgcaagcagcgctcaagtttcattcaaaaacactgcaactaaaagaacagctacccaaatcaatgctaacaatatgtcagttgtcactttagcacctaataccggtgacacaaatgacaattacttcaacgcaaccttacttgatgcagaaggcaatcctttagtaaacaaagaagtcaaaattggatttaacggtaaagaatacactaaaaccacaaatgaaaatggtgtagctcaacttaaaattaatttaggatacaaaggaggatacacctttgctgtagcattcctcggtgacgatgaatatgaagcatcatttggagtatacttaattaacgtagccgctcaaactcctaaattaactaccaaagctgctacttacaaagcatccgctaaaaccaaatccattagcgctaccttcaaaaccgaacaaggcagtgtaatcgctaataagaagatcagtttcactgtaaacggcaaaacttacactggaactaccaactctaaaggtgtagctactgttaaagtaagtatcaataagaaaggaacttacagcttcactgctaaatatgcaggtgacaacacctacaaagcagtaagtgcaagtgctaaacttactataaaataa

SEQ ID NO: 327 - DNA, 2091 bp, Methanobrevibacter ruminantium
  source 1..2091: mol_type = genomic DNA
atgtcgttatccatatttgttctggttataggaggtggatttattaataaaagaatattattaatattcgtatttctaatattcttcataagtattggatctgtagttgcaaatgatttagattcaaattcagtcaatcaagacaattatatttctgatgtagattcttttgatggttctaattcggttttgtccagttctaatttggatagttctattgataaggataattatttaaatttagattctaataataatttaaatttagattctgataagaattctgtttcaggttctgatttgaatttaaataatgctgatttaattaattctgtttcaggttctgatttgaatttaaataatgctgatttaattaataattcaactactaatgattcaagcaattcaaataattcaaataatttagaaaatcttactaatttagatgattctaaaggtgcttctaatcaaaagcctcaaaagtatcttattcctaatgacagttctataggttctgcatatatccaaaagatcattgataatgctgcacctggaagtacaattcaatttacaggttccttctataaaaatatttatctgaaaatagataaagctctaaacattataagtaaatctggcactgtgataaattcaagctatcgtttgcctgtatttactatatcaagaggaggatctggaacaaatatttcaggttttacagcaaatcttgcaaattcctttgtagaggcaagtgatgtgtccgatataagcatatcaaaaaataaaatctttacaaaacggaaagctattgtcctcgaaaatgtttttaattcaaagattgtaaggaatagtttcctaagatttgaaactgccattgacatttcaaaatctggcggattgaccatatccaataataatataactccagataacggatacaatgtgggaattagcttaaaagacatttatagagacaaggttagcatattaaacaataatatcactggccatgacagacgtatagaatccacaggcatttacttcgggccaaacgctaagaatgtattgattgaaggaaatattatagatgaatggtatactggtgtagatttccctaattctgtaaataatgtttccattttaaacaataccctcaatcacaatggtgatggagtaatcattaacggatggattaataatttcacttttaataagaatgtagtcactaatactggaagagttggagttctatttgactatgatttttatggaacaaaaggggatttcactttagagaagaatttctttacccaaagcggacagttggatttaagaaacactggagaccaggcagtaactattggtgaaaactttgctagcagacgttgtgttagggttgccatgaaaaatggattttccattaaaacccgtcaaaatggaaatggctattatttctcaattgtggataagaattccaggggagtaagcgggcttcctaactttagtgctacaatcagcatcaatggagtttcctataatgtcaatttcataaattctgttgcttatgttgaagttgatggcgctagcggcgaaaatgatgaggtccttcttgatgttggtgaagacaagcgtaagcttagcgattggggagagactcaaaatcttagttccagtgaaatggaatactataaaaagatttatgatgatttgatcaaatctatggtagaagagactaataatgataatcaggacatgaaaaaggtagaagataagaatggaacaggctccactccaagtggtggaaacggcggaggcgactctggtatttcagacggtcgttcttctgtaagttcaaatggagattcctctcctgcaagtgcaggaacttctaatgtggcagcaagttctgcatcttcatctgcgggcccttctgcagctcaagcagacactcctgaaagttctactgtaaaatcattgtcacttgatgaggaaacctttagagttgctggtgttggtggattagtcttcttgattatttgtgtaattggattatactaccgtgaagatattatggatatgattaaagaataa

SEQ ID NO: 328 - DNA, 684 bp, Methanobrevibacter ruminantium
  source 1..684: mol_type = genomic DNA
atgatggatttaatttttgaatatctgattgtttttattttattatttgccacaaatatagcatttttactaagatattctagttttaataaaaataaatttattccatttgttttaggctatgctattatagtatttgcattaacttttgtattttcttccttgaatttacaaaaggaatccatagattttattccgtatattttatttgctgttagtgctttaatgctaattatttcaattcgatatgtgggatttggaaagaattatggaataaatgatgataaagttgttttatatggcactattttatcttcattcttatctattggggcattggctttaggtttaaaatcagataatcttttcttatctggtcttgaattagctattctttctgttgtagttatctttttagtttataaaatctcaaaaatattcaacaatgctaaaagaccatattatgcagtcattggtgaatatatgtttttagaatttattttgcttcttattttagctttaaccttctctagcgtaagagaattggattattcaatgtttggatcttttctaattcttactcctacatataaggtgctatatatgattatagcaattgtcattttgcttgttttaggggttttatataatgattgggttttaaaaaggctaaaaaggaagtaa

SEQ ID NO: 329 - DNA, 642 bp, Methanobrevibacter ruminantium
  source 1..642: mol_type = genomic DNA
atgatacttcaaggtacggaaatattgacttcgtttatccatattgtttctgaaagcttgctggcacctgttgtaattgttttagttatattcttaatctatgcaattttaagctttggcggatttttaaatgaatggtttacaaaaaagccattgaaatctgcaggattggaaaagttattgcaagacatttcaagctccgatagtcctgaagacttaaaggctgttatagatgccagcgctttgtataaagagcaaaaagaaattcttgtaaagataactgataattataatttaggtccagaggcaagaaaggcttttgcaagtaaacttattgaagaggaagaaagcaatctgcttaaattaacaactaaaacagatattttagtaagattaggccctatatttggtcttcttggtactttaataccattaggtcctggactttctgctttaggtactggggatattaccactcttgcccaatccttgacaattgcttttgatacaactgtcactggtttgactattggtgcattaggttatattgtttctaaatatagaaagcaatggtatgaaagtgatttgactacaactgagacaattgcagaggctattttagaaaaattgaatcagttttaa

SEQ ID NO: 330 - DNA, 318 bp, Methanobrevibacter ruminantium
  source 1..318: mol_type = genomic DNA
atgttaagaaaaagaaaacgttttagtgatgatggcgatgaggatcctatgtctgggatttcaaatctttcagatgcaatgcttgtgcttgctttagggtttttgatttttgccattatggctcttcaggtaaatcctgatatgatggctaagactcaggagtctcaagcacaacaggccacttctcaagtgagcacaggtcaggactttaatagtagtgccaatgcaggtgcctctttagagcagtctggttattctgaggtgggaaaagtttataaagatcctgatactggtaaattagtcatggttcagggttga

SEQ ID NO: 331 - DNA, 1623 bp, Methanobrevibacter ruminantium
  source 1..1623: mol_type = genomic DNA
atgaacaataaaaagattataatgtcttttctattggtcctattgattgcaatatctgtctctgcagtttcagcagcagacattatagcagacaatcaagattcaatttcatccaatgacaattcaatcaatgaaattgctacagaagacattagcaaagacattaatgacaaatctctttcagatggagtcagcaccggcggaaacaattggattgtaaaaccatcaacagatggaaaaagcgatgcaaattccattcaaaaggcaataaacctcgataatacaaagcctggagacagtctccttttaactgataagaacttcaccttagaaaagtcagttagcttgaataaagaccttacaatcaatgggggaaatatatacaatcagaacaatttaactgatctatttataatagatcctaaatctgaaggaggtccaaagaatataacaattaccaatgttacattttatgtaaatggaaatgaaaacattgtgcttgcaaatggagagaattacggcacaacttatattgatcttgccaatataaaaataagcaactgtacaatcttgcctataaatccagacagcaatatcaatgatacagtgcttcttaatataaaatccgataggacagtaggccaaacaggtcaaagtacaggattcgtattggtttcaggcaacaagctaaacggcataaacacccttaagaataacgattacgtattaaaagacgactttgttattcaaaaggcggaccctatcttaaataccgccctaatatgccctaacatgactattacaacctatgataaaaacactaatgacactccaagctattatgaagtgaaattgatagatcaaaatgtcaatcctgtaatcaacaggacaattcagataggattcaatggcaaaatctatgataggacaagcgatgaaaatggaatagcaaaggtaaaattaaccttagcttacacttcagtttacacatttgcagtttacttcctaggtgatgaaagctatgcaagtgcatttgacgtttcaactgtgacaatcattaagaaaaatgccacaatcactccaaagacagttagctataacgtaaatgcaaaaacaaaaactttaactgctaccttaaaagacaaaaacaataaggctttagccaataagaaggtcactttcactgtaaatggaaaaacatacactgcaacaacaaactcaaaaggtgttgcaagcgctaagataagcctaagcaagaaaggcacatacactttcactgcccaagttttgcaggggacaatatctataattcagtttccaaaaaagggaaagcttaccttaaatccgctttcaacaaacttgactgtcaagaagtacacattcaaaaaagcagccactaagaaaatacaagtcactctcaaatccggcaagactgtgcttaagtccaaaaagcttaccataaaagttaatggaaaaacatactccggaaaaacaaacacaaaaggaatcgctacaattaccataaaattaactaaaaaaggaacctacacttacacagctaattttgcaggagacaatacttataaggctattagcaaatctcaaaaagtggttataaaataa

SEQ ID NO: 332 - DNA, 822 bp, Methanobrevibacter ruminantium
  source 1..822: mol_type = genomic DNA
atgagttttaaaagtcctgcagatactgcaaaagcagttgcatctgcagctaccgcaaaaggtgaaatgcctatcataaaacttgctattttaggtttcttagcaggtgcatacattgcattcggaggtttacttgcagaagtagcaaatactggtgctattgctggtggagttccagtaggtatttctaaattattattcggggcagtgttccctgtaggtttaattatggttgttatctgtggatctgaattattcactggtgacgtaatgtttatgactatgggtcttttagacggtaaaactgatatcatgggcttactcaaaaactgggtaggtagttgggtattcaacttaatcggtggtctcttcgttgcttacgtacttgcttacttaactggtattatggtacctgaagcattcgctggcggtgcaattaccattgctaacactaaagcattaggtggagctaccttcatggcagctggtaaatcaactgcttctttaacttgggtacaatgtttccttagaggtatcggttgtaactggttagtatgtttagctgtatacttagctaacgctgctgacgatgtagtaggtaaattcttcggaatttggttcccaatcatggcgtttgtatgtattggatttgagcacagtgtcgcaaacatgttcttcatcccattaggtatcttcttaggtgctgaagtaacctgggcacaattcttcatcaacaacttaattcctgtaaccttaggtaacatcgttggtgctgctgtattcgtagcatgtgcttactggttcgtatacttacgcgactaa

SEQ ID NO: 333 - DNA, 2052 bp, Methanobrevibacter ruminantium
  source 1..2052: mol_type = genomic DNA
atggttgagataaaatatgtaccatctatttgtccttactgtggtaccggctgtggtattaactttgtggtcaaagatggcaaaattattggtgtagaaccttggaaaagacacccagttaatgaaggtaaagtatgtccaaaaggtaactttggataccaattcattaaccacccagacagattaactactccgttaatcaaagaaaacggtgaattcagagaagcttcctgggatgaagctttagatttagtagctagcactcttaaaaaatatgctgacactgatcctaacaaattaggattctacgcatgtgctagatctcctaacgaaaacatttacataacccaaaagttagcaagagctggttgtggaacccaaaacgtagaccactgtgcacgtatctgtcacggtcctactgtagctggtctcgctaccaccttcggttcaggtgcatccaccaacggttatgacagtattgaagaagctgacttcattttctgtatcggttccaacaacatggaagcacacccattattcggacgtaaaatcatcagagctattaaaaacggtgcaaaattagtagtagctgacccaagattcactcctactgcaaaattagctcacgaatacatgcaattcaagaccggtactgacgtagctttaatgaacggtatgatcaaaatcatcattgaaaatggtttacaagatgatgagttcattaaaaacagaaccaaaggctacgaagaaatgaaagaagtagctatgaaatacgaccttgacaaagtagctgaaattaccgaagctgaccctgaacaaattgaacgtgtagctttagaatatgctcaagctgaaaacgcagctattgtatactctttaggtattaccgaacactctcacggtgcagataacgtaatgtccaccgctaacttagctatgttaaccggtaacgtaggtaagattggtggaggagtaaacccattaagaggacaaaacaacgtacaaggtgcttgtgatatgggtgcattaccttctgactatgtcggataccaaaaagttgcaaaccctgaaattaccaaaaaattctcagacgcttatcaaatcgaattaccaaccactcctggtttaaccttagtcgaaatgatgaacgctgctcactctggtgacttaaaagtattatacatccacggtgaagaccctgttctctccgatgcagatattaaacacaccaaagaagcaattgcaaacttagaaatgttaatcgttcaagaattattcatgaccgacaccgctgctgaagcagacgtagtattacctgctgcaggttggggtgaacaagaaggtaccttcacttccggtgaaagaagagttcaatggttacgtaaagctcaagaaccacctgaaggaaccatgcttgactggaagatcatggaagaaattgctgttagaatgggcagaccaagagaattattccactacgaaaacgctgctgaaatttgggaagaaatcagagaactcgctccttcctactacggaattactcacgaaagattactcaaacctgaaggtgtccactggccatgccttgacccagaagatccttgtgaaccattaatgcacaaagacaaattcgcacacccagacggtttaggtgtattccaagcattagaacacagaggtcctgtcgaagttgtagatgatgaatacccattattattaactactacccgtatcttgttccactatcacgctgcaatgaccagaagatgtgaaaccttagataaggaagtacctaccggattcatcgaaatcaacactgaagacgcagcagaaagaggaattcttaacaacgaaatagtaaaagcttactccagaagaggagaaatcgaaattcctgctcgtgtaaccgacgacattaagaaaggtatcgtaaacattcctatgcactttaccgaatgtgcagctaacatgttaactaactccgattctttcgaccctaaatgtaagatggttgaattaaaagcttgtgctattcaagtagaaaaattataa

SEQ ID NO: 334 - DNA, 1209 bp, Methanobrevibacter ruminantium
  source 1..1209: mol_type = genomic DNA
atggctgtaaatgtaaatgatatgttttatgcatactctggtaatgaagcaattaaagaaaaaggagaatatggtggtgtagtaactaccatcatgaaatacttactcgaagaaggtattgtcgacgctgttgttgctgtagaagaagcagctgacctttacgacgcaaaacctattctcataaccgaccctgaagatgtaatcaaatctgcaggatcccttcactgcggtacattaaacttagcaaaattcgtatccaaatacttagacggtgcaagagatatgaaaattgcagttaccacaaaaccatgtgacgcaatgaccttaaaagagttaatgagaaagagaaaagtaatcgaagaaaacgtaatcatgattggtgtaaactgtggaggaaccatgcctcctgtaccaactatgaaaatgattcgtgacgtatatgaattagaccctgcagatgtcatcaaagaagaaatttccaaaggaaaactcattatggaaaccgctgaaggcgaaaaagcaatttctattgatgaactcgaagaagaaggtatgggtagaagagaaaactgtcaaagatgtaccatgaacatcccaaccaacgctgatttagctttaggtaactggggagttatcggtgaattagcaggaaaagcaacctttgtagaagtttgctctgaaaaaggtgcagacatcttagataaagttattgaagctggtttaattgaaacccaagaaccaatcgaaaaaggtgtaacaatccgtgctaacatcgacggaatcatggttaaacaagcaatggcacaaagagaaaaagactttgctggaacctccggtgacattttagaagtatttgcagaatacaaagaagaattctccaaatgtatgaaatgttacggttgccgtgaagcatgtcctctctgtttctgtgacgactgctgtcttgaagctgaaggtcctgaatgggtacctggcggatacactcctgcagctccattcttccacttaacccgtatggtacacatggttgacgcatgtactaactgtggtcaatgttctgaagtatgtccttgtgaaattccagtatccaaagtatgggctactgtaaaccaaaaggtcagagacatcttcggttactacagtggtgtagacaacgaagaaccattaccattcactgaatttggtcctaaatcatacagacaatactaa

SEQ ID NO: 335 - DNA, 708 bp, Methanobrevibacter ruminantium
  source 1..708: mol_type = genomic DNA
atgagaattatttcaattgtaggcttaaaaaatacaggaaagacttcacttacaagcaagataatcaaggaattgaccaatagggaatttaaggtagcaagcataaagcattctcatcaccaaatggaaatggatcatgagggtacagacacctacaagcaaatggagtcaggctctgattttgttgtgggaattggaggccgcacctatttcaatatcaatgaaagacttgacttggaacgtattctattcttaataaagcttattgaaaatcctgattttgtggttatagagggattcaagagctatccttatgcaaagatagcaacctgcaaagaggtggaagacgaatacacaatcaaaacagtaaattcatttgaaataacagatgaagagcttctagatcttgtagaccttatagaagaaaggtcctatgacatcctagatacattattcgttagtgactgtggctataatgatgcaagtataataggtcaggcatttgcacaaggaaaactggattataatcccgatactcaagcggaagttaatttagccatcgatggaatcaatatagggctaaataagtttgtaagcaattatattaagcaaactgtattgggcatattgaatccacttaaaatcaaggaatatggtgtggaagactttgagaatattgacctaacaataaaaaacaaaaaggattaa

SEQ ID NO: 336 - DNA, 186 bp, Methanobrevibacter ruminantium
  source 1..186: mol_type = genomic DNA
atggcttgtaatgatgattttgaaaacaatgtgactttagcaatcaatggcaatgatattgaattaaacaaatttacagatgatattattaaagaaaccattcttggattattgaaagctattaaaacttctgaatatggtgtagatgaagttaaggatgttgaaataacaataaagaatgaatag

SEQ ID NO: 337 - DNA, 936 bp, Methanobrevibacter ruminantium
  source 1..936: mol_type = genomic DNA
atgaaggataaagttagagacgattatgaaaggccaattatttcacttaggatttctataaccaatcgttgcaatgtcaattgcatatactgccaccacgatggcatgctggactcatcttctgaaatgactcctgatgaaatatacgagatctgcagaattgcaaagaaattaggtgttgaaaagatacgcctatctggaggcgaaccacttgttcgccctgacatagttgaaattgtagagaaggtcaactcacttgactttcgtgacatttcaatcacaagcaatggaatatttttagacaaattagcaggtcctctaaaggatgcaggattagacagaatcaatgtcagtttagacacacttgatgaagaaacctataaaatgattgtggggaaaaacgttttagagagagtaaagaaaggaatcattgaatcttgtgcagttggtatgtatccagttaagataaacatggtagttatgaacaatatcaacaatgatgagattatggacatgtttgaattcaccaagaaacatggtgttatccttcagcttattgaaataattgagtctgaaagctgtgatgacaatgacttcaattccaagtatcactatcctttagctgaatttgaaaagcatcttgctgaaattgcagatgagataaaggttagggagtttatgcaggataggaaaaaatatttcattgacggcggagagatagaggttgttcaccctgttgacaataccaatttctgcaagaactgtacaagacttagaattactcccgagggaaagatcaagccttgccttcttagaaatgataatcttgtaaatcttattgaatttattagagaaggagcctctgatgaggagctcattgacatattcttaaagggaattcataatagggaacctttttataaggaagaaaattag

SEQ ID NO: 338 - DNA, 6930 bp, Methanobrevibacter ruminantium
  source 1..6930: mol_type = genomic DNA
atgaaaatccaaagaggtatatatataatattaactttacttgttctctttagcctttctgctgcaagcgcagcagacgatcttacagatgatattattagtgctgatgagaatgaagaacttattttagatgaaacagtcattgatgacgtttcaaatgcaaatgacaactatgatgaagaacttattaaagcaaatgatgaaaaatttgtatatgctggaaatgattcagatgaattaagggaggatccagggacatattccgggctatctagcgagattggcgctggaggaaatattgtattgacacacgattactatacttatgatagtggcgatacaatcataatatcaattagcaatagtgttattgatggtaatggtgcgattatagatatggccggatcaactattcgagcatttaaagtaactgcttccggtgtaacaattaaaaacctaaccattaaaaacgccaatgtaactacagatgatctaggcaatacagatgatgagggcgctgcgattgactttgaaaagtccggtaccattgaatattgtaattttattaataactctgcaaacgctgccggtgcagtatacttttataaagataacagcaaagcaataaattgtaatttcagctataaccaagcggtatactctggtggtgcagtttgctttgaggaaagtggtactatagaaaattgtacttttgtcaataacactgctgtttatgatattttaggaggaggcggtgctgtttgctttaatggtacaggtaatgcgataaattgtaactttaccaataacaccgctcaagggtatttttcatgggctggtgcaatttgctttaatacaaatggtaatgcgataaattgtactttcactaataataaggctcatgactctggaggtgcaattgagatttatggcaatggtaaattggaaaattgcagttttgataagaattctgccaacgatggtggtgcagtcaagatttatggagctactaagatatcaaattgtaattttactgaaaacaaagcagcagaactttcaggtgatggcggcgctatctattggaatgccagcgctggcaaattagaaaattgcagttttgctaaaaactcagcttttcacggaggtgcagtttcctttgaggaagatggcgaagtaacaaattgtaattttactgataacctagcaggagacagcggtgcaatttggtttacagcggatggtactgtagaaaattccacttttattaagaatgaagcatgggatgagtatggcggcggaattgtcttttatacctccggggatgtaagaaattgtaatttcactgataatgaggctgataagcaaggtggtgcagtttactttaatggagcaggtactgtagaaaattctaatttcaccaataataaagcacaggatggcggtgcaatcttcttttcagaggacagtactgtaaaaaactgtatttttgttaagaattgcgctactgatatacgttctgataggtattttgagaggtgcaaatatgtattttataagaatggtgaagtaacaaattccagctttactgaaaacaatgctactgaaggtggcgcaattttatttaagggcaatggtaaagcaacagattgtaattttaccaataactctgctaaatttggtggtgctattgactttgagagccatgccactgtagaaaattctagctttaacggtaacaaagcatcctctaacggcagtgccatctggatgaatcgtgcgggaggcattgtttccagcagtgtttttgtgaataaccgcgctaataccggtaccatatttttcagaaatgataattccacttcccatttgacaatcaatgataatattttcctgaataataatggtgttgcaatctattttgataaaaatgattctgattccaatacagattacaactggtttggaaacaatgcaacaaattatgatatagcaccagtagctaataatgctgaaataaatacttggcttttcctgaatacaactgtaaatccggatatgatttctattttagattcattagacatcgcgtttaaattatatgcttacactccttctgaagtatcagaatatgacaacatccgtttgaaagctgtcgacttgacattaactccaacaaatggaatattcaatactaccaagacggagcttggaaaaactgttcagtacattccagagagtgatggaatcggaacactaacagcatcaatagaaaatgcctcctacactacaacattaaaaatcacagatggaacaacattctttgacttagattatatcataaacgccaataataataacactattgttttggatagagattacacttataactcaacattcgactataattttacagatggaatagtcattgatcgtcctgtgacaattatcggaaatggacatacaataaatgctgctgaaatggtcagaatattccatattcaagcagacaatgtaaaaatcaaaaacattacattcacaaatgccatctcaaacggatacggtggcgctatctactggcaaggagccaatgctaatctttccagttgtctttttgaaaataatagtgctgtaatggctggtgctgtagcgttctatggaagcactggcagtattgtttctgattgcagtttcatgaataattccgccaataatggtggtgcaatcatgtggcaagtcagtgatgacagcgttgtttctgattgcagtttcatgaataattctgccatacagggcggtgctatctattggagcagtaatgatggtgttgtttctgattgcagttttgtgaataattccgctgtgcgtaatggtggagcaatatattgggaaaaaaataatggtaatgtttccggctgtatttttgtgaataacagtgctgataacggtgccatctatttcaataatcaaaactttggtcaaaatttaacaatcaatcataatattttcctgaacaatgatgccgttgcaatctattttgtgagaaatgattccgcttccaatgcagattacaactggtttggaaataatgcaactaattgcgatatagcgccaacaagcaataatatggaaatgaatacttggctgttcttgaatgctacatcagaaccggaaggaatttctattcttgattcatgcgacattatatttaaattatatgcttatgctccttctggagtatcagaatatgatagcagccgtttgaaagagattaacttaacagtgactccaactaacggaaggatcaatactacccaagccaaactgggagaaaaggttcactacactccagagagtgccgaatgcatgctaacagcatcaatagaaaatgccttctacactacaagattaaaaatctcagatggaacaacattccgtgacttgaacaatctcataaaccgcaacgataatgacactattattttggataatgatttcatctataactcactttttgacagtaaatttaaaaatggaataaatattaatcgacctttgacaattgttggaaataattataccatagatgctaccggaatggcaagaatattccgtattcaagcagatgatgtagaaatcaataacattacattcgctaatgctaaaatagacggcaatggtggtgctatctattggtattccggcgctagaggtattgtttctgattgcagttttgtaaataattcagctaagatgtatggagctgctatctattggaatggtgctaatggtaatgtttctgattgcagttttgtgaatagcactgttactgatgaacatggtggtgctatctattggcacggtgccaatggagttgtttctgattgcagttttgtgaacaattctgctaagaaatatggtggtgctatcttttggaacgctgccaatggagttgtttctgattgtatctttgtgaacaattctgctaagagctatgatggtggtgctatagtatggaatgaaggtttgaacggtgctatttctgattgcagttttgtgaataattccgccaatgatggtggtgccatcttatggaatgaagctgctggcggtactgtttctaattgtagttttgtaaataattcagctaataagagtggtgctgctatctattgggattccggtgctaggggtgttgtttctgattgcagttttgtaaataattcagctaataggagtggcgctctatactggtttgctaatgatggtgttgtttctgcttctatttttgtgaataacagtggcgataatggtgttttatacttcaataatacaaataagcgaaatttatcaatcaatgacaatattttcctgaataatgatgtcgttgcaatatattttgttaatagtgattccacttccaatgcagattacaactggttcggaaataatgcaagcaattttgatactgaaccattaactactaacgtggaaattagtacttggctcttcttgaatgctacagcagatccaaatccagttgaaattttaaattcatcagatatctcatttaagctatattcatataacgctacaggaatatctgattatgacaatagccagttacagcctgttaatttaacattgactgcaactaagggtgatgtcgatagcattgctaaattaggggaaactgtcatatacaatccaactagtttaggaactggaagcgtaactgcaaaagttgaaaacgtcgcatattctattgaaataaacaatataaaatcaaatccaaacctatcagttgaatccgatgaacttacatacggcaacaacatagcaattgctcttaattatgagtctgctgctaccggcaaagtcaatataacattaaaaggcaaaaaatcagattatacatttgcagatttggatttaaatgaaacaatttcacttggaattcttgctgctgatgaatatgaggtcattgttgaatattccagagatgagatttataccaatgcaagcgcaaggggaactttaaaggtcaataaagccaattcaacattgacagtcagtgatattgaatttgattataaggatatgggatctggtgaaatatcattcactaacgcaactggtgttgaggccaaagtaataaatcatgatgaagccattgttttcgttagaggaaatactataactgtattaaatttaagtgcagacagctatatattggaagtaacaactattactgatgaaaatcacaatgaggtaagcaagaatgcaacaataacagttagaaaagtcaattctaccattaatgttaatgatattgtcctttattatggcgaatccatcaaccttgctgtaacaactgatggtgctattggaatatctgctgatatcgatggcgagaacgttgagcttaatgaaaacatcgttacaattccagatgatttggaatctggaaatcacacattgaccataacaacagttcctaatgacaaccataaggaagcaagcaaaaccgttaatattgttgattgcaggattggcaatatcactgttgttgttgatggcgttgaatattctattcctgctgtaaatggcactgccattacaaccaatatgccggaggagattgaaaagcttaaagaaaatattactgatttaactggtcaattggaagaagcacaaacaaacgcaactaacctggctaacaatctaacaattgctaatcaaatagttgataaattaatcgcccaattggaagaagcacaagccaatgctactcaaacaatcaatgatttaactcatcaattgaatgaagcccaaaccaatgcaactaaaatagctaacgaccaaacaaatgctaatcaaatagtagacaatctaactggccaattaaatgatgcccaaaccaatgcaactaaaatagctaacgacctagaaaatgctaatcaaatagttgatgatttaactcgccaattagaagaagcacaagccaataatgatcaaaccatcaatgatttaactcatcaattggaagaagctaaagttaatgcaactaaaatagctaacgacctagaaaatgccaatcaaacagttgacaatctaacaacccaattggaagaagctaaagttaatgcaactaaaatagctaacgacctagaaaatgctaatcaaatagttgacaatttaactgaccaattagaagaagccttggctaatgctactaaaatcgaaactgttgttgtcgatggtaaagaataccctatagaatatgtgaacggcactgcaacagtaactaccaattctacaggtcctcaaaacataactcatgagagaaaagccacccaaatcatttataaggatatggaaacaactgctatcgacactaaagttgatggacgtatcggcaaatacttcaatgtcattctcaaggacagtgagggtaatattttagcgaataaacctattcaaattggattcaatggtaaggtctataataggacaactgatgaaaatggatctgctaaattacaaatcaacctcatcaaagcagacatttacacatttgctatatgctacctcggcgatgatgattataacggttctttcgttgtatcaaaaatcaccgtaaaagcgcaaaaaggcactctaaccgttccaaacaaatcttacaaagcaactacaaaaaccaaaactttaagtgcaacattcaaggcagcaagtggtaaagtacttgccaataagaaagtttcattcgttgtgaatggaaaaacttattctgctaagaccaacgccaaaggtgttgctactgtaaacgtcagtttgaataagaaaggaacatatagcttcgttgccaaattcgctggagacaatacatacgctgcagtaagcaaaaaagcaaaattaacaataaaataa

SEQ ID NO: 339 - DNA, 450 bp, Methanobrevibacter ruminantium
  source 1..450: mol_type = genomic DNA
atgccaaaacatatcgtatcaggactaaaatatttagaaagtgtcgagcttagaaaaagagggctgtcccaaaaggagatttcatctgaaattggtgtggacagatcaactatttctcactacttgaacggccgaaacatttctgccgattcaatcgagcttgctaaagttattttagagctgaatcctaaggattttatattaattgcaagagttttgtttggagattataacgaaattcgtcaacttattagcatttttaatatgaatcattatgacccgcagatagatgacggatgtattggttgtggattgtgtgtagatttgtgtgaagtgaagtctattagcttagactcattaaaagcaaagataaaccctcgttattgttgtggctgtcttatgtgtgttgaagattgcccgacaaattcaataaagattttggaggtataa

SEQ ID NO: 340 - DNA, 1104 bp, Methanobrevibacter ruminantium
  source 1..1104: mol_type = genomic DNA
atggtcaaaaatattaaagaaacagaaggcaaaaacttctgcattaaaagatcattaggcgaagaaagagtattgtctttcaaagatcacgtctgtgtcggttgcggactctgtgaagcaacctgtcctgtagaagctatctctcttgatgaagtagctcctatcgaacgtaaatatgtagacacttatttcagtggtcatgaaaagattgctcaaaactatgctcttttcactaatgataacgaaatcaaagcaaaattagatatttgcgaagataaatgtgttctctgtggtttatgtagtggagtatgtccagcaggtgcattagaacttgctattgatggcgtatccattaaagaaaatgaagcttacccacatcttgtcacttcagctgaaattgatgaagacaaatgtttattctgtaagaaatgtgaagctgcatgtcctagggagtcaattactatcgacagaaaattacctaaccgtgcagaccttgtaaccggtgaaatcgaagtggatgaagaagaatgtatctactgtggcgcttgtgctgaattatgtcctgctgaagctatcgtagtggacaaggcaaccggcgaagaaagcattgtcattgacaaggaaaaatgtgtatactgtctcgtatgtaagaaagcatgtcctgttgacgctatcaaagcagtatgtagatcctgttcctacggcgaatacgatcttgaccctgctaaagcagcaattacaggtaacgctatcattgattctgaaacctgtattaaatgtggatggtgtgaaggagtctgtcctgctgatgcagctactgtaaaacaagcattcaaaggtactctcgaaatcgacgaagaaaaatgtggtacctgtggagcatgtattgacgtatgtccatgtaatgtcttgtccttccctaaatcaactggtcctggagacagaggaactcacttagttaaagaagaagattactgtatccactgtggtgcttgtgcaaaagtatgtcctaacgaagcattaacagtaactagaactgatgttgactacaccccaacaagttctaaatcttggattgcagcattcgaagctttaaaaaattaa

SEQ ID NO: 341 - DNA, 231 bp, Methanobrevibacter ruminantium
  source 1..231: mol_type = genomic DNA
atggaacttaaagtagatcaagataaatgtttaggttgtggagtatgtgttatcgcatgtcctgtaaacgcttccatcagtccggaaaacgctggaggacacggttccaaaacaaccgaaactattatgatggttgaaaacggatttattaaattattcagtgtggacaaatgtgataaatgtggtacttgccaaatgttctgtccaactgaagctatatggttagaatag

SEQ ID NO: 342 - DNA, 537 bp, Methanobrevibacter ruminantium
  source 1..537: mol_type = genomic DNA
atgcattacgcaaatacttatttagaaagaccagtagttggagatttagaaaacgtagctcaagaaggtactaccaaagtactcaaatgtatgttaaacaccggttctgacatatatcaaggagcttgtaagaaaagaggttccaccttaaaggaagaatataagaacgcttccggtacctgttatatggatcctcgtgacatggtaaaattaggtgttaaaaactgggacaccgtacttgtaaagactgactatggtgaagttgtcttaaacgcagcaaaatcaagagatgctcctcacgaaggtaccatttttgtatgtaaaggtccatgggctaacactatcgtaagccacgaaacctactgctgttcagaccctacctacaaaggtattcacgctactgtagaaaaaaccgacagaaaagttctactcatggcagacttaatgagatgggcatacaaaaaatatgttgacgaagaagatgacgacgttattgaaaacatggaatccttaggtgaaagaccagtttataactga

SEQ ID NO: 343 - DNA, 1392 bp, Methanobrevibacter ruminantium
  source 1..1392: mol_type = genomic DNA
atgacatatgagccacctgtaactgattacgattatattgtagaaaactgtacttgtgcattttgcggttgtaactgtgacgacttagatttcttagttaaaaacggtcacgtggttgccgtaagacacgcatgcagattaggtgcaagtaaggtaatggaagatatggaccaaagattacttgtgccaatggtaagaaacgaagaaggagttcttgaagaggttgactgggacactgcacttgacactgcagctgaatacattgcaaactccatcagacctgtattctacggttggtctgaaacttccaccgaatgtatgaaagaaggtgtggaattaggagaatacatcggagcagttctcgataaccaagcaaccatctgtcacggtccaagtctacaagctatgcaaaacgcaggttaccctatccaaaccttaggggaagttaaaaacagagctgacgttattgcatactctggaagcaacgctatgaactctcacccaagacacttagcaagatatgctgcattccctcgtggatacttcagacaaagaggaagattcgacagaaccgttatcactatggaccctaaattctcagacactgcaaaaatgtctgacaaatggattggtttcgaacaaaacggtgactacggtttctacaacgctttaagagctgtactcaaaggtaaaaagttacaatctgaatccgtttccggtattccagcagaagacatctatgaattagctgctgaaatggaagctgcagaattcggtgttctcttcttcggtttaggtttaacccacaccttaggtaagcaaagaaacattgacatcgcgattaaattggtacaagacttaaacaccaacagtaaatggggactcactccaatgagaggtcactttaacgtaaacggtttcaacatcttcatggcttacgaaaccggttgggcattcggtgtagacttctgtagaggatacggaagatatatgatgggtgaaaccaacacaatcgacttactcgttagaaaagaaccagactgtttcatggttattgcagctgaccctggtgctcacttccctaacggagcaaaccaacacttagctgacattccagttatccaaatcgatattcactggggaccatccaccgagcttgctgatgtagtacttcctggatcattcatttctgtagaatgtggaggtaccagttaccgtatggacggtgttcctatctggatgaaaaaagctatcgacaaacctgaaacctgtcgtgatgacgaatggattgtacgtgaattgaaagaaagagtaatgaaactcagagaagaacctaacgtagcagatgaatacgttcctaatgaaggtctcgcatgtctcttagataagtaa

SEQ ID NO: 344 - DNA, 1719 bp, Methanobrevibacter ruminantium
  source 1..1719: mol_type = genomic DNA
atggaatatatacttaaaaatggtattgtttacgaccctgctaatgaagtaaacggagaaaaaatggatatctgcttcaaggatggtaaaatcgttgaagacgtatccgctgacgcagaagtattagacgtcactgataaaattgtaatgcctgctggtgtagaccctcacgctcacgttgcaggaccaaaattggttgtaggtagattatacagaccagaagatgaaagaagaggagtagctcaaaaaaccaaaacaaccagagcagaggctggtttctctatcccaagttgtcctaccactggatacagatactcaagaatgggatacggtaccgtttgtgaagcagctatgcctcctttagaagcaaaacacacacacgaagaaattaacactattcctaacattgacattaacccattgccactctttggtaacaactggtttgtaatggaatatgctagagaaaacagaattgacgatttggcagcattcattgcagcaatgttaagagtatctaaaggatacggtgtaaaaatcgtaaacccatgtggttcagaagcgtggggatggggtatgaacgtacacggatacgatgataaggctccatactttgacgtaacctccagagaagttgtaagagctttagcaaaagcaaacgaaaaattaggacttccacactctatacacatccaccctaacgatttaggtcaccctggaaacgttcctactaccattgcaactttagactcaatcaaagacattgcaaaatcaactaaaccatctgcttccgtaagagatcaaaccatccactgtactcacttacagttccactcctacacaggaaacagctggaaggatgcagcatctggtgctgaagaatgtgctgacttcattaacaagaacccatatgtaacttgtgacgtaggtcaagtaaccttcgacgaaaccactacaatgactgcagacgctcctatggaatacgacttgtttaagatttctggattaaaatgggctaacaaggacattgaatgtgaaaccgcagcaggtatcattccatgtatctactctcctaagactccagtaagtaccttacaatgggctatcggtcttgaattgttcttgcacattgaaaacccatggcaagtatgtctaaccactgaccaccctaacgcaggtcctttcatcagatatccaaagatcatctcctggttgatgagtgctcctaagaggatggaaatgattgacaatggtgaagtgcacaaatgggcttccaaaagaactggcttagctggtcttgaaagagaatacgacttctatgaaatcgctacaatctccagagcagctcctgcaagaatccacggatttgctgacagaggcgcacttacccctggctacaacgcagatattgcagtatatgacatcaaccctaatgactttgacccatccagagaccctgaaggtgttgaaaaagcattcagcaatgcttactacactatcaaagatggtcaaatcgttgttaaagatggtgacattgtatctacaaaacaaagccacaccatttggaccaacgtcataggatacgaagaagaggaaaaacaaatcatagacagcataatgcctttcttcactcaatactattctgtcaaatgggaaaactatcaagtacacgaccactatgtacctaaccctactgtagtggatgtagaagctaaataa

SEQ ID NO: 345 - DNA, 867 bp, Methanobrevibacter ruminantium
  source 1..867: mol_type = genomic DNA
atgaaaactattacttttgatcaaaagaaaacttcttcaattgctttagaatttgatgagttaatcactgataacatttacgcttggaccgaagaggactttgcagaatacaaagttcctataggaaactccagattcccaatcactgattactttgacatcaccgttgaaggagaagcagaatctcctgctgaagtcaaaatgattttaaacggagattgtaacagagtaaaatacatcggctgtaaaatgagcgctggtgaagtagttgttaacggtgacgctgaccttcacgtaggtgcagaaatgtctggcggaattgttaccgtattcggtaatgtagcagctcacgccggtcgtgaaatgaaaggtggaaaactcgaaattatgggtaataccaaagaattctgtggtgcatcctatatcggtgaatggagaggtatgtccggtggagaaatcatcatccacggaaacgctggaaaacaatgtggtgaatgtttagtcggtggtaagatccacgttttaggtgactgtgatattctcgcaggtattcacatgactaaaggtaccattgaaatcgatggtaatgttaaccgttggcctggcggtcagatgaaaaacggtaacatagtcatccacggtaaagtaggaagattacttgaaggtttcgtagaacaaggaatcgtcacagaccctgaattagatggagtcacttatcctggcagatacatcgaatacaaaggggacattgctttaaacggtaaaggtaccttattaatcgatgctgagaaaaacagagacagattatctacctggattgaagaagacgacgaatataacgcaattagagaatacagagaccaataa

SEQ ID NO: 346 - DNA, 303 bp, Methanobrevibacter ruminantium
  source 1..303: mol_type = genomic DNA
atggtcaaggaaatacttatggacccagatgatattatagaatatgtaagaaatgaagtaaaagttgatgatatttttgaattgtcttataatagggtgtttgctccaggaactgtgcttggaatcactcctgaagatgaggaaaccggtgaaggattgattctttctcttcagcttaatggtgaactcttgaatcaggcagtagacattgatttgcatgcagttaaggatgaaatcattgaagcacgtcatttgcctggtggagatgaggataaattgattgtcattgaagctacattgtag

SEQ ID NO: 347 - DNA, 303 bp, Methanobrevibacter ruminantium
  source 1..303: mol_type = genomic DNA
atggtcgataaggaattaacaatgacttctgatgaagttctagattatattaaaaataattttaaagaatttgataaagtggatattgcatacaatcgtgtttctgcaaaaggagacatattaggtgtggatctttctgattataaaggaaaaccaagttgcagagtgatgatagctttagatggtgaaatcatttccgataccattgaagtggactttgaggagtataaggaagacattattgaattgcatcactggcctaaagacgaatcaaaggaatctgtttatattgaggtaatttag

SEQ ID NO: 348 - DNA, 1038 bp, Methanobrevibacter ruminantium
  source 1..1038: mol_type = genomic DNA
atgagtgaaaaattcttaaaagtaaatatccaaaaggaacttaaagaatttgaattagatattgattttaagttaaataaaggatgtttaggcattctcggcccttcaggatgcggtaaaagcatgaccttaaaatccattgcagggattgtaaatccagacaccggaatcattagcctaaagatggatgaggaaaacatatattttgattcagaaaaaaagatcaatctaaagcctcaaaaaagaaacgtaggctacctgtttcaaaactatgccctatttcccaatatgactgttgaggaaaacatcggaatcggtgtatccaaagagaaaagggaaaaaacagtatctgaaatgataaagagattccatcttgaaggacttgaaaagagatatcccagacaattatccggaggccagcagcaaagggttgcattagctagaatattggcctatggacctgatgttatcctattggacgagccattcagcgccatggacaccttcctaaaggaacaattgcgtatagaacttgttaattcattaaaggactttgacggattttcagttctagtaacccacgaccgtgacgaggcattccagttctgcgatgagcttatcatattggataaaggaaaaatcattgcaaagggggaaactcatgaaatctttgaaaatcctaaaaaactcgatgttgccagacttacaggatgcaagaacacatctagaattgaaattatagatgattatcatctcaaatccctagactggggactgacattggaagtctctgaaaaaatctcaccaaacataacccatattggaataagagcgcatgactttgctccagccaaaaaagatgaagtaaattcatttgacactgaaaattcaagcctattggaaatgcctttcgaatgggagataactttagcaaacggcttatggtggaaacgtgaaaagcaaatccgcgagcatgagtttgtagttccagaccatataaaagtagatcctaaaaatacaatattgctggaagaatag

SEQ ID NO: 349 - DNA, 1695 bp, Methanobrevibacter ruminantium
  source 1..1695: mol_type = genomic DNA
atgtcagagtccgaacatagaatgatagaaatcctaagaatcttaaacacccatgaaaagccaataggctcaaaggtaatagcagacgaacttaagaccaaaggatacaaccttggcgagcgtgcagtccgctatcatatgcaaattcttgatgaaaagggatatacagaaaaacaaggatactctggcagagttatcaccgagcttggaaaaagcaaactggaaaagggcctaatctacgaccaggtagacttcacactgtccaaattcaaggaaagaatctatctcaccgactttgactataagaaaaaggaaggaaatgtaatagtaaacacttcaaacatccttgaaaataaggcattcgacataattaaggaagtatttgcagcaggagtctgcgtaagcccactgataaatgccaaaaagactgaaatcaacggcaaaaagggatatgtgatgaaaaccatctgtggtacaaccatagatggagtcttcttaaagaacggaatcccttcaatcccacaatatggcgggcttgtagatattgaggattactatccaaccaagttttcagagcttatctcctataggaaaacctccatcactccattggatgcattcatagcaaaaggaatgacctctgtccttgaagttgcggagcatggtaccggaacaattcctgcaaacttcagaataattccagaaagtggtctagaaaaagctaaagaaatcttcgaaaagcttgaaaaagcaggaattggaggaatccttgaaatcggagaaatcagcgaaaacattttaggaattccagttccagaaggaatggttggaatatccataattggaggaatcaccccattctgcgcagctcaagagatgaactataaggtggatataaagacaggtgaggaattcataaactacaataagctaaaagagcttgaatcctccaagcataagataaagcatgctaaaaaggtggattacaagaaaacaccattcatacttaccaaatcattaaacagagtgaatcaggtcgattatgacattgaaacaggtcatggaaacatagtgtccaacatttcatacctccagaaggaagatcttgacgatgcaataagcattatgaaaaagacatacaaggcacttccaaaatacatgaattcccatttcagcatagttgaccatccagatgacaaaagcaaagtgggaatagctacagtctgcagccttagcattgatggaatcctaatcaaaaacggaataatgagcacaccacaatacggaggacttttagagcttggaaagccacctttatttgttgaaatgatttcatacaacgggtcatcaatcgatccacataagatattcatctttaaagatttgacccaaatagccaaacgaaaaaaccctaagaaaatccttgcatcaatcaaagaggtcccatacatcgcaaggcctgaaacagaggaaatattggagaagataagcaaagaaggattttccatatttaaagtaggaaaaccaagagaattagtctataatgcaaaggtagataattataactttggaatagttacaggaagcggattgaatttaattgctgcaatcaaggaaaaaggaataaatattgaagcaaaagccgttgaaactgtcttaccaatagaagacatgagcctgatttatgagcaataa

SEQ ID NO: 350 - DNA, 1347 bp, Methanobrevibacter ruminantium
  source 1..1347: mol_type = genomic DNA
atggaaaaaagaattcaaaatattatggaaagaatgaaagcagacaatatcaagtttattagactccaatttgttgatttacatggaattccaaagaatgtgtcaattccttgtgaattggacaatatggaagacttattcactgatggaatcctatttgacggatcatccatccctggttttgttggaatcgaaggaagcgacctcgtcttaaagccagatatcagcacttattcacccctttcatggagacctgaagagtctgcatcctgcagattcatatgtgacatctataatcctaacggagagccatttgaaggggacccaagaggaatccttaaaaaagctttagcaaaaatcaaggaagaaggctacacctacaacataggacctgaacctgaattcttcattgtagacacagacgatgacggatacccaattcctcacgatactgcaggatactttgatgtagagcctgtagataagggaactgacttcagaagagaaatcactaccaatttacaggaattaggctttgaagtagaagcaagccaccacgaagtgggttccttggccaaaacgaaatcgcattcaagttccgatgatgcattaaaaactgcagatgcagtgattacattcaagcaagcaatcaaagcgattgtggcaaatatggctgatttcgatggattcgactacagagtgactttcatgcctaagccattctttggagaaagcggaagtggaatgcactgtcaccaaagtctattcaaggatggtgaaaacatcttctatgatgaaaacagtgaaactggattgtcccaagaagctatgtggtttattggtggattgttaaaacactctgcagcaataaccgcagtgaccaaccctatcgtaaactcatacaaaagattggttccaggatatgaggctccagtttacatcacttatggtattcaaaacaggtcaaccttaataagagtgcctgcagcacgtggaaaagccacccgtattgaatacagaagcccagaccctacctgcaacccttaccttgcatttgcagtaatgcttgaggcaggtatggatggaataaaaaacaaaatcgacccgggagaatctgttgagatcaacatttatgaattgaccgatgaagaaagggaagagaaaggcatagaattgctcccttccagtctatgggaagcataccacacctttgaagaaagtgaaatcatgaaagaagctcttggagaacatatattcaatgcattcttatctgcaaagtatgaagaatgggatgaatacagagtccaagtgttcaattacgaacataagaaatacttaaattactaa

SEQ ID NO: 351 - DNA, 12564 bp, Methanobrevibacter ruminantium
  source 1..12564: mol_type = genomic DNA
atgaatgataaaacaaatgattttttcagtgaatatttatcaggattatgtctggattttgatgaatccactttaattgctccaaataagaatggagaaaaggaaaaatgcataattgaaaagtcagaatatgaaattaaaaaagataatttagttggatttgcaaagtccaattcaatttcaatcaatgagcttatattggcaagtttaactttaacacttaataaattcaatttttcaaatgaaaccttaattttcaatcaaaataatgttccatttgctgctaaatttgaaaacagacaaatttcaattagggaatttttagaaaaaattcatgagaattatattaaaacattggaattcgatgagtattttgataaggatgaccttcctttaaatccggaattttattttacgttcgatgaggatttaaaatcagatgcagaatattccaattatctaagcattgttgaaaatgatgaaactgtttctctctttttatcttataatgatgaattatatacaaaggagttcatcaatctattcatatcaagccttgaaaaaatccttgaagaaatagccacttcggatattgataagacaaatatctgcgacattgctattgtaggtgaaaatgaagatctcatcttcactgaagttgaaatgcctttgattcacaggcgttttgaaaagcaggctgtggagaagggggatgagattgctcttgttgcaagcgatgccacattgacttacaagcaattggatgaaaaggcaaatgtcattgcaaatgcattgatagctaagggagtcaagccgaaaagcaatgtcttagttatgctttcaagggatagcaatctgattgcttccattttaggtatccttaaggcaggctgcgcattcattccaatcgatcctgaataccctcaagagagaataaactacatctatgaaaacagtcaggcagattatattattgccaacgaatctggagaaaagtctttagacattgaagagttgcttaaggatggcaattcagatgatcctgagcttgatgttgacccggatgatttggcctatatgatctacacttcagggtccacaggaaatccgaaaggtgtaatgatcagccacaaaaacatctgcaatcaggcttcaaatccaaaatccacttatgaaagtttgctttgcattacaaccatctcttttgacgtgtctgttgacgacatattgacatccctttcaaatggattgaaattggtacttgctgatgatgttcaaatcaaaaatattccagctctaatcaagttaattgatgaaaacaagcctgaaattttagaaattactccttcaagaatggggtcttatcttgaggtaaaggaattctgcaatgtcatatcctgctttaagtgtattttcattggaggagagaaattttcatcaaaagtttatgaagatttaagaaaatatagtgatgctgtcgtctataacagttacggcccaacagaaacaacaatcacctcaaacaacaaggcggttactgatgtaaacgatttgactgtggggcttcctcatattaattatgtcaccgatgttcgtgacattgacggcaaattggtccctgatggtgtaatgggtgaactgtacattggaggtaccggtgtaggaaaaggatactacaacatgccagaaaaaactgcagaagtgttcctgaccatcaataacattccatattacagaagcggagactatgcaattaagcttccaaatggcgaaatcgacattaagggaagaattgacaaccaaatcaaactcagaggattaagaatagaaatcggcgaaatcgagtctaacgttggcaaatatccaaatatcaaacaggctgtagttgtaattaaagagattaacgataatgaacatctatgcgcttattacactgccgatgaagagattgatagtgatgatttaaaagagtttttaaaagaccgccttactcgttatatggttcctactgtcttcatgcagcttgatgagatgccacaaacaccaaacggcaagacagacttgaaacaactgccagtgccacagcttaaattgtcatttacccttccagagagtgaaactgaaataatcttgcatgaaattgcttcatcaatcagcaaaacaaaggaattcggtactaccgatgatttgtatgctattggatttacttcattgacactgatgaaattaaatgcaaggatttatgaggaaatgggtgttaatttagatattatttcattattgaatgatcctacaattaaaaatattgcaaaggaaatagaaaacaatgatattctggacttgaatggtgtaatagaatcatctaaggatatggtttattatccattgacagaaaatcaaatgggaatctattatgagtgcattcaaagcggcgagcttgcacaatataatctcccatcagtaataagatttggcagtgaaattgatgctgacagattacatgacgctatcatcaagacaattgaggcatatccttatcttaaaaccagaattgttctagaaaaaggtaaagtgatgcttaaacgtgatgattcaatagatattgatgatattccaattattaatgttgatagtatttccgatgagcaaatcgaaaaggaaaatctaaagctatttgatttgcataatgaccagttattcagatttaaaatctataagactcctagcgaaacaattttattctcagatgtccaccatatcatttccgatggtgaatccttagataagctctttacaaatatttccaatgcatatcaaggaattgaaattgaaaaggaaacaatcaacggttacattaacagcataattgaaagtgagaatgagaacagtgaaaaatatgaactgtctagaaagttcttccaggataagttaactcaagaaattgattccactgtactcactccaaatctcaacggcaattttgaagagggaattttaaaatcaatttccaaaaatatcgactccgaattggtcaacaggttttgcagtgaaaacaggataacccctaatgttttattcatggcagtaaccatgctcaacctaaacaagtacacattcaatgacaaaactttgattacaaccattttcaatggaaggtcaaactcatcctacatcaacacacaggcattgctggttaaaacccttccgattgtttcaatcaatgatgataggacattgtcatttaaggaatatttaagttcagtcaatgacatctggatggaaaccatcaatcattctgattatccttatactaagatctctgaagagtttggattgaaaccagagtttttctatgcctacaataatcttgatgctgaagaaattgcaattgatggcaagacttataaagtcaaatatttgaaatcacttgaagtcaattataagatatctttggaagttaatgagacttgggacaatattgaattattccttgagtacaatgaccaattgtatagcgcagattacattgacaccttcttaaattgcatcatcgatgtaataaatcaattaattgaatcggatattgaagaattaagcattggtgaaatagaattgggtaaaggtatagagacacccttatcatttacacctgttgatatgcctattttacataagcgatttgaaaaacaggtaactgataaaggtgatgaaaccgctcttgttgcaagtgatgccacattgacttacaggcaattggatgaaaaggcaaatgtcattgcaaatgctttgattaaaagaggagtcaagccgaaaagcaatgttttagtgatgctttcaagggacagcaatctgattgcttctattttgggaatccttaaggcaggctgtgcattcatcccaatcgatccagaatatcctcaagagagaataaactacatttatgaaaacagccaagcggattatattattgctaacgaatctggagaaaagtctttagacattgaagagctgcttaaggaaggcgattttgaaaatcctgatgttgatgttggccctgatgatttggtctatatgatttacacttcaggatccactggtaatccgaagggtgtaatgattagccatgaaaatatctgcaatcaggtttcaaaccctaaatcctcttatgatagtcttctttgcattacaaccatatcttttgacgtgtctgttgacgacatattgacatctctttcaaatggattgaaactgatacttgctgatgatgttcaaatcaaaaatattcctgctttgattaggttaattgatgagaataagcctgaaattttggatagtactccttcaagacttgcctcctatcttgaggtaaaggaattctgcaatgtcatatcctgcttaaagtgcattttcatcggaggggagaaattttcagcaaaagtctatgaagatttaagaaaatatagtgatgctgtcgtctataacagttacggtccaacagaaacaacaatcacctcaaacaacaaggcggttactgatgtaaacgatttgactgtggggcttcctcatattaattatgtcactgatgttcgtgacattgacggcaaattgcttcctaatggtgtaatgggtgaattatacattggaggtaccggtgttggaaaaggatactataacttgcctgaaaaaacccaagaggtgtttttgactatcgatggcattccatattacagaagcggagactatgcaatccaacttccaaatggcgaaatcgacattaagggaagaattgacaaccaaatcaaactcagaggattaagaatagaaatcggcgaaattgaaaccaatattggccaatatcctgatataaggcaagctgttgttgtaattaaggaaatcaacaacaacgaccatttatgtgcttattacactgccgatgaagagatcgatactgagaatctaaaagagtttttaaaagatcgcctcactcgttatatggttccgactgtgtttatgcagcttgatgagatgcctcaaaccccaaacggcaagacagacttgaaacagctccctgaacctcagcttaagttggctttggtgatgcctgagagtgaaactgaagaaagattatatgatattgtctcatctcttgtggatgctgatgagtttggtattacagatgacttatatgccattggatttacctctttgacattaatgaaattaaattccatagtctatgagcaaatgggggcgaatttagacatttccatattattcaatgagccaacagttaaaaactttgcaatagaaattgacaattcctttgaaaaggattctggccttgaagagcttatagaatcagctaaaggcttggaatattatccgttgactgaaaatcaattagggatttactatgaatgtatgcaaaatccggatgtgattaagtatacgatgcctacaacagtaagatttgacagtgatcttgatgcaaatagacttaaacaggcagtcattgacactattgaagcacatccatatattaaaacaagaattgtaaataatgatggtgaattaaggcagaaaagatgtgatgatgtggcaatcgacgatattgaaattgttaaagtcgatagcattagcgatgaggacattgtccgaaatgatgtgggtccgatttctatagaggacagtcaattgttcaaattcaaaatatatgaaacccctgatgagattgtcttattctcagatttccatcatataatcactgatggagtatcccaaaacaatttatttagagatatagccgatatctatgaaaatagagaaatatccgaagagataatcgatggatatatctacagtcttttggaaaaagaagccgaaaacagtgaaatatatcaatctgcagaggcatttttcgatgataagttaactcaaggaatagaatccactgttctgactccagaccttaatggaaatcctgatgagggtaaaataaaaaatctttcctatgcttttgattcagaattgattaatgagttctgcaatgataattccataagcaaaaatgccttgtttatggcaggcacaattttaaacctgaacaaattcacattctctgataagacattgataacaacaatattcaatggaaggtcaagtccaagctatttcaatactcaaggatttttggtaaaaaccgttccgtttattatcaataatgaaaacaggcaggcatcacttagggatttcattaaatccattgaccaaagctggaaagataccttgacaaacagtgcatatccatatattaagatagctgagaaatatcaattaaaacctgaattcttctatgcttatcatgaattcctagagtctgatgaaatgatgataaatggcaaggagtacattccacaagaattagctggggttgatatggttacagttgaatccaaaatcaatctagctgtttatgataatggtgatgagtttaatcttattttggaatataacgaccagctctacagtgaagattatgttaaaacattcatagaatccctgaagagcattttagttcaattccttgaaaatgatatggacaattatagaatctgtgatgtaaaattaaaggatgatgaggaagtgcatgaatttgttgatgtggaaattccatttatccataagcgttttgaaaagcaagttgatgaggctcccgaaaagattgcattaattgcaagcgatggctcatggacctatggtgaacttaaccaaaaggcaaatcgtgttgccaatgctcttataaacaagggaatcaaagccaacagcaatgtcttggtaatgcttccaagggacagcaatctcatttcagctattttaggtgtcttaaaggcaggctgtgcattcatacctattgatattaactatcctaggggcagaatcgattatatttttgaaaacagtcaggcagattatcttatagcagataggggaattgaaaattcaattgacattaatgaattgctccaagaggagaatgcctcaaatcctcaagtggaaattgatccagatgatttggcttatatgatttacacttcaggttctacaggtaatcctaagggagtaatgaccagccatatgaatattacaaacttattctccaaagatgagggtagtgtaatttataatgcatattcaaaaatgaaaaggactcttgccctttcaacagtatcttttgatgcatttctgcttgatttcatgccattgaccttcggtttggaagtggtgctggctaacgatagtgaaataaagaatattaaggaattggctgaattggttaaaagagaaaaaccggattcacttacattttccgcaccatcaaggtttaagcaatatctggaatatgaggaattcgccaaacaagtacctgacttcaggtatattggtcttggtggagagatggtacctcaagacctaatttcacgacttttagagtatcctaatttagaattgtataatatttacggcccgactgaaacaacagtgacatgcaatacccataagcttagtgatgcggagaatataactgttggaagggccctccacaattgcataactgaagtcagggatattgatggaaaactggttcctaatggagtgatgggagaattatacatcggaggtaaaggagtatctagaggatattacaatatggaagaaaaaaccaaggaagtattcctatctattaatgatattccatattatagaagcggtgactatgcaattgaacttccaaatggtgatttagtaattaaaggaagaatcgacaatcagattaagttaaggggattgaggatagagcttggtgaaatcgaatccaatattgccagattcccacatatgaagcagattgtagttgtgattaaggaaatcaataatgctgaacatttatgcgcttatttcacagctgatgaagagatagacataaagctcttgaaaaggtatctgggaaataagctgactgaatatatggttccaaccgtatttatgcagcttgatgagatgccaatatctccaaatggcaagacagacattaagagacttccaaagccaaaattaaatctggattatgttgaagctgaaggggaaactgaagaaaagttagttgaacttgtttcatccattgccaatacaactaacttcggcacaacagacaatctatatgaattgggcttctcttccttaacattaatgaaattgaactcaatgatcttcaatgaaatgaatgtgaatattgacataacttcattgtttacaaatccgacaatcaagtcccttgcagataagattgacaataatatagaatttgaaatagacattgatgaaatcattgagactgcaaaggatatggattatttcccattgacctcaaatcagatgggaatctactatgagtgcatgcagactgaaaaaatcaaatacaccatgccatatgcaataaggtttgaaagcagcatcgatccttataagcttaaggacgccgttatcaggactgttgatgcacatccatatctcaagacaaggattatcaatactgatgatggaaagatattgcaaaagagatgtgacgacgttgaaatcgaggagatagaaatcgtcgaaatagattctatcagcaataggcagataatggacagggacataaagccaattccattggatgataatcagctattgagatttaagatttataagacacctacagaaacaatattgtttgctgatttccatcatatcattacagatggagtttctcaaggcattttcttcaatgatttggctaaggcatataacaatgaggaaatcgaggctgaaaaaattgatggatatgaatacagcctgattgaagagaaaatttcccttagcgaagtctcagagaatttcttcaagaaacagtttagtcaaggcattgaatcaactgttctaactccaaatatgaatggcaatccagatattggaaacattaagctcatttcagatcaggtaggctccagttttgtcaggcacttctgtaaggactattcaataagtccgaacgttttatttatgggcgctacacttttatgccttaataaatttacattcagcggaaaatcattgattacaacaatcttcaatggtaggtcaaactcaaattatgacaatactcaaggaatgttggttaaaacattgcctatcattgtaaatgctgaaaatcgtgacatgatggttgaagattatataaaattggttgataaggcctggaaagatgcattgacccatagcaattatccctacacaaagcttgcagaggattatcagttaaagccggaattcttctatgcattccatgaatcattaaaaagtaaagttgagcttgatggcaggacttatgaggcgattgaccttgacggtactgtttcaactgattataagataaacttggatatctttgatgatggggaatttattacattgtatttggagtataatgatcaaatctatacagaagagtatgttaatcagttcatacgttcaataaaatatatcttattccagttctttgtacatgatatggataaattgagaataagggatattgaattggttgaaggggaaattccagagtttgaagagattgacactccgattattcataagcgctttgaaaagcaggttgttgaaaagccaggtgatgtggcattggttgcaagtgatgccaccttaacttatggggacttgaatgagaaaagcaataggattgcaaatgcattgattaggcggggcgtaaagcctagaagcaatattctcataatgcttaagagggatagcaatttgattgcttccattttaggtgtcctgaaggcaggatgcgcatatgttcctatcgatcccgaatacccttccgaaagaatcaactacatttatgaaaacagccaggcggattatatcataagctatgagacttcagagaattcattaaatgtttatgagcttcttgaagaggaaattgttgtaaatccaaatgttgaggttcttccggatgatttggcctatatgatctacacttcaggctcaacaggcaatcctaaaggtgtgatgattagtcataagaacatctgcaatcaggctcaaaaccctaaatccacttatgatagtcttctttgcattacaaccatctcttttgacgtatctgttgatgacatattgacatccctttcaaatggattgaaattgatattggctgatgatgttcaaatcaaaactcttccggaacttattaaattgattgatgagaataagcctgaggctttagagatcactccttcaagaataggctcttatcttgaattggaagagttctgtaatgtgatttcttgtttaaaatgtattttccttggaggcgagcagttttcagcaaaagtctatgaagacttgagaaaatatagtgatgctgttgtctataacagttacggtccgaccgaaacaacaatcacctcaaacaacaaggcagttactgatgtaaatgatttgactgtagggcctcctttaaaaaattatgtcaccgatgttcgcgacattgacggcaagttggtccctaatggggtaatgggtgaattgtacattggaggtatgagcgttggaaaaggatactacaatatgcctgaaaagacagaaaaagttttcttaaccatcaatggcattccatattacagaagcggagactatgcaatccaacttccaaatggagagattgacattaagggaagaattgacaatcagatcaaactcagaggattgagaatagaaatcggtgaaatcgaatcaaacattggcaaatatcaggatataaggcaggctgttgttgtgattaaagagattaacaatgttgatcacttatgcgcttattacactgctaattgcgaaattgactctgatgatttaaaggagtttttaaaggaccgccttactaattatatgataccgacagtgtttgtgcagcttgatgagatgcctcaaactccaaacggcaaaacggatatcaaaagacttccgcagccaaaagtggaattgaattatgtggctccgaaaacaaggcttgaacatgagatctgtgcaatattttcatctatattgaatatagaaacagttggtgtagaggataatttctttgaaatcggtggaacatcacttattgcatcaaaattaattattgaacttcttaaacagggatatagtgtaagatatgatgacatattcaggaataaaactcctagagcactggcgaaattattgtctggtgaagacattggcgaagaggacttggatttaactgatgatatcatcaaaaactacaattatggcgaaatcaatgagcttctccaagagaatacatgggaaaacttctttgatggtgaaaatctggaattgggcaatgtcctattgactggagctacaggatttttaggaatccatatcctatatgaattcatcaaaagtgaggaaggaaagatctattgtatgttaaggaaaggcaagtttgattcctgtcaggaacggttgattgatgtgatgaatgattactttgatgaggatttcactgatctcgtcggctcacgcatcattccaatcgaaggggacataactgaaatcgatgattttaaacagcttgaggatgagcctattgatacggtgataaattcggccgcacttgtaaagcattatactgccgatgattatatcttcagggtgaatgtcgatggagtaatcaatggacttaaatttgcccaaactagaaataacataaaatatgtacagatatcaacaatcagcgttctttcatcatactccttaaatgaagaggcatatccgaatcaggaatatgatgaaaggacattatattatgagcaggatctagaaaacaaatatgtatgcagtaagtttttagctgaaagggcggttctgcaagctgcaactaaagggcttccagtaaagataatcagagttggaaatcttatgagccgttattcagatggtgtgttccagaaaaattatgatacaaatgcatttttaaataacattaaaaccattaaaaaattaggagctatgaatcctgcaatggctagtgaaaaggttgacatgagtcaaatagattatgttgcaaagggaatacttgcattgtctaagactccagagaaatccagggtattccattgtatgaataatcattatatttcccatagggatattgttgatgcattgaatacatacggttacggaattgaagaagtggatttcgaagaattcaaacagatttacgaacaaaacatgaatgagaatatacagggtataataactgccgatttttcaattgatgactttgatgaggaagacgatttcgaggagaatgtggaaattgaacagactgttgatattcttcattcgttaggatttgattggcctgaagcagatgaagagtatcttaaacgattgtttgattatttgaataagtttgattattttgaataa

SEQ ID NO: 352 - DNA, 1620 bp, Methanobrevibacter ruminantium
  source 1..1620: mol_type = genomic DNA
atggctttaaacatagcttcagtcgttgatgcaagttttgtatcaacctttatcggacacaatgcacaggcggctttacaggtcttagagcctttggtattgttaattacaatatttgaatggctgtttggactgggaggtcaaattttagctttgaataaaaaggcggaatttgatgaaggtggaagcaatcattatttcacaactgcaatgcttgcaacaatagttctatcagttttgattttattggtatgctttttatttaaagattccttaattaatctattgcatccgactgctggagcactgccttatgtaaacgcatatagtccatatttattcatcagtttcccaattgcaactatcttgggagtattatgtcaatttattcgtgttgacgggcaaccgaattttgcttcaggagtaattattgttgcaaatattatcaatataattttagattatctcttccttggtgtttttcatatgggcattgaaggggcatcacttgcgatgatgataggttatgcagttggattattgtgtactttaaagtatcattttgattcaaaaagaactttccgattcgttttttccgaattgaaatttgggacttggatacgctcaacaattgaaataatcaagataggtcttccaggggcaagcatgggcttctttaatgtattgttgatctatatcatgaatttaattgttggcggagttttaggagagctgggcttggatatattcaatgtatgtgtggttgcattgcttttaataagcattttaatcatgggattcgccgaaacattatcttccattgttcctatttattatgcccaaaatgatttctataatcttcatcatattgtgcgaaattcaattataataacattggtctgttcggtgatattcactgcattcctcttaatatatcctgatggtctattgatgtttttcaaacttcaccaaaccgctaatgatggattagtggaaaatgcgattaggatatactcattggcattcatacctatggcattttcaactatgctcttgttttattatgaagggattgaaagaactgtggaatctggaatcattacagtcatttctgaatttcttggaccattattttttacatacctattatatccattcataggcataaccagcgtttggctatctttccctttaggttttattctatcaatagttgctgtatccatttatgttaaggtggttgaaagaaaagatagcgaatattcaggattgtttttcattagaaggggattgattgaaaaaacaagaaattacactttagaaagcaagaatgatgctgtgaaatctgaaatgtttaatcatttaaagagtttgaatgtggatgattcatctattgaaacattggataagattataggtaccatatttgattcaaacaatgaaaaagtccatgtggagatattattgattgattatggtgataagatagttatcaatatgaaagatgagggaaatagagaagtgatgaaggatattgaaaagtccttttcccaagataaaatcaaagttagtgaagtgttgggatttaataatgtagaatatttgattgatggggcctag

SEQ ID NO: 353 - DNA, 750 bp, Methanobrevibacter ruminantium
  source 1..750: mol_type = genomic DNA
gtgccagaaagatataaaggatttggatactgggatatagcaacccgtcaaatgggcattgtaagtaaaagccaacagacaagatttaaagatgctaaagtagcagtcataggatgtggaggcattggaggagaaacaattttaatgcttgcacgtatgggaataggagaattaatcattgtagataaggatgaatttgacttatccaacttaaacagacaagcgatgagtagcatagacacattaggactttctaaagcagatgtttcaaaagaaaaagtaagattaaccaacccatacacaaaagtaactgcaatcaacgaattcatcaatgaggataatgtggaatacttcaaggactgcgatgtaatattggatgcattggacaatctctatacaagagtgatcctaacaagatttgcaagggaaaacggcattccttatgtccatggagcaatccacggaacaaaaggacaggttacagtatttacaaaggacaccaagtcctatgaagagatgttctcacttccatcccttggaaaggaactgggagaggaaacaaaagaggaaatatcaaaattaacaaagggagttcctcctgtaattggacctaccccaaatatagtggggtgcttggaagcatttgaagcttataagttaattacaggcattggagaagtcacctatgctccaaagatacttaattttgatctattaaacttagaatcttttagtgttttagaattataa

SEQ ID NO: 354 - DNA, 1170 bp, Methanobrevibacter ruminantium
  source 1..1170: mol_type = genomic DNA
atgaaatatagaactttaggaaaaactggagaaaaagtttccattttaggatttggagcaatgagattgcctcattttgaaactaatgatcaaattgatgttaaaacatctgatgaaatcttaagttatggaatagataatggaataaatattattgatactgcttattcatatcatgcaaataacttatctggaaaaggaaagtgtgaagagtacattggaaacttcctaaatgagcattcttatagagacgaagttttattgactgcaaaaatgccaagctggctgatagagacaaaagaagacatggaaaaaatctttgaaagccaaatgaaagatcttcaaacagattgcattgacttatacatgcttcatagccttaatgaagactattggaaaatgtatagggaaattggtgcatttgaatttatggacagtcttttagaaagtggaaaagtaaagcacattggtttttctgcccatactgaaatggattggatagtagacattgtagatgactatgacaagtttgagtttggccttacccaattgaactatctggacgagagatatcagtccggaagggaaggggtggaatacattcacaagatgggccttggaactatgattatggaacctcttagaggaggacgactaatccagaacattcctcaagacattatggacctttgggacactgcagaggaaaagagaactcctcttgaatgggcatttcaatatctctggaatatggaagaagtcgatacagtactcagcggaatgaattcaatccaacaggtcaaggaaaacattgagatagcaaataagtccgaaataaactcaatcagcaaaaatgacttgaacctaatcaaggaagttgcatgggaatataagcaaagaaagggaaatgactgtacaggatgccaatactgcatgccatgccctcacggagtggatgttgcaggatgcttcagggagtacaatattgcaaaaatgctgaataaccctgcaggaagcgccatgcactatttctcattggaaagcgacacaagggcagacaaatgcatacactgcgatgactgcctatatcattgcccacaaatgattcacatctctgaagacttaaagaaggtagatgagttctttgggcgaaaatacgactatttctag

SEQ ID NO: 355 - DNA, 1497 bp, Methanobrevibacter ruminantium; identical to SEQ ID NO: 119
  source 1..1497: mol_type = genomic DNA

SEQ ID NO: 356 - DNA, 246 bp, Methanobrevibacter ruminantium
  source 1..246: mol_type = genomic DNA
atgaaaagaacaattaatgaaagatgggaattatggtataatcgaatcttgccatatattataatttttgattttatattgattacagtttcactcatactaaatgtttcagaacctacaatggctcacattgaacattttgaccttttagtctgcataatccttttgggagaattcttttattttttatacaaggcaccgtcaaagaaaaagttcctgcttgacagggatatcttctgcttttga

SEQ ID NO: 357 - DNA, 270 bp, Methanobrevibacter ruminantium
  source 1..270: mol_type = genomic DNA
atgcccgttaattttccaggaaccattttaggataccttagaatgttaaggttaataagggtgataagctttgcccgaatggggtcctttgaagatttcttcaaaaagacagagtttcacaaaatcataattgcaatagcaatcattataatgacattcacagctctgttttacgtgtttggaaccagctacaatccttttgattatttctattttgttatagtggcactgacaactgttggatttattgacaaaccccttaaaaaataa

SEQ ID NO: 358 - DNA, 333 bp, Methanobrevibacter ruminantium
  source 1..333: mol_type = genomic DNA
atgaataatattgcttatcttttacttgcaattctatttgaaaccagtgccacatcactgttaaaagttgctgaaggtttcactaaaccattgccaacaatagcatcaatcatattatacatattatcattttacagtctcagcaactgcctaaaaacagcaccaataggagttgcatatgccatttggtcagcattgggaatcgtgcttgtgacaattgtagggattatcgctttcaaacagacccctgattgggctgctatccttggacttttacttatcattataggtgtaggggtgctaaatctattctcaaaaatgagcttacattaa

SEQ ID NO: 359 - DNA, 387 bp, Methanobrevibacter ruminantium
  source 1..387: mol_type = genomic DNA
atgacaattaaaagaaaatttgataaactgcccccatactgtcaatttgaaaaaaatctgaatcttattaaaaacaaatggacagtatacattttaagggacatgattcttggaaaaaaatatttcagcgatttcaaagaggacaagcctgaactgtccaataaaatcctaacacaaagacttaaggaactggaagaaaacaacatcatcgaaaaaaacatcaaagataatgaaacatcatatcacctgactgaaaaaggccacaggcttcaaaacatattatacgaactcgccattttcaatcttgaagaggaatatcatggagaggaactggaaaaaattaaaaaagaatttgaacagttaaaatatgggggaaaccaaaaatga

SEQ ID NO: 360 - DNA, 801 bp, Methanobrevibacter ruminantium
  source 1..801: mol_type = genomic DNA
atgaaagaaaaaatatttatcaatggaagaggaggatgtggaaagagcacattcatatcattaattgcaaaggaattgtcaaaaaacaataaagtattaataattgatatggatgagggaaacctcggattgaacaagatgcttaatgttgatgttgcagacacttcattaatggaatattatggtggaagagataagataatgggtgaaattttaaaagtaggaattaaaggtatggttttagaaaaaatcaacctgaaagatgacgcagcctcagattcaatagatattttggataatatgaaattatcagatttaccttccgattatgtgacatggaacggaaatataggattcattgaatccggaaaaatcaacgaccctgatgaaggctgtgcctgtccgatgggaaatcttacaagagacttcctaaatcacattgaattacaagacaatgaagtaatattggtcgacacctcagcgggaatagaacacattggaagaggagtaattgagtctgcagacaaactcatttcaatagttgacccgtcaagcgatgcaatattgttggcaaataaaataggatcattatcaaaagaggcatccaaagaatatatggtaatattgaataaaattgatgaaaatactaaagatttggtattggaacaattggatgatgacatatctgtcgttggggaacttgaatataattcacacatagctcaaagcaacctttcccaaaaagaaattaaccttgaggaagtagaaggtgaaattaaggaaatctgtgcaaaaatttaa

SEQ ID NO: 361 - DNA, 828 bp, Methanobrevibacter ruminantium
  source 1..828: mol_type = genomic DNA
atggatttgcttttttatgttgttttgctgttgattggaggttgctttgcaggtttcatggcaggccttttggggattggcggtggaattgtaatcactccaatccaatattatcttttaacctcaattggatgtgatcctaaaacgtccctaacggttacctttgcaacaggtcttgcagttatctgtgtcacgatgataaacagtacacgaaagcacaaacaaaacaatctaatagtaaaacagcacctaaaaccaatgatggtctttggttttgtaggtgccattctgggtgcagtcatatctcaatacatagatgttgaggttttaaagattttgtttggtgtaatatgtatagtatcaacagtatttttagttttaataaaatctcctacctctttagataatattaaaactgatgcaggattattttactctattgcatttgcatgtggtcttgcaagcggattgataggtcccgcaggaggagcatttatcataccgattttcgtggcatatttgagatatccaataacaaatactatcggaacaacttcagcattaagcatcgcaaccacacttgcaggggtaatctgttatattgttttaggttggggtgttcaaggattgccggatttttcattaggttatgtcaacttgcttcaattcgtatttttaacaataactagcattattgtatccggatatgctgctaacctatctaaaaaaatcaatcctacaaaattaaaagcgctgcaggtaatcgtaatatcatatattggccttcaaatgatgggtgtattcgacataatattaagcataatataa

SEQ ID NO: 362 - DNA, 219 bp, Methanobrevibacter ruminantium
  source 1..219: mol_type = genomic DNA
atgtataaggtatggaaaaattgtattggttgtggggaatgtgcaaaggcatgtgattttaatctgattcaaacatttgatgattatattctgatggatattgaaaagtgcaggcattgctcaaaatgtgtagaaacttgtcaaaacaatgtttttacaaaatcagttatttttaaacactttttatatctattatattataagattaaaaaatcttag

SEQ ID NO: 363 - DNA, 408 bp, Methanobrevibacter ruminantium
  source 1..408: mol_type = genomic DNA
atgaaaattgcaataagatattattcaaaaactggaaatactgaaaaacttgcagaagcaataggtgaagctatcggtgttgctccaaaaacaatagatgaacctttaaacgaagatgttgacatattgttcttgggaaatagtgtatataatgctggagcagattcaaaagtcaaggaattcctcaaaaatattgatgtgaatgttggaagtattgttaatgtctcatccgcagctcttatcgaatcaacctataagcaaataaaaaaagaagctgaaaaatgtggattaaacatggatgatagagaattccattgcagaggacaatttaaattcgttcatagaggtcatccaaacgaagaagatataaacgaagccgtaaactttgctaaaagtattgtcagatag

SEQ ID NO: 364 - DNA, 546 bp, Methanobrevibacter ruminantium
  source 1..546: mol_type = genomic DNA
atggcaaaatatatcgttataaatggaagtacaagaaaaggaaactcatatgcaattgcaaatttcatcaaagaaaaaattgatggagacgttgaaatattcaatataaaagataaagaaatcggattttgtcaagctgataatgcttgtaaggcaaaagacgaatgcatagttcaagatgatgcatatgatttaatcaatgatctggaagaatgtgacggtgcatttattatcacccctattttctttggaaggcttcctggaatggtcgatgctttaattgacagattctattccaaattcaatcctgcaaaagagatgaaagcaccagacgaatcaaaaaaaataggtatagtattcagctatggtggaggagaagcagattacacacctgtagctgaacatgtcgcatttgaatttggagtattaagatttggtgctcacaaaaatgttatgtgtagtgaaaacaatgatcctaaaggatttgaaagtaaagacgaccaacaaagccaaattaatgagttaattagttgggtttgtgagtag

SEQ ID NO: 365 - DNA, 702 bp, Methanobrevibacter ruminantium
  source 1..702: mol_type = genomic DNA
atgagtgaaagtgatgaaataatcaaaagactggacagaatagaaaatgaattgattacaataaaagaaaataattacaatcaaaaccttcaaactgccattgaaagcattagggacacctactctaattcaatcaagaaaaattttgcagacaatctgggggagaagtgtagtgaattttatctcccaaattgcaaaaatgaagagtgcaaacaatttatagtccaagagttcaaagaactttttttaaatactcaagaaacagacctcaacaaacttaatgaacagctggatgaaaaattttattctgtatgtggcgtagaatgtagtccatgctacaataactttaaggaatacttctttgaagagttgaagatgatcaattccattaatgtgtcatatgaacttaatgaaaatgaaccgattgaaaagttggatgtggatatgttaatttccgatgtatttgaaccgttatcgagcaagcaaagggttatcataatagaatcgttatatgtagaaaacaaatcatatactcaactttcacatttaactaaattaaggggaggaaacctactgttccaccttgaaaaactacaggatgcaggtttaatctcacaaaaacaagaccgtggcgaatacctgctcacaaaaaaaggttatacaactttgtccttaataaatcaatttcaaaaattaatgtaa

SEQ ID NO: 366 - DNA, 1896 bp, Methanobrevibacter ruminantium
  source 1..1896: mol_type = genomic DNA
atggaaataattgatttgttcggtgcggctttgactggagtcaaagaacagaacgttgatttgcttttcaaatcaggattatatatgttaatgtataccgtcatttcaatgattgccgtttatgtcatctcttttctcacaacaagagtggcttcaaaatcagcatatactgtccgtgagaaaatattccatattctgatgaacttgcctcgtgaggaaattgataaatttaaaatttcagggctagttacaaggtcaaccagaggtatgtcctccgaacagggatttatagtgatgatactcgaacagttaatgcttattccagttacattcgtagcaattgtatatgaaatagcattgattgatggaacttatgcattatttttcttaggatttattggtgttctttctgcaatcataatttttagaatgaaacagattgtggaaatatttttcagagctaaaaagacatatggtaaactaaatttattattcttatccaaaatcaatgatatagctggcaggattccatttaacaaacaggagtatgaagtcgaatttgaaaaggcatgtgagaactcctatgataaaaatgtcatctatattaaaagtcaatgttacctcggaccaatattaatgtggggtttatatgttattgtcctggttacattggcaatggttaattcaggatacaccattggatttgaaactgatagtgtaattgattcattcattattctggtatatgttgcctacttcatcactactctagctaatattcctgcattaattgacagatggccacgtgcatatgccacttctgtgcgtttggaggaagtcttgaatattgaagataaaatcataaaatccaatacaaatgataatctgaaggaaatagagattgttgaggaggatattgctcaagaggctaagggcatatgggatgaaagaaagggtatctctgaaaaattcactgcattgttaaaagaggataaggccaaagtaagaatatcaatgattttacttacgatatccacattgtgcatggtttatgccccaaaagttgccggaaaaacagttgatttattggcttccaattggaattcaactaatgaccctgctatctacattagtcttgccctgttgctggtattgtattcagtaggatatctgtttaaattacctccaaagagaatcatgggggccacaggtgaaaaagtagcatatgatttaagagtgaaattatttgataagcttgatgctgttggttccgatttcattcaggaaaattcaaagggtcttgttctatccagactaaacaacgatgtgatgaacatcagggagtttgtttcatctaaatttactgaaatttatgcgcagattctatttatagtctttgtaatagtgttgattgtgatgacagacttcaggttgagcttaatataccttgtgatattgccggtttatgccgtttgcttttatgtatgtgatgtcaaatctaaaaactattacgatggtcatcaaatgcagttggggagattgatgagctattttgaaagaggcctgtcaaatcgtgattcattccatgaaaaagggtttaaaaaaatgaatcaaactgtaattgactattatgtcaaatccaaaaacgttactaattttatggtgcctgttacaacccttttaacaaatataagtaagataactgtttatattgcggggatttactttttagcaggtaatgagattcagatagggactctattggcagttattatgtatgggcaattattaacagatcctattaaaaagctaagttcctcgatggccactattgaaacttcattttcaagcatcaaaaggatatttgcaatcattgactataaaaacgataaataa

SEQ ID NO: 367 - DNA, 1044 bp, Methanobrevibacter ruminantium
  source 1..1044: mol_type = genomic DNA
atgcccgaattcaaacttattgaaaagttactatacaaaagcgaacagaacgatatagaagctgagtttataattggaaacgaaacattatggtcaagtcaaaaagtcatagcagaaatatttggaacaacatcagccaatatttcaatgcatttctcaaatataatccaagaaggagagctagatgaaaaagaagtaagcatatcttctaaagacctttttaaagacaatcccaattttattaagaaatccttaaaaaaatcaaataatcgaggtaggccccaaaaatggtataatcttgacgcaatcatatcaataggatacagaataaacagtaaagaagcaacacagttccgccgttgggccaataaaatattaaaggaatatatgataaaaggatttgtcatcgataaagaacttctgaaaaaaggtggaagatttacagaagactatttcgatgaattattagaaaccatacgagaaataagggcttcagagagaagattcaatcaaaaaatcacagacatttatgcaacaagctttgattataacaaagatgcagacataacaaaagaattctttgccacagtacaaaacaaactgatatttgcaataagcaaccatactgcagcagaactcatagaaacacgaagcgatattgaaaatcctcatatgggcttgacaacctggaaaaaagcaccaaatggaaaaatactacaaagtgacgtggtcatatccaaaaattatttgaatcaaaatgaattatcaagattaaatagtttagtagaaggttttttgaatttagccgaatcacgcgcagaggatagaatcccaatgggtatgaaagattggaaagaactgctggatgactaccttaaacttcgaaggctgccaattcttgttggcaaaggtaagatatctgctgaagaagcacgagaacatgtgcttgaaaaatatgaaaaattcagagtagtgcaagatgaaaacttcatttctgactttgatcaaatgattttagatattaaacgtctagaaggaaaataa

SEQ ID NO: 368 - DNA, 135 bp, Methanobrevibacter ruminantium
  source 1..135: mol_type = genomic DNA
atgaagttggtcaaaaggaaccagaagttgcatgatccagattcaccgttgctgattggggatgttaaagatggggatgttgtaaatgaagttaatgaacctagctatattgatttacaaactaagttgttttga

SEQ ID NO: 369 - DNA, 333 bp, Methanobrevibacter ruminantium; identical to SEQ ID NO: 358
  source 1..333: mol_type = genomic DNA

SEQ ID NO: 370 - DNA, 387 bp, Methanobrevibacter ruminantium; identical to SEQ ID NO: 359
  source 1..387: mol_type = genomic DNA

SEQ ID NO: 371 - DNA, 801 bp, Methanobrevibacter ruminantium
  source 1..801: mol_type = genomic DNA
atgaaagaaaaaatatttatcaatggaagaggaggatgtggaaagagcacattcatatcattaattgcaaaggaattgtcaaaaaacaataaagtattaataattgatatggatgagggaaacctcggattgaacaagatgcttaatgttgatgttgcagacacttcattaatggaatattatggtggaagagataagataatgggtgaaattttaaaagtaggaattaaaggtatggttttagaaaaaatcaacctgaaagatggcgcagcctcagattcaatagatattttggataatatgaaattatcagatttaccttccgattatgtgacatggaacggaaatataggattcattgaatccggaaaaatcaacgaccctgatgaaggctgtgcctgtccgatgggaaatcttacaagagacttcctaaatcacattgaattacaagacaatgaagtaatattggtcgacacctcagcgggaatagaacacattggaagaggagtaattgagtctgcagacaaactcatttcaatagttgacccgtcaagcgatgcaatattgttggcaaataaaataggatcattatcaaaagaggcatccaaagaatatatggtaatattgaataaaattgatgaaaatactaaagatttggtattggaacaattggatgatgacatatctgtcgttggggaacttgaatataattcacacatagctcaaagcaacctttcccaaaaagaaattaaccttgaggaagtagaaggtgaaattaaggaaatctgtgcaaaaatttaa

SEQ ID NO: 372 - DNA, 828 bp, Methanobrevibacter ruminantium; identical to SEQ ID NO: 361
  source 1..828: mol_type = genomic DNA

SEQ ID NO: 373 - DNA, 219 bp, Methanobrevibacter ruminantium; identical to SEQ ID NO: 362
  source 1..219: mol_type = genomic DNA

SEQ ID NO: 374 - DNA, 117 bp, Methanobrevibacter ruminantium
  source 1..117: mol_type = genomic DNA
atgaagctggttaaaaagaaccaaaagttgcataatcctaattcgccattgctgattggtgaggtaaaagagagtgatgatgtaaaggaagttaatgaacctagctatatttattga

SEQ ID NO: 375 - DNA, 804 bp, Methanobrevibacter ruminantium
  source 1..804: mol_type = genomic DNA
atggagatttttaaagttgtctgtgaattaataattccaattttaatatttggtgtgttatttgcagttggaaaatttattcatgtaagattattgaatagtaaaagcagaattttaaatccaggagaatatttccctgatgaggaacttgaaacattaaagcaagtttattatttggtaatgatgttaatattctttgcttttatattatacatcatgatagttcaagctaatgaggtattcgcgattgctgttttacaaattcttgtgtcagtctatgtcgctttaactttggattatagttatttgaaaaataagatattgttcttcctcttggttccttttgaagctataatattccttgttttcaatgattttctaatgatttggccaatttatttgatgcatattcttgtttatgcatatttcatcaaggtatacttcgataaatttaggaaatatactgaaacaaatgggcttggaataacaatcatactattattcgctatagtttttataagcttcattatcacactatttgtggaaggtgttgaacctttaaattctgctgtaatggtttcaaatgcatttacaagtaatggttatgcaatacttggtaactcaggcattggtaaattgaccagtttggttttagtttggagcggatacatcatatctggtgtaggtactgcaacattaaccgctgcaattatgatgagacataatcaaaaacgtgaaaaagagttaaacaaacgtttagatgagttggaatcattaattaaaaatagtaataataaagaataa

SEQ ID NO: 376 - DNA, 1965 bp, Methanobrevibacter ruminantium
  source 1..1965: mol_type = genomic DNA
atggaaattattaagggaaaagaaattccgaaaaaaagtttaaaaagaagtttaatcgtatttattggaaatatgataggaatatatcttataagtattttaggtttaggagtcgaaattagccaaactggtgacatattccttttagtattattcctaggtatagtaaatgcaatactctggcctattttaacaagaatagctatgccatttttagtattgaccttcggaataggttcattaatattaaacggactccttcttcaattactcgcaccatcatttggaatagaaatcaaaggtgctgcaatgattcttgcacctttaggaatggcggccgttacaacagtgctatctagcttaataacaattaatgatgacagttcctattacagatccgttttaaatgatgccaaaaagaatgcaaaaaatgaagtcaaggattatccaggcgttataatcgttgaaattgacggacttgcatataatgttttatgtgaagcagttgaaaaaggagacatgccaactcttaaaaaaatgattgaaagcgaagactacaatcttagaatgtgggaaactgacttgtcttcccaaaccggtgcaagccaggcaggaatccttcatggaaataatgaaggcatcgttgcattcagatggatagaaaagagcaatggcaatcagatgatgcaatgctctggaatcagcaatgtgccggaattggaaaagagaatttcagatggtaatggattgcttgtagaaaatggagcaagcagatctaatttattctctggagatactgacaatgtaatatttacattcagtaagataatggactttggaaaactctataataaggcatggtactcagtattttccaatccaagcaattttgcacgtattgtctcattgttccttgcagatattgtacgtgaaatctggtcacaaatcacacattccatcaaaaacataaggccaagaatcaaccgtggaatagcttatattccaacaagagctgctacaaacgtctttatgagagaaatcaacacttcaaccttaatcggagacatgatggttggagatgttgatgttgcatactcaacatatttaggctatgacgaaatagctcaccactctggagtcagagacagtgacgcatggatagcattaaggcaaatggaccagcaaatcaaacacttgaccgatgcaaacaaatattctccaagagattatcaattcgtaattcaatctgaccatggccaaacaaacggagccacatttacccaaagatatggtcaaacctttgaggactttgtaaaatcattgcttccagaagacatgaccatgtttgcaaaaatgacttcaaatgatgaccattttgtaggggattacactccatttgcaagaaaagataaaaaaatagagaaagagaaagaagaagctaaggaattaagtgactctgaagtaattgtactggcttcaggtaaccttgcaatgatctatttaacccaatggactaatagattaagctatgaggaacttaacagctatttccctgaactgatacctggccttataaataatgaatatgttggttttattttagttaaatcccaagaacatggcgatttagccattggaaagaatggaacatactacttagacagggatgaaatcgatggtgaaaaccctcttcttggatttggagacaatatcgttaaacatctaaaaagaaccagttcatttgaacatacaccagatatcttggttaacagtttctatgatgaggaagctgatgaggtatgtgcatttgaagaattggttggaagccatggaggagcaggcggagatcaatccaaaccgttcatattgtacccttcaagctggaatgtcagcgatgatgaaatcatcggtgcagaaaacatctataaactattaaaagagaatttagctgaattaaaaaaataa

SEQ ID NO: 377 - DNA, 828 bp, Methanobrevibacter ruminantium
  source 1..828: mol_type = genomic DNA
atggaaataatggaaataattaaagattcttttctatttccatctaaaaacttaggaaccttctcaatttatgttgtattgtcagtattagttgcaacatttacttttggaggaatattctcctatttattagggtttattggctctgagtacattttaataggcggattaactcttgtatttgcaatgttaattggatgggtaatgtctggttatgaaatcagcattattaaatctggtattgaccttgatgatgaagttcctgagtttaaatggtgggataattttattacaggttttttaaactttattgttgcaatcgtttactttataattcctgcttttattgtgggagttgtaggatatcttataaatattaatgacaaacttatggcagttgctcaagagatttcttcactctatccaaatattttcttgacaagttctccggatattgcatttgaggcattgtctcaagcaataattgaattaatagttcctttagctattctcattattgttgctctaattgtatttgtaatctttttattcctccaatccatggctgaagcaagattggcaaatacgggtagtttaagtgaagctttaaacatttttgaagcagctaaagatataaaacgaattggtgtacgtaaagtaattatagtaatcttattagtttttgtaattattggtgttattgggatggttacatctgttatatttaactatgtgccaacattatcaattctttcaattataataagcccatacttagtattctttgctcaaagggctactggattattatattctgatatagcttaa

SEQ ID NO: 378 - DNA, 462 bp, Methanobrevibacter ruminantium
  source 1..462: mol_type = genomic DNA
atggaacctaataaagtatctggaatattatccataattttaggattaattttcataattttccctttggttagttccggattagtatccatcatgattggagttagcttactattcttaggtatagcatcaattctaaccgaattttcagcactcaatataattattggaattcttgcaatcatattcggtttgctattcatattcaacattgatgcattgtccttccttttaggattccaattctacattattggtatcttaatgatcttaataggtgtagcaggtatctttgcaggagaaggcgtatcaaagattgcttcaatattgattataatcttaggtgttattgcattaggccttggaggcttttcacttacccaaccgattttcgctgcagtacttataggcgtagctttaatcacccaaggtgtaaggttatatgtagcaccaaaaaattaa

SEQ ID NO: 379 - DNA, 1521 bp, Methanobrevibacter ruminantium
  source 1..1521: mol_type = genomic DNA
atgaatgaaaccattaaggaaaattcttgggttccactaatagtcgtggctcttgcttcctttattgtagctttagacgctacattcatgaatgtgagtatttcacaggttgttgttgacttgaatactgacgtcagtacaattcaatcaatcatgtcattttatactctcatcactgcagcatttatgctcttaagtgcaaagcttcaagacatagtggataaaaagaaactgtttttaataggtactgctctttatggtgtaggtacattcaccgcatcaataagttcaagtgctggaatgttatttgttggatgggcagcaattgaaggtgttgctggtgcattaatgatgcctgcaaccgtttccatcataagtggaacatattctggtgaaaaacgtacagttgctttggcgattgtaggtgttatgggtgcagttgcagccgctgtaggcccactcttcggtggggtcatgacaacatttttaagttggagatatggatttgcagttgaattgataatcgttttcgttattttaatattcagaaatagcatacctcatttcgaacctactgaatctagaagcgatttagacatttcaggcgctataatttcatttatcggccttgttttattagtactaggtatcttgtcactatctaaagatttcacaacaagcataggcataattgtagtaggattaattgcattagttgcctttgcatactttgaaatcagaagaaaaagaaatggcaaagtaccattacttgatatggaactatttaaagacagaaatttacgtgtaggaactataattttgttattatcttaccttgcaatgggtgggggattatttgcagtttccctattcttgcaaagcgtattgcagttaaatgcattcaatactggtgtgactactcttccattaactttaggtttgcttatttttgcagtattggctccaagtttaacagaaaaattaagtcacaagaaaattatggcaataggatgcataatggcaattattggatgtttaatgttaagttatcaatttagacttgatacaacactttggacattattaccaggattattagtattaggtgctggacttggtttcattatggctttatgtactgatatttcattaagcaatattcctgcagaaagtcaaaataacgcatcaggtgttaattcaaccggtacctcattaggtgaatcaatgggtacagcagttattggaataattttaattctcggagttatgggcggtatcagcactgctgtcgatacctatgcaccagatcattcaggagacgaacaattccaacttgaagttgcaaattacttccaaaaagttgctactatagatgatcttaaacaggacagtacccttgtagatgttgcaaacatcattattcaaaataccatggcattcgtaatgcaggtaacagctctcattatgggagtggttttccttctaacgttacggctaaaggataacaaaattaaacaatga

SEQ ID NO: 380 - DNA, 1251 bp, Methanobrevibacter ruminantium
  source 1..1251: mol_type = genomic DNA
atgagcaatgttaaagacatgtctcttgcggatgaaggtattcgtaagatcaaatgggttcaaaagcatatgcctgttcttgaacatattaaaaaacaatttgaagaagaaaagccttttgaaggaatcactattggttcatgtttacatttagaacctaaaactgttaatttaggtttgaccttacaagctggtggcgctgaagttgcaatgactggctgcaatccattatccactcacgatgatgctgcagcaggtgcagcagctctcggattacacatatacggctggagagaacaaactgatgaagaatactacgaagctatcgacaatgtactttcccacaagccagatgtaatcatcgacgacggtgcagacatgatcatgtaccttcacgaaaaacgcccagagctattggaaaacatcaaaggggcttgtgaagagacaacaaccggtgtacacagattggaagcaatgcatgcagacggagcacttaagttcccagtcatcgcagtaaacgacgcatacaccaaatatttatttgacaaccgttacggaaccggacaatcctcccttgacgcaatcatgggaaccaccaacatgcttatcgcaggtaaaaacgtagtcgtctgcggatacggctggtgcggtcgtggagtagcatcaagagcagcaggactcggagcaaacgtaattgtaacagaagtagacccaatcagagcacttgaagcaagaatggatggttacagagtaatgaaaattagagaagcagtgaaaatcgcagaccttgtagtaaccgtaacaggaaacatagacatcatccatggagatgacttcaaatacatgaaagacggatgcatgctctcaaactcaggccacttcaatgtggaaatcaacagaggcgaccttgaagcacaatcagtaagctgcgaagaggttagagaaagcattgaaatgtttaccatgaaagacggcagaaaaatttatcttttagcagacggaagacttgtaaaccttgcagcagcaagaggacaaggacaccctgctgaaatcatggacatgagttttgctgtgcaagcattatctgccaaatacattgtagaaaatgacttgtcattaggtgttgaaaaggcaccggacagcattgatgatgaagttgccagattaaagcttaaagctatgggaattgaaattgacgacctttccgaacgtcagaaagattatcttgcggactggagagaaggtacttaa

SEQ ID NO: 381 - DNA, 666 bp, Methanobrevibacter ruminantium
  source 1..666: mol_type = genomic DNA
atgtcttattttcgctatattgataatggagaaggccctacaaagctatttatcggaggagttcatggggatgaaggcaagcatgtccttcctttaatcaagcttctaaaaagagaggatttttcctctggacagatttacatttataattttgacaggactccatatatctctacaatacatagggaattttatcaatcagaacaaggcaagaagatattggatttggtagattattacaagcctgatttttatacagaacttcattcatataatattaagcattttgatagattgactagtcttgataggcttgacagcgaagggattcctcctttaatcgattgtggtcaatatgtattgtgcagttctgtttctcctttgattagacgtaagcatttcactaaagaagcaatatgtcaaactttagagtttcctatattcagaggagaagacttaaagcttagtgatgatgaattgcttgaaaaatacgattttgattatgacttgtctgtaaaggagtatatggcctttttaagactgattacccttagcaagaatagggatgactttgaaaaaagagttttaaaggattataagaaacaggctgatcttgctttaaaatacgttaaaataatttatggattgaattttccacgttattag

SEQ ID NO: 382 - DNA, 987 bp, Methanobrevibacter ruminantium
  source 1..987: mol_type = genomic DNA
atgggagttaagtttaaggatatagttactgccgaagagataaacctaaaggatttagaaggcagaactgtagcaatagatgcatataacacactttatcaattcctatctggaattcgccaaagggacggcagtcccttaatggatgcaaatggaaatgtaacatcccatttaagcggaattctatatagaacagcttcaatagtggataaaggaataaaaccagtctatgtatttgatggagatgtctcagaatataagacaaaaaccgttgaaaaaagaagggccttaagggaagaggcaaaccagaagtatgaagaggcaaaggcagcaggaaacattgaagaggccagaaaatatgcaataagaagctccagattatcaccttacattatagaatcctctaaaaaacttcttgaatatatgggaatcccctatgtacaggcaaaaggagagggtgaagctcaaggagcatatatggttaaaaatggagatgcttgggccgttgcttcccaagattatgactgcttactctttggagcacctcgtatcataagaaaccttacattaagcggaggactatcaaacctcgaatatcttgaacttgataaggtcctaacagagatagaccttagcagagaacaattagtggatgttgcattgatggtaggaaccgacttcaatgaaggaatctatggaatcggtgcaaaaactgggcttaaattaatcagacagaatagtcttgaagacatattggttcaaaagggaattactgatgttgaagttgaaccagatgagcttagagaaatattcttaagccatgatgtcaatacagactataagattaagtttaaaagcgcggataaggaaaaactctgtgaattcatgtgcgaagaacatggattctctgagactagagtcctaaatgttgcagacaagctaaaaaaattaagttcaacccaaaaaagcttagaagattggttttaa

SEQ ID NO: 383 - DNA, 564 bp, Methanobrevibacter ruminantium
  source 1..564: mol_type = genomic DNA
atggcaactacagataatgacatcaatgtaagattgattgaaaagattaatcaagttgaagaaaagtacaatcaaaacttttcaaacactcaaaaaatccttatgaccacagatggctcaattacagccattttagatgtgctttatggaaaaattgctttaaagaccctagagcaacatttcgaagaggcaacagccgaaagcgcaaagcttgtcaatgtggatgttggcgatgaggtcaactttagagaaatcataatgcacaaggacgaacagcctttgatttatgctaaatcctatattcctttaaaaagattgagtaaagaaatcaaagaggacttggttagggcagacatccctataggaagaatattgaagaaataccatattgaatccagaagagagataaacattatcgatatggaaaaggcaaacgacaaattgattgaaatctataatacagatgaggatttccttgcaagggattatacaataatcaaagatggtgaaattctaatgtggattaaggaatacttccctattagttattttactgaaatctga

SEQ ID NO: 384 - DNA, 1254 bp, Methanobrevibacter ruminantium
  source 1..1254: mol_type = genomic DNA
ttgaatattacagaaaaaatattatctcaaaaagcaggccacgaagtcgaaccgggagaaataattgaaattggcgtcgatttagccatgtcccacgatggaacttcacctcctgcaataaaaacctttgaaaaaatcacagataaggtatgggacaatgaaaagatagtcattgtctttgaccacaacattccagcaaatacaataggatctgcagagtttcaaaaggtagcaagaaactttatcaagacccaaggcataaaaagccattacattcatggagaaggtatatgccatcaggttcttcctgaaaagggacatgttgagcctggaatggtcatcgtcggtgcagactcacacacatgcacatacggtgcattcggagcattttcaacaggaatgggtgcaactgacctagcaatggtctatgcaactggaaagacatggtttatggttcctgaagcattaaagatagaagttgaaggaagcttaaggccaggaataacatccaaggaccttattctaaacataataggagagataggaattgccggagcaacctacaacactgcagagttctgcggagagacaatagacaatctggatgttgaaagccgaatgaccatgacaaatatggcaattgagatgggagctaaaaacggaataatggagccaaacaaggcaacaatagagtatgtctgcaatagaaccggcaaaagcaaagaccaattgaatataataaaatcagacaaggactcaaactatctcaaggaatatctcttcaatgtagatgatatggaagcccaaatagcctgtccaaatgatgttgacaatgtcaatcctctctcaaaagtggaaggaacccatatagaccaaggatttattggatcatgcacaaacggaaggctcaatgaccttgcacaagctgcagcagtcctagaaggcaagcaagtccatgacgatgtaagattaattattatccctgcatccaaggaaatctatcaaaaggcaatggatttaggttatatcaaaacattcctggatgctggagcgattgtatcaaatcctggatgtggaccatgccttggaggacatatgggagtcttatccgaaggggaaacaagcatctcatctacaaacagaaacttcaagggaagaatgggagatcctaattcatcagtataccttgcaaatgcaggagttgtagctgcatctgcagtctctggattcatacaaaacccagatagcttataa

SEQ ID NO: 385 - DNA, 1179 bp, Methanobrevibacter ruminantium
  source 1..1179: mol_type = genomic DNA
atgcaatattatatcagtccctttaacaaggaagaggaatataaattcccaaaaaacataacaatttatgatactaccttaagagatggagaacaaactccaggggtctgtttttcaaaggaagacaaattagagattgctagaaaattagatcaatttagaattcatcagattgaagcgggattccctatcgtttcaagccgtgaagcagatgccgtaaaggcaatagcaaatgaaggcttggatgcacagattatctgtcttgcaagaactaaaagagcagacatcgataaggctcttgactgtgatgttgatggaataatcacattcatgggaacctcagacattcatttagagcacaagatgcatatcaaaagacaggaagccttgaatatttgcatgaaatccattgaatacgctaaggaccatggattgttcgtagcattctcagcagaagatgctacaagaactgacttggacttcttaaagagaacctactccaaagcggaaagctatggggcagacagggttcatattgcagacacagtaggagcaataactcctcaaggaatcactttcctaatcaaagagcttagaaaagtcacaaatgtcgatattgcaatgcattgtcataatgactttggtcttgctgtaataaactcaatttacggacttttagcaggaggttccgctgtttcaacaactgtaaatggaatcggagaaagggcaggaaacgcatcacttgaagagcttgtaatgtctctaaaaatcttatatggaaaggatttaggatttaagaccaaatacattcaagagctttcagagcttgttgcagaaaagacaaagcttggaattccttataataagcctgttgtaggtaaaaacgtattcagacatgaatctggaatccatgtggatgcagtgattgaagagcctcttacatatgagccatatcttccagagcttgtaggacaaaagagacaattagtcttaggaaagcattcaggatgcagagctgttaaggcaaaattagatgaatgcggatttaaggttacaaatgatcagctttgtcagatagttaaaaaagtcaaagaaagcagagaagaaggaaaatacattgatgataatgtatttaaagacattgtaagaagcattgatgctaattatgttgacttatag

SEQ ID NO: 386 - DNA, 546 bp, Methanobrevibacter ruminantium
  source 1..546: mol_type = genomic DNA
atgatagaagtagaagttaaagctaagataaataattttgaagatataaaagtcaaattaaacgaaatcaatgcaataaaaacaaaaacagaaaagcagatagacagatatttcaacagccctgtaaatgactttgcaaagactgatgaggccttaaggataagagaaaccaaaacagaaaaatcccataacttgtttataacctataaaggccctaagatagacagcaaaagcaagactcgagaagaagttgaaatgaaaatcgaagacagcgacaaatgtgcaaaaatctttgagaatctaggatttatcgaagttagaacagtcaaaaagaacagagagtattttaagcttgagaattttgagataagcttagatgatgtagagggccttgatccatatatggaaatagagattgcattggaggacggttccgattataatgaagctcaagataaaatatttgacctatttgagcaattgggaattactgatggcttcgagcgaacttcctatttggaattgctagaagagcaggacaaataa

SEQ ID NO: 387 - DNA, 546 bp, Methanobrevibacter ruminantium
  source 1..546: mol_type = genomic DNA
ttgaccgatgttgatataaaaatagaaaacattgtggcttctgctagcattggtaaagacattgttcttactgaagttgcaaaagcattagaaggcgtcgatttcaatagagaacagtttccaggtctagtttttaaacttcaagaccctaagactgctgctttaatttttagttccggcaaacttgtttgtactggcgctaaatctatcgatgattcaaagttagctattaagaaaactgtcgaccttatgagaactattgataccgagattcctcatgagtttgatattaaaattcaaaatattgttgcttctgcaaatttacaatccacattaaatttagaagcagttgctttggaattggaaaacaccgagtacgaacctgaacaattcccaggtttagtgtaccgtttatctgatcctaaagtagttttattattattcggttccggtaaagttgtttgtaccggcgctaaaaccaaacaagacgctaggttaggtgttgaaaacgctaaagctagacttagcgaattggacttaatataa

SEQ ID NO: 388 - DNA, 2064 bp, Methanobrevibacter ruminantium
  source 1..2064: mol_type = genomic DNA
ttgattaaacttgtagtatttgacttagataatgttattattgatggtgagggcatagatgagattggaaaattggtaaatattgaagatcaaattgcaaaaatcaccgagcaggcaatgcaaggtgaaatcgacttcgaaacatccattaaaaaaagagtaggacttcttaagggagcttctactgatgatattaaaacattagctaatgaaatgcctctaatggaaggtgctgaagaaaccgtttcctctttaaaggaaaatggttttgatgtagctattataagtggcagttttgatattattgccgatattattaaggaaaaactcaatgtggataatgtattcacaaattcacttgttgaagaagacgggatcttgacaggtgaagttactggaccattggtatctggttcaaaagtagatgttttatctaaattcattgaagacaagggctattctttagaggaatgtgttgctgtcggagatggagctaatgacatttctatgattgaatctgctggatacggcattgcattcaatgcaaagcctgccttaaaggaaaatgcagacatcattgtagaaacccgtaatcttactgacgtccgtgacgtcattattaacttaaattctgaaaacactgaagaaggtgctgacgtggataaagaagttgaaattgaaactgaagtagttgaatctactgatgtagttgtcgaaaatcaagaagaacaagttgcagatgcaactgaagaagtagttgaagtagaagaagcagaagaagctgttgaagaagcagttgaaactgaagaagaagcagttgaagaagaaactgtagaagctgaagaggaagctgttgaagaagaagcagaagaagctgttgaagctgaggaagaagctgaagaaatcgaagaagctgctgaagaggaagcagaagaagctaccgaagaagaagctattgaagaggccgaagaggaagctgatgaagaagtagttgaagaggctgaagaagaagtagctgaagaagaagcagaagagattgaagaagctgttgaagaagaggctgaagaagaagtagctgaagaagctgcagatgaagaagtagttgaagaagctgctgaagaagaagcagaagaagctaccgaagaggaagctgctgaagaagaagctaaagaagaaaagcctaaaaagtctaaaaagtctaaaaacactcttcctgaacctgatttcgaattagctgatactatcgaaggagtcagagctcaaaaagatgaaagagaagcaaaaattgctcaagttgctgacgaaagagaagcattcaatagagaagctaaagagcaacgtaaaatacgtgatgaattaaacactgaattaaaattaaacttagcaaaagctattgaattcagagatcaacgtaatgaaatcaacagagaagttgaagaaaacaaaagagctcgtaacaaagtaaatgaagagattaaaaatctcgaatggtcttctggtaaaaaagatagaatcagaattgaaaacgaaatcaagaagattgataaaatcattgaaaccagagttttagacattaaaaaggaaaatcagcttgtaaaaactgctaacgatttaagaaaacaacttgcagaaattacagaagacaacaaagtaaaagaagaagctgaaaagcttaaaaagcaatctgaagaataccacgctaaagttgtcgaactttccgaacaagctcaagaagctcacgaacaaatgctttcttactttaggaaaactgatgaaatcagaactgctgcagatgaagcacacaagttattcatccaagctaggaaaaacgcttctgctaaacatgaagaatttaaagtcattttaagtgaaattcatgttattaataaaagattaggaagcaacagagctagaagaagaaaatctgagaaaactagcaatgctcctggtaaaagaaatcgtgaagagaaagagaaagctgaagctatctttgataagtttaaaaacggtaaaaaattatcaactgaagagcttttactcttgcaaaaatatgatattaattaa

SEQ ID NO: 389 - DNA, 246 bp, Methanobrevibacter ruminantium
  source 1..246: mol_type = genomic DNA
atggatgatattatggatttggaaaataaaaaagatgataaaaatcaaaataaagaagaaataattgaatctagtgaaaaagaagttaaaatggaaatatgttatacctgcggtaaggagtttgatatgaattctgacgaaggcgctcattaccattatggtgaatatccaatgtgcggctattgcactaacttctttggattctataaggaagatatgatgggtggcaaggcaaaaaaggaataa

SEQ ID NO: 390 - DNA, 2226 bp, Methanobrevibacter ruminantium
  source 1..2226: mol_type = genomic DNA
atgcatgaagtgattatttcagaaaaaccaaagtctgctgagaagatagcaaaggcactttctccaaatgcccaaaagaagaaatataatagaaagatcaactattgggaatttgaagaaaacggcaaaaagaccactgtcctatctgcagtgggacatttgtactcattgacttctgctagttccagagacagattaggttttgatttgacttgggttccagcttatgaggtggaaaagcaaaaatatacaagggattacatcaatgcaattaaaaaactctcaaaaggtgcagataagtttgttcatgcttgcgattacgatgttgaaggaaccttaatcggatacaatgcattgaaatatgcatgtggaaacaatgccgaagcaaaggcatcccgtatgaaattttcaacattgactaagaaggatatcgtagaggcatacaatacaatgagggacattgacattcgtcaagtggatcatggtattgcaaggcatatgcttgactattattatggtatgaatatctcttcagccttgatgaaggctgtaagggcctctagctcaagatttattagcttatccgccggacgtgtacagactccaaccctttctattttagttgatagggaaaaggagattcaatcctttgttccggaaccttattggatgatcaaggctaaatctgactatgatatcatagcagaccatgtcgaaggaaagatatttgatgaagagcgagctaaaaagatttatgctgactgtcaaggtgctgatgctgatgtgacaagtgttaaggttacagaatccattagaaaacctcctattccattcaatttaggaggacttcagtctgaagcacatactgtctttggattctctcctaaaaggactcaagttgcagctcaaaacctttatgttggaggatatacatcctatcctcgtacatcatctcaaaagctgcctgaatccttggatttcaaaaacatttttgcagggcttgctaaagaccctgaattcaagaagcatatctttgacttacctgctaagcttaagcctaatgaaggtaaaaagactgatgcagcgcaccctgctatacaccctacaggagtattgccttccaatctatctgcagatgaggctaagatttacagcttgattgtttataggttcatcagcgtattttccgaaaactccaagcttgaaaccatgaaggtcaacttaaaggttgcagatgagaagttcaccttttccagaaaaagagtctcttatgaaggttggctaaagcattatccgtttaaaaagcaggaaaatgatgcattccctcctataaataagggagatcaactaaaaatccataagattttagttgaagagaaggaaaccaaacctcctgccagatataatgaggcttcacttatcaaggaactggaaaagagggaattgggaactaaggccacccgtgcagacattgttgccaagctttatgatagaaaatacattgaaggcaagaagattgaggtcaagcctttaggaatcaatatcatagacaccttaaacgagtattgtaaggacctgacaagcgaggagctaacccgtgagtttgaaagggaacttgaaggaatcgatactgataagtatacaaaggagcagattcttgaaaacggtgaaaaggaagtcaagaccattttagctgaaatcaaccaaaacaagaagcaaatcggtgaaaagctttatggagcatatcaggaaaccaatgtggttggagagtgcagctgcggaggaaaactgataaaaagatattctccaagaacaaagaacacctttgtaggatgctccaatttcccaaaatgtaaggttacctattccctgccaaagggagcgaatatgctaaagaagacatgccctacctgcggtttgcctatgatttccattaaaaaggcaagcggaaagggaagagatcatgtctgccttgattcaaattgtggaaaggatgtaagcagacgccaagctcctgaagttgttggaaaatgtccggaatgtggcaaggaccttttaaaacgttctggcagatatggagaatttgtaggatgctctggattcccaaggtgccgcttcacttgttctgttgatgagttgaacaatcttggcaaagataaaaataaggaagatgtaaaagagaataagggtgtttctaagaagatagtaaggtctgaggctaaataa

SEQ ID NO: 391 - DNA, 2703 bp, Methanobrevibacter ruminantium
  source 1..2703: mol_type = genomic DNA
atggaaaaacaacaagtaaaaacaattttaaaatctgtggttatcatagctatattgcttattattgtttttggtcttagggctcaatctgtagatattggaggagttcctaatgaacttaaatcacactatgtagacgaaaacggtcttccttatttcagtgaaatggactcatacttcaactacaggatgaccgagaattatatggatcatggatactttggtgacactaaggtaaacggtaccggttgggatatgcattcatacttcccttcaggtagggcagtaggtgattatcaaccgatgattgcttatgtgacttcgttcctatatggaataataaatatgttccaggaaatgtctcttcttgaagtggcgttttggactggggctattgtttcctcacttgctgtaattcctacttacatattcacaagaaggattacaaacgactatggagcaattgcggcctcattgattgtagtattaggtccaaactatatttcacacacattcgcaggatttttcgatacagatatgttcaacataaccttgcctttattcttcatactgttctttgttgaagctttaaaaactgataagctatcatacagaatcatattctccttattagcagtagcttcaatagcgctctattccctttcatggacaggttatatgttttatgttgctgtaatggtattggttatgattgtgttctttgtattatgcttctatttcaatattgagattttagaaccatttaagaactatggaaataaactggaatggctgattaatcagaaggaattgtttgctacattaattgtattggttgtaggtctaattggattattattagccgtcggagtaggtggaattattgaaggtattaccggccttacaggaggtttcacccttcaagcaggtgctgctgacgtatggcctaacgtacttatttccgttgcggaaatgcaaattcctaatttagtgactggaggacttgtaggttcattcctcgctaacaccggtggagtagtaaacggggttggaggaattgtatgtttattcggtgtgcttattgtattgtacacttttgttcaaagattattcagactcaactctgttaaagttaaaggagacactgcaaaacctcacaaatccaaacgaaaagctacctctgtaagaaccgaacaaaagagattcagcgtttctttaaaagacattggatcatttggatcaaccgatgaaatcaacaaaagcaaacgtcacacagtgctttacttaagtctcttctttgtatggattgtatcatctgcaattgcagtaactcaaggtacaaggtttattcaggtattagtagtacctatgggtatttgtgcaggtatattcgtcggatatgctgtagactatgtcaagaataatgtggacaacgataaggtattattattgattgctgttatcgcatctatcttgattgcacttccaatcactcaaatcgcttatggtttggataatgcaatgactataggtttagtagtcttagttattcttttggcaatttcagcaattgtgatttatgctaaaaaatccattaaggactctgatgtttcaatcaagaaggctttggttgtagtgctaatcactctcgctttggtatctccaaccgtttgtggtgctttccaaaccactgcagctaccgttccaggttcaagcgaccctatgtggtttgctatggattatgttaaagaaaactctaccaatgacactgtaatcatatcctggtgggacttcggttacctattccaagttgcatctgaccatcctacttctttcgatgggggttcccagacaggggatcgtgcatactgggtaggtaagtcattgactacgtctgactatgcccaatctaaaggaatcctgcagatgttggcaactacaggtagcaatgcatctatgctattgtctgagtacacaggcagcaatgtgactgcagttcacgcattggatgagaccttaggtaaaagcagatctgaggctcaaaagattttaacaagcaagtataaccttactaatgaccaagctaaagctgttgtaaaacagtcacatccaagcaatcctaacaacgtttcattcgttttaagttcagatatgattggaaaagctggatggtggtcttactttggttcttggaactttgataccctaaacagtaccaactatcaatattacatggctaacgactatgttcctatcaagcagaacacacaaggaaacattacaatccttaatgaaagcggtattatataccaagctgttgtaaacagaggcaagaacggtaccaacgaaactacagctcaaatggaaaccatttgggacaataaccgtagtaaaattgacctaaacggtaccgaatataacccacttaaggcaagcaatcttatttgtattgaaaacagttatttaactgttaacaagaccttgaataaggacggtaattacaccttataccttttaggttccggtgatgattatactgccatattgatggataataatcttaaagactctgtatttaccagactcttccttttaggtggtataggtcaagacactttcgagctaagtaatatgcaagatggtgtatctgtttggactctgagagacggatcatcaaattctgatgacgcaggttcacagtaa

SEQ ID NO: 392 - DNA, 1095 bp, Methanobrevibacter ruminantium
  source 1..1095: mol_type = genomic DNA
atgactatagaagaaaaaattaaagctattgaagaggaaattcaaaagacaccttataacaaagctacttctcatcacataggaaaattaaaggctaagatttctaaacttaaggaagagcaaatcaaaagaagtagcggtggaactaaaggtgaaggtttccacattaaaaaaagcggagatgctactgctgttttagtaggtttcccatctgtaggtaaatctacattgcttaatgaaatcacaaatgctgaaagtaaggttggagcttatcaattcactacattagaaatcattccaggggtcatggaatataataatgctcagattcaaatatttgacattccaggaatcattacaggtgctgcaggtggtaaaggtagaggaaaagagatcttatctgtagcaagaactgctgacttgattattgtggtcttggatgttctcaaccctcaacacattaatgttatcttaaaggagcttagaaatgtaggtgtaaggccaaatgagaccaagccagatgttagaatcaaaaagacacgtaaaggtggagtcaatgtttcatcaaccgttcctttaacctatttggatgaaaagaccattaggtcaatcatcaatgaatatggaatacacaatgcagatgtcctatttagggatgatgtcacaatcgatcagttcattgatgtgattgaggccaataagtcctatgttccaatgatggttctcttaaataaggtggatttggtagatgaacattatctaaatgaaatcaagaaggaacttcctccattcattccgatctctgcagataaacagttaaatattgaagcacttaaagaagagatatttaataatttaaaccttatcagggtttatctaaagccacaaggaagaaaagcggatatggaagatccattggttgttaaaaaaggttctaccgtaattgatgtctgtggaaaacttcacagagagtttgttaaaaacttcagacatgcaaagatttggggaacttcagtaaaattcccaggtcaaaaggtaggtccagaccatgtcgtagaggatgaagacattctaaggattattttaaagaaataa

SEQ ID NO: 393 - DNA, 603 bp, Methanobrevibacter ruminantium
  source 1..603: mol_type = genomic DNA
atgtctatttcagataaaatcgaagaaaataaagtaatattcatatcaggaactccatgtactggtaaaactacaattgcaactaaactaaatgatttcttaaccaacaatggattcaattcttattttataaaaataaatgattttgccattgaaaatgatttggttttaggcaaggacccagacaaattgtatacagttatagacattggcagacttgatgaagtcttaaataaggagattaataattttcttgatgaaaactcttcagatgattctaaaatagttgttgttgaaggacatctgtcccatttgtgcaatggtgcagataagatgataattcttcgattaaatccagaaaaactcctcaaaagacttgaagagcgaaagtatagtgaaaacaaaattcatgaaaatcttgaagcagaggctttggctgtctgttctgcagaagcttatgacttatatgatgataaggccagtgaaatagacactacaaataaatctgttgatgagactcttgagcttgttcttaaaatcattactggtgaactagaatctcctgtaggctctgttgattttatggattggtttttattataa

SEQ ID NO: 394 - DNA, 372 bp, Methanobrevibacter ruminantium
  source 1..372: mol_type = genomic DNA
ttggctagaggaaaaagaccaaaatggatgattgatatagctcaagaacgtatggatattctttttaatcgtgcagaaaaagaatataagaagaatccggagagatcccatcgttacatagagctagctcgaaacatttccaagaaatacaatacaaaaattccccagccatggaaccgaagatattgtaagaaatgctacaagttcttggttcccggtcacaactgcgctgtccggctaattaataatgaaattaatatatattgtggcgagtgtggccatgttatgaaaattccttacatcagggaaaaaaagttaaaaaggagagctaaaattgactcttacactttcaaaaaaagagattatgaatga

SEQ ID NO: 395 - DNA, 216 bp, Methanobrevibacter ruminantium
  source 1..216: mol_type = genomic DNA
atgacaatcaatattggaaaagctggtgttaacgataatgttattgaagagattaaacgtcagttaaaatccaatcctattattaaattacgatttgctaaaaatgtagcaagaaataaagatgatttaattaacagcattgttgaaggcactaaatcccaactcattgatgttagagggaatgttgctgttatttataagaaacaatctcattaa

SEQ ID NO: 396 - DNA, 441 bp, Methanobrevibacter ruminantium
  source 1..441: mol_type = genomic DNA
gtgacaactgtatttgatgttcctgcagagttattgattaatactgttgcagatgaatttaaagataataatgataaaatcgttgcccctgaatggacaaaacttgttaaaactggtgttcacaaagaaagaaaaccagaaaacatcgactggtggtatgtaagatgcgcttctattttaagaagagtctatattgacggaccagttggagtaagaagtttaagaaccttctatggcggtaaaaaagatagaggcgtaaaccctgaaaaattcagaaaaggtagtggatctattgttagagtagctctacaccaattagaagatgcaggatacgtagaaaaagtcgatgctggaagaattattactccgcaaggtagatctttcttagataatacttctgctgaattaattaaagacattccagaactttcaaaatattaa

SEQ ID NO: 397 - DNA, 372 bp, Methanobrevibacter ruminantium
  source 1..372: mol_type = genomic DNA
atgagtgaacttgatgaattacgtaaaaaacgtatggctgaactgcaaagacaggccgctatgaatgctgatccgcagatggctcaacagcaaatggctcaacagcagatggctcagcaacaattagctcaacagcaagaaatggaagctcagttgaaacaagctatgagacagatcttaactccagaagctcgtggaagattggataacttaagattgaccaagcctgagttagtacaaaacattgagattcaattgcttcaatcagctcaagcaggttctcttagaggcaaagtaactgatgaacaacttaaagttttgcttaaaaatctcatgggtcaaaaaagggaaattcatattacaagaagataa

SEQ ID NO: 398 - DNA, 582 bp, Methanobrevibacter ruminantium
  source 1..582: mol_type = genomic DNA
atgaaagcttgtgttctttatagcggtggcaaagacagttcattgatgggatacatcctcaatcaattaggctttgacgttgaactggtcactgcaaattttggtgtttacgattcatacattccagcttcaaagtctgcagagtccattggattgaagcatagggttttaaacctggacatttccatcttggaaaaggctgtagacatgattttagaagacggatttcctaatgagggaatcaagtatcttcatgaggctgttgttgaggaagtggcaaatcattatgatttggttgctgacggtacaagaagggatgacaagacccctaaactcaatagaaatcaaataaggagcttggaagacagaaaagatgtccaatacatgaatttggatagttttggctataagaccatcaaatatcttgtaggaaatctttttgaattgaagcatgaaaagagcaataaggatacaagttcagactatgaggttgaaattcgattgctgattgaccaaaaaggtggaaattcatctgaaatattcccagaacattatcagactaatgtggtcggattaaaataa

SEQ ID NO: 399 - DNA, 156 bp, Methanobrevibacter ruminantium
  source 1..156: mol_type = genomic DNA
atgagtagaaacaaaccattagctaagaaattaagaatggctaaagctaataaacaaaacagaagaatcccaatttgggcttatggtaagactcaacgtaaattaagatacagacctaagcctagacattggagaagaaatgatcttaaagtatag

SEQ ID NO: 400 - DNA, 261 bp, Methanobrevibacter ruminantium
  source 1..261: mol_type = genomic DNA
atggcagaagaattagaaagaacttatgttattccacttagaaaagttaaaaatgtcaaaagaactataagagctcctagagctattagagaagttcaaaactttttaatgaaacatatgaaagctgaagaagtaaaaattgacgcttctataaatgaatttatttgggaaagaggaattcaaaaaatcccttccaaagtaaaggtaattgcagtaaaagatgaagaaggtattgtcagagcaactttagcagaaaactaa

SEQ ID NO: 401 - DNA, 678 bp, Methanobrevibacter ruminantium
  source 1..678: mol_type = genomic DNA
atgctgaaaagaattaatttaaccggaaaccctaatttaggtgtttacatatctgttaatgatgaaatagctattgttccttttaatgttcctgttgaaatggaatctgttattaaagagaccttagaagtcgacatcattaagacttccattgcaggctctaacctaaacggtgttttagcaacaggaaattctaatggatttttagtttctccctttacatatgacagagaaattgaactattggaatctgcaggcataaatgttgcaaagcttccaggcaaatacactgccattggaaacataattgctgtaaatgattatggtgcccttgcaggtcctaatattggggaagaaacaatcaaggttattgaagatactttaaaggttccagtaaagatttatccatttgcagacactaagattgtaggttctgcaagcatagttaccaataaaggagctttattgcatagggatacaatctctgaagagattgatttcattgaagacttctttaaggttgaagcaaacattggaactgtatgcaaaggaatgcctcttgtaggtgcttgtggtatagccaattcccaaggtgtaatggttggggaaagtactacaggtcctgagatggctagaattgaagaatctttaggctttttagactttggtaatttctaa

SEQ ID NO: 402 - DNA, 225 bp, Methanobrevibacter ruminantium
  source 1..225: mol_type = genomic DNA
atgataactaaaaattatagagttaaaggtagcttcgtaatgggtagtgaaacacaagttttcactaaagagttaagagctattaaagaagaagacatttatgaaaagctttattctatcttcggaagtaaacatagaataaaaagaaatcaaatcaaaattgattcaattgaagaaatcagcgatgacgaagtggaagatcctatcgtacaagcgattctttaa

SEQ ID NO: 403 - DNA, 438 bp, Methanobrevibacter ruminantium
  source 1..438: mol_type = genomic DNA
atggaagaccagcaaaaattacaacaaattttaagtcaacttgaagtttacaagcaacaatctgagttatataagactcaaatcgatgctgttcaagcttcacttgctgaaattaaaatcttagaatctacattagatgacattagtggtaaagacaccatagaaactttagttcctcttggtgctggctccttcattaatgcagagattaaaaatgaagataaagttattatgagcctcggttcaggtgttgctgtttccaagacttttgcagaagctaaggaaaccactgctgcacagaaaaaagagcttgaagagactttagataagttatttgcagatcttcaacaaataactgacattgtagctcagctatctccgcaagctgaacagttgatggctaaagctcaagcgcaaatgggacagcctctttattag

SEQ ID NO: 404 - DNA, 1731 bp, Methanobrevibacter ruminantium
  source 1..1731: mol_type = genomic DNA
ttggcagggataaacttgtttagttcattaaagaaaaaatttgctgatgcaagtagcaaattaagaaataaggtagaagaagaagctaaagatgaagataacattgaattaatcgaagagtctaaagatgaatttgatgacatcgacgaagatctcatcgaatatattgatgaagaagatgaagatgacgattgggacttcgatgatattgataaagaagataaatctaaggaagagcctaaagaggaatctaaagaggaatctaaagaggaatctaaagaggaatctgtagaagaaacagttgatgaggctatagaagaagtcgaagatgtttctgcagatgaagattctgatgaagaagtaaaagattctgatgaagaaaaaaaggattctgaagaaaaggattcaaaagataaaaaagaaaaatccggtttcttctcattcttaaaacgtggtaagaaagaagataaaaaagaggatgaagaagaaattgaagattctaaagaagaggaagttccagaagaagaagtcaaagaagcatcagatgaggaagttccagaagaagaaacatcagaagaggagtctgaagaggaagttccagaggaagagatagaagaatctgaagctgaaccagttgaagaaactgttgaagaggaagcagaagaatctgaagctgaaccagttgaagaagctgttgaagaggaagcagaagaaactgaagaagcaaaagaagaaacttccgaagaggatgaagaagaaaagcctaaaaagaaacgttccctatttagacgtggtaaaaaagacaaagagaaggattcagaagaggaattcgatgcagaagaggctaaaggcaaaggtggattcctatcattcatccgtgaaaagactatctctgaagatgatgttgaagacattctattcgaacttgaattgggcctattggaatcagacgttgcaatggacgtatccagtgtcgttgtagattcagtcaaaaacgaccttgtcggtcaaaaaattaaaagaagcagtgacatagaggaatatacctatgaagcccttaaaaaggcagtttacaacattataaacattgaaggaaagtccatgaccgagcttcttgaagagaaggtcgctcaaggagagcctcttgtcgtcatgcttgtcggtattaatggtacaggaaaaacaactacaataggcaaattagctaacttttacattaaaaaaggttacactccagttattgcagcatcagacacattcagagcaggggctattgagcaggttgcctatcatgcagataagttgggtgtcaaattaatcaagcatgagaaaggttcagacccagcagctgtcgctttcgatgcagttcagcatgcaaaggccaaaggcaaagagcttgtattgattgacactgccggaagaatgcaaacaaataccaatcttatggatgaaatgaagaagattagaagggtctccaagccggaccttgttgtatttgtaggagatgctttaaccggaaatgacgcaaccgaacaggcaagaaaattcaatgaagccattgacatcgatggagtaatccttaccaaggcagatgcggactctaaaggaggagcagcactgtcagttggttatatcattcaaaagccaattctcttcttgggaatgggtcaatcctatgatgatattaaggaatatgatcctgattggatgctagagcaaatattctcttaa

SEQ ID NO: 405 - DNA, 1695 bp, Methanobrevibacter ruminantium
  source 1..1695: mol_type = genomic DNA
atgaatttagacagtaacgttaaaaccggattgattgtagctatttctataattttcctttttgttttatcattgtttattactagtgcaccaacaggagtggataattctgctcgtttcggaattttgacactgcttcctcctcttatagcgattgctttagcatttattactaaagaaactattctatcactattcgttggagttttcgttggtgaattcatggtttcagtaagtgatttaaacatcatcagctctgcagttaatgcatttttagctatgggtggtcaaatcatctcatgtatggctgatccatggaacgctggtattgtcctccaatgtctgctcattggtggtgtaatccaattaattacaaaaatgggaggagcaaaagcgttagctgatgctttggctaaacgtgctgacactcctagaaaagctcaacttattactgaatttttaggattatgtgtattctttgatgactatgctaactccttgattgtaggtcctatcatgagacctgttatggacaagcttaaggtttcaagggaaaaattagcatttgtagtagacgcaactgcagctccagttgcaggtattgctattatttccacttggatcggtcttgaaatcagtttgattactcaaggtttcgaatcaatcggcatgaatgtaagcggattcggaatattccttcagaccattccattcaggttctataacattttaatcttgattttcattgttatctctgcagttaccctgtatgagttcggtccaatgaaagaggcagagaaaagggctcgtgcaagaaaagctgatgaacctgttaaatctcttgaagcaaccagctttgatgatgtaaaacctgtcgaaggcattaaattatccgtatggaatgctatcattcctattgcagtcttaattatcggcgctcttatagcattctactggagtggttacactaccatcttaggcggtgaagaccaagcgctcattcatttaatgaaaacttctccattatccttcaacggtatctttgaggcattatctgcttcagatgcatctgtagccctcttccaagctgcattgcttgcttccattgtagctatcgttatggcagttctccaaaagatcctgactatcgaagaggcaattagcgaatggattggcggtatgaagacaattgttatcactggtgtaatcttgcttctcgcttggtccttaggtggagtaatcggagacataggaactgctgattacttggttggaatattgaaggacacaatccctgtattcatcttgccaaccttgatctttatcctaggcgcattgatttcctttgcaacaggtacttcctatggtacaatgagtatccttatgccacttacaatccctctcgcttgggctgtaaaccctgatatgggatttgttatcgtctgtacaagtggtgtattgactggtgctatcttcggtgaccactgttcacctatttcagatacaaccattctatcctctatgggaacaagctgtgaccatattgaccacgtccggacacagatatactatgcaatattcgttgcatcaatatcaatcatattcggatatatcccagcaggattcggtatcccatggtatatttcaatccctgtagctattgtagtggatgtttcattgggattaagaaggtga

SEQ ID NO: 406 - DNA, 1332 bp, Methanobrevibacter ruminantium
  source 1..1332: mol_type = genomic DNA
atggcaaacagtaatcagtctgaatgggatagtaacattgcatttattttggcaatgattggttctgcagttggtttaggaaatatttggcgttttccaaatgttctatactcccacggtggaggatcattcatgattccttatatcgtatccctattccttttaggaatatcatttgtacttgtggaatatgctgtaggatacagattcaagtcctccctaatcaaggttctatattctgtcaaaagcaaattggagcctgtagcctggtttatcgccctaatcgtctttctcataacaacatattacatatgtgtagtgggatgggacttgatatatgtggtcttaagctttacaaaggcatggggctcaaatccagaccttttcttctcaagcattgtccttcaatcaacagattccattgaagggcttctccatattgttcctatggtatttatatccgtacttgcattatgggctgttgcatggtacattattcaaaaggacttaaatgacggcataggtaaggtaagtaagttactgcttcctttgcttttgattattgttgttacaatcgttttgttctcactgaccttgcctggagcttcaataggctatacccaaatttttactcctgattggagtgccctaactgacttgaatgtttggcttgctgcctttggacagatcgtattctcccttagcttaggaatgtccattgcacttacatatgcaagctaccttcctgaaggctctaaattaacagacaatgctttaatcgttgcattttcaaattctggatttgaaatcttcaattcaatcggaatattctcaatacttggttttatgaccttaaacacaggcattccatttgaccaactggttactgaaggaacaggcttggcatttgttgttttccctaaggtattcaatataatgggtccttgggctacaatcatcggtccgctcttcttcctatgcattctctttgctggtgtaacctctgtaatggcattgcttgaggtggtctgctattcaatctctgaaaagttcaacttctctagaagaaaatcagcaacaatagtctgcattataggatttatagtatctgtaatatttacaacaagtgctggaagcatgattttaggaatattcgatgcattcctaaacaatatcgcactcttatttgcagttcttcttgaatgcatcatattcggttggatctataattttgacaatctcatagagacattaaacaataattcaaatataaaggtaggaaaagtctggaaaaatgtaattaaattcatactcccaatctgcatatgctga

SEQ ID NO: 407 - DNA, 2649 bp, Methanobrevibacter ruminantium
  source 1..2649: mol_type = genomic DNA
atggatgatgaaactaataacaatcaatggaacagttcaacaagcttcatacttgtcatggtaggatccatcatagcattggcagggatttggagattttcctatcttatttatgaaaacggagggggcagcttcctaatcccatacatattagccatcgttatcatggtcatcccccttcttgtccttgagtttggagtgggattcaaatacaaggcaagcctgccaaggatattttacaatatcaagtctgaatttgaaatagtggcatggtttatccttttcctaatattcatagtcctaatctgctatacttgcataatgtcctgggaccttatctacatagtcctaagtttatttaaaggatggggcaataatcctagtgttttctttacaaccaccctacttcatagcacctctaatccatatggcttaacttaccttgtagttcctattggaatcggcctcatattaatctgggccttgatatatttcatatctcgaagggaaataaataggggaatatcattagtgacaaaattttccctggcattgacatttgttctcgtcatcatcctttcagtctttgcccttcaattgccaggatccagaactggccttatggccttgttcaatccaaattgggaatatctcttggactataacatttggctcactgcattcggacagcttatattttcctatggccttgcatatggaatcgcaagcacatattcctcctatcttccagaggacagcaagcttatagacagcgcatgggttattgttctaatcagcctaatattcgaaattctgatgtctgttctcatatttgcattgcttggacatatggcattgggaaagaacatgcctattacaagccttgtaagcgacagcttctcattgatatttgtggttttccctaatgtattcaatgtgatgggctcatgggcaacaataataggtccattgttctttatggttatatttatagggggattaggtgcattatttgctcttatagagcctttggcaaatgcaatatgcgaaaagttcatttggactaaggatagggcaataaagacattggtcttggcaggactctttgcatctttcatatttgcaacaggaatgggagagtatttccttaggatagttgacggcttcataacccaatttgcaataattctagttgttttggtagagatattagtattcggatggctttttgaccttgatgatataagaaatgttttaaacaataattctagaataaagctcggaaaatattgggtctatctaatcaagtttgcaattccgattcttcttattgtaatctggatattgggagtttataatttgattataactggagacaggcaaagccttcttgttcagtccattttagcttcaatcattgttattgtgcctctagctctaactgtagctccatttaatggagaatattctcttggctcaattacaggaggatataattactttagggacagtggggatgatgaagaggccaaatcaaattcaaagccagacttaaagtccagattcacatcaagattcacatctaaggataatgatgttgataatggcactgaaggctatgaagagaagacctatgttgaaaagacaatagatgactatgagggctatgatggtgtagtggcaatcacagatgatgaagaggaaaattccagccttaaatccagattcagttgggacaagtttaaaaagtctaaaaatggtaagaatgttttaaataatgttgatttgtctgcgaaagagtttgatcctccaagcgatgatgattatgatgattatgaaacttataatagtttagatgatggttatagccaaggctctgatgattttgataatagtatggatgattataggtctaaatctaagtccaaatctaaatccaaatctaaatccaaatctaaatccaaatctaaatcagaatctaagtcattatttgaaaagattaatttatttaataaagaccaaggagagaatgattatttggatgataattatggctataattctaatgataattatgaagatgatgattcctcctttgaagatgtcttcgatgattttgattatataactcctataagggaagaagaacctaaatctaaacctaaaacaaagtctaaaccaaaatctaaaacaaattccaaatcaaaatctaaggctaaaggtggaaataaaaaacctaaattcattagtgctgaggatcttgatggaattgaaagtttagatgatttaagtagccagcctaataagaaacctgcttctaaaaagacttctgcttctaaaaagaaatcaagttcaaaatctaaaaaggaatctggctctaaatccaaaaaagcatcagaacctaaagaagaacctaaacctaaagaagaagaaatagaatatgaagagttctcagatgatttctttgatgatggtgtatttggagaggaaggctatgaagctcttctagacgattatgtggaaccgaaaccaaaatccaaaaagaaaaaggcatcttccaaatctgaccaatctacacctagggattctaaaccctattatgattatgaaaagaaaggatcagattctgtttttaatttagatgattaa

SEQ ID NO: 408 - DNA, 732 bp, Methanobrevibacter ruminantium
  source 1..732: mol_type = genomic DNA
atgattaaaaatcatctaatactttatttttttatctcttatctttttttagtccatttctttacctatttaactatttctattcctattattttctatcattttcattttttatcattatttgttcatgatttttcaattaatttacatatttatccatattttcaaaatataaaatttataaaagataaaaacatacctataattatcaaaataggtgattatatggataaaaaaatgacagttttattggttgccctattttgccttctctgtgtaggctcatatctaatctttgaacctgccaggcatataagctatcatgaggtcaatctcactgacacctgcgttgcaaaggtcccggtaaccgataaggtatcttcatatacagacaacttaaacattcactactattccgattatgaaaacgatcttaacattacaagtttttatgatgtggctccggaatcttcgtctcaagggcatctgagaatggacaatcttaaaaaggaagttttaggtacggaaaagggaagtgcaggcaatctcacttattataaaaacaataatgccggaacttacacaatgtatgttgaagatagaatgtcacataattatattttgctttccgctaaggacttaacaattttcactaatgtatattctagcttagaggctagaattgtggtaaatgaaactgatattgatagtttggactcaagctatgcttaa

SEQ ID NO: 409 - DNA, 1737 bp, Methanobrevibacter ruminantium
  source 1..1737: mol_type = genomic DNA
atgaacactgcagagattttagtcaatttgcttgaaagggatggaaatgaatttatctttggccatccaggtgaacagatacttccattttataaggcattgaaggactcttcaatcagccatatcctaacaaggcatgaacaagctgcagcccatgctgcagatgcatatgcgagggtttctggtgaatacggcatttgcatatcaactgcaggtcccggtgccatgaatctggtcatgggagcctccacagcattcaaggattctgttccaatgcttgtgataaccggagacaatgactatgataaaaaggactctgacatttttcagtcatttcctataaactctgtctttgagaatatatcaattaaaagcttccatccttatgatgggaaatccgctgtttacaatatgattgaagcattgattcttcttcataagtttccaaaaggtcctgttcatatcaatctctctagagatgtacttttagaagagattgattttgattctattgatttaagagatattggtctatctaatattccttctttgaatcttaatgattctgatataattgaaaactttgatctttttgatgattctttagataatttatatgacttttcacaaaagttatccgctgatgtagatataactattcaatcagctattaaaaaattaaaggattcgtcaaaaccattagtcatactaggaaatggtatagtttggtcaaaagctacttttaaattaagcgactttttaagtaaaactatgcttccagttgttaccacatatcactcaaagggaatagtcagtgaccatgacagattgaaccttgggatagtaggtcttaggggaaactcattgtcaaattatgcttatgagaattcagattgcattttggttctaggtgccaaactctctgaacgtacaatcggtgcttccgactttgacattgccaaggaaaagatgatacatgttaatattgatgagaattgcttaaagggaaaaattaatatttgcatggatgttaatgagttcttggactgtcttttggatgaattagatcaagataatggaacatttgattatgatgatggatggatagatgagatctactccaattatgaggaattgattgttggtggaattgaagaagtggaagaaaactttaatccattaaggcctccttatgcgattaataggattatagatgcttttaaaggagcatatttcctatcagatgcaggaacccatacgacatggactactttgcttgcaaaaagcgattcattcggcaagcttttgttttcaggtggctttggtcctatgggatatagccttccagggtccattggtgttgcatttgccttaaagaagagaggaattgatgaaagggtgcttgtcatctgtggtgatggagatattcaaatggtaattcaggaattggctacaattagggaatatgatttgaatattgatatttttataatcaataactctcagttaggaataataagacaatgggaagagactgtttatgactttgataagtatcaggttgaccttattaatccagactttgctaaattggctgatgcatatggtgttgattctatgaaggtggaatctaaggaagaccttcaattggctattgagatgtctttggattcaaataaggcatttttagctgatgtatgtgtttgtgaagagaatattcctatgcctaaaaaatag

SEQ ID NO: 410 - DNA, 348 bp, Methanobrevibacter ruminantium
  source 1..348: mol_type = genomic DNA
atggatggactagaaataataaatagcttcaataaagaaacaatttacgaatttagcgaagcttttaccatatttgaagatgaaatatatttcatattcaaagtagatatcatttcaatcaatgcaaacccatccaaaactaaagataaaaataaaaataaaaataaagagaacaaagataataaaaaagctcaaagaataatatcccatttagaaatagagccaatagcttatctattaaaaaaagctgaaaatgaagattatcaaatagaagcgattgatgaaaaatacactgaatttattggaaaaaataaagataaactcttaaaagagtttttaaaccaataa

SEQ ID NO: 411 - DNA, 849 bp, Methanobrevibacter ruminantium
  source 1..849: mol_type = genomic DNA
atgatcttaaatcttattttaattatactaatcgccttaattatcatattttcaataatcctatacaatggtttaagaataattctaactgttgaaaaggaaaaagcagaagccagatacaaattaaagataactctgcttaaaatccctatttttacaaaagatagctctgaagacaaggctacagaatccgaagaggaaaaagaagaagatggagaggaagaagagtccaaagacaaaaaaggcctgatggaaaaatacaatgaaattaaacctatcctaaaagagctaattaaatcaaagaaagaattaaagaaatatctaaaggacattctaaaatcaattgatataaagaaactcgaaggacacttgatactaggcctaagcgactctttcaccacagtcaagatagcaagttggatatggtcaataggagctatagtaaatagtaaaaagccagtttcattaactgtagatcctagatttacagagataatcactgattttgaaggacaattggaattaaagataaatctactgaaaataatattttatagcttaattttagtaagcaaaaaggacattagagaattgattaaagtaatttatgcttataaaaaagccaaagataaagaaaatgaagaaaaagaaaactccaatgaagaattatataaaaaagaaaaagacactgaaattaaagaaaactccaaagaagaattatataaaaaagaaaaagacactgaaattaaagaaaactccaaagaagaattagataaaaaagaaaaagacactgaaattaaagaaaactccaaagaagaattagataaaaaagaagaaaaagaaacttaa

SEQ ID NO: 412 - DNA, 516 bp, Methanobrevibacter ruminantium
  source 1..516: mol_type = genomic DNA
atgattgatgaagaaccaattaaaacaactgtagaagaattaagaaagcttattcacattagcaactatattggagacgcaatagaaactgaagacaaattattaatccctgtatccaaagctgcagtaggattcggaataggagagcaaaaggctgataattcacttgccggaaccggtgcaggtgtaagcgttgaacctataaccatggttgtcgtatcaaaaggaaacagtggagttgatgaaataaggacaatcaacctatcaaaaggaaaccaaaccaacaagacattaaacgaaatcggattaatcctaactgatgtcttaaaagagttcctcccatcaaaaggcaatgacgactacatagatgttgatgacgtaagtgaagttgatatccaagacgcagacataaaagaaaaggtcgaagatgctgttgaagaatcagacctaaaagaaaaggttgaagaagaagtagaagaagcagaagaatcattaggcattgaaatagatgactaa

SEQ ID NO: 413 - DNA, 1167 bp, Methanobrevibacter ruminantium
  source 1..1167: mol_type = genomic DNA
atgaacgaaatattattaatgctcccaggtccaacaactgcagacccaagagtattacaagcaatgagcaaagctgttgtaaaccacagaggagacgaatttggagaaatctatacagaaacaaccaaattaatgtctaaaactttccaaactaaaaatgattcttatatcctaacaggttctggaacttctgcaatggaagcagcagtctcaaaccttgtcaacagaggagataaaatattaaatgtagtaggcggaaaattcggtgaaagatttgcagacatctccaagatgcatggaatcgaatccgtacagttagatgttgaatggggaaccgctgtaactccagaccttgttgaagaagccttagaaaaagacgaagacattaaagcaatcaccatggtacacaatgaaacctcaaccggtgttgccgcacctatcaaagaagtgggagaagtaatgaaaaaccacgatgcattattcattgtagacacagtatcctctttaggaggagactatgtggatgtggacaaataccacattgacgcatgtgtaaccggttctcaaaaatgtctcgccgcacctccaggccttgcagcaatcacattcaatgacgacgcatgggcagcatgtgaaaaggtagaagacaacaattactacttgaacatgcctaaatacagagcaaacggtaataaggaccctgctcaaaccccttatactccatctgtatcattgatctatgcattaaaggctgctcttgaagttctccatgaggaaggtcttgaaaacagaatagaaagacaccacacagcagcagctgcatcaagagatgctgttaaagctttaggtcttgaattattccctgatgaagctgtatcctctgcaactgtaactgcagtaaaaatgccagaaggagcaaatgacgaccaaatcagaggaaccatgctcaacaaatataaagtccaattagcagggggacaagaccaccttaaaggaaacatattcagaattggacatatgggtgtaatcaactatcaagaattagctatcactttcactgcattaggattaaccttaaaaggattaggattagttgaagatgcaggtgccggtgtggctgctcttgcgaaccattacatcaaattcaaacttttagaaaaagtttga

SEQ ID NO: 414 - DNA, 1101 bp, Methanobrevibacter ruminantium
  source 1..1101: mol_type = genomic DNA
atgagttttagaacaaaaagagtaattatatccaccttattagtaatgatatatgaattctttctgatgaaatatctttttttactctttggaggattggatgacatttatttgcttttactcactattttattcggtatattgaatatggttcccatgttctttgaggaaaagaagtcaaggcctattacaaggcttcttgatacgatatcaggattttggatatggatgtctctcttttacttatttgtcatattgattatctatatcggaggagtctatattgattggccgttttatattatagtcattctagttcttcttgttccattattgacagtctattcctatttccatgcacataagatcattattcatgaaaggacaatccaaatggataatattaatgaggatatcaacattgcccacctttctgacgttcatttcggctcaacaaggcatgataagatcattagggatctttctgataaattgaaggagctttcagattattgtgacttggcaattatcagtggagacattgttgatgggtcctctgctattgaagaggatgattttctacctcttaaggatgtgaatatgcctatagtctttacaccaggcaatcatgactcatatctggatattgaggacgtctttggggcatgcagaaatgcaggcattattgttctagacgatgagggaatggaattcggcaatcttaatatatttggaatgacattcatctttggaatgacccgcaagtttgaagagtttgaagtagtcagcacaggtgtattaggggatttcgttaaggaagataaggtgaatattatcattttccatgttcctaaaaactgggaggacttttctaaattaggatttgacattcaattgtctggccatactcatggaggccagttccatccacttacttggatatgcgatcttatttggtataacagaggtctttttaaagctaatattggtggcaaggacaggtatttgcatgttactactggtgtaggctctatggattatccttttagatggggtactgattcagagatagttgttctaaaattaagaaagaatgattag

SEQ ID NO: 415 - DNA, 1266 bp, Methanobrevibacter ruminantium
  source 1..1266: mol_type = genomic DNA
atgcttaaaagaacagttaaaaagaatggagatgaattatttcctcttggattgggagctatgcgacttccaactaaaaacaattcaattgataaggatttggctcgtgaatttatcctttatgcaattgacaatggaataaattatatagacactgcatatgcctatcatggtggagaaagcgagtcctttttaggagatatattgtctttaactgattccgatggagtaaaatacagggataaagtcaaattgtccaccaaatcaccttcttggatggtaaggtcaagggaggactttgatgcctttttaaatgaacagttaaggcgacttaaaacagactgcattgattattattatcttcatacaatcgatttaagcatattagagcgtcttaagggattgggagtttatgagtttctagaaaaagcacgttcagagggaaagatcaagaatattggattctcctatcatggcgcacctaatgagttcaatgacttgattgacgactatgattgggacatggttcttgttcaatacaattatctggatgtgaatgcacaggcaggaattcgcggaatcagatatgcatatgagaatgatgtggctgtattcattatggaacctttaaaaggaggaatactcgctggagaattgcctaaggaagttgatgggctgtttaaaggtgtcgattccaataagtcttcagtggattgggctttaagttgggtcttaaaccaaaaggaagtcacttgcgtactctctggaatgggttctatagagcagataaaggaaaatatgaatattgcagagagagttgaagtggattcattgtctgatgatgaattggctgtattggagaaggctcaaggaatcttcaattcaatgatgaaaataaattgcacaggctgcggctattgtcttccttgccctaagggagtaaacattccagattgctttaatatttataatgagaaatatttgtttaataaaaaagcatttggacctattcccggtgctatggtgaattattatatggttgttggtggaataaccaataagcagtcaaatgcaggtctttgcaatcattgcggtaggtgtaaaagattgtgtcctcagtcattagacattccaagccatttagatagtgtaaagtctgaattcgagaagtttggatttaattatcagattaagtttattagaaatattgcaatgccttctataaataagatatctaaggtatttgatgtctttaagcattcttaa

SEQ ID NO: 416 - DNA, 4308 bp, Methanobrevibacter ruminantium
  source 1..4308: mol_type = genomic DNA
ttgtacatctcagagatagagattaatcaaaacattatcctaaacactgaaggcaataaaatatatctaaacaattcccctaaaagcaatatacacgataactggtttggaaacactctgctgaactatgatgaggtgccatatgaaggctgcacaaattggatattcctaaatggagaaagcaaccaggtctcactggagaatccgatcagctttgaaatcacatttaccctatcctctttcaataagaatacaaagaaaataagcaactatgatgatagaaagcttccattcaatctaacagcacatgcagagcatggaatcttaaatccgaacagtaatcttttaggaaaaacaacaatatatgaaacagaaatcatcaatgttgagagaataatcggaaatattgcaaatatagattcagaatttgaaataatggagtttttagtcactgacggaaccacattctatgacttgaaccaactcatcaacaacaacagcaataatgaaatcaatataagcggaaattacacatatcatgatgatatagactttgaatttaaagagggaatcaatgtcaaccgcagcctaatcattaatggaaacggatttacaataaacggattaaactcctcacgcatcttcaatataaatggagacaatgtcacaataaataatatttcccttataaacggaaatggatatgaggacacctacgacagtgacggaggagccatatactggaaaggagctgacggaaccctgattcaaagcaatttcacaaacaacagcggatataatggaggcgccattctctgggaaggagacaatggaagaataataaacaacacattcaaaaacaacagcgcattcgatggaggaggtgccatcaccataacagtagagagaggaataataataaacaacacattcacaaacaacagcgcatcctacgatggaggcgccatctacctaatagcaagcagtggagagataataaacaacacattcacaaacaacagcggatataaaggaggcggaatgatctgctatgcagataatctaagcatgatcaacaatacaatggaaagcaacattgcatccgacgacaatggaggcgccattctctgggaaggagaaataggaagaataataaacaacacattcaaaaacaactacgcctctgaagaaggaggggctatcagcataagaggagagataggagagataataaacaacacattcacaaacaacaacgcatcctacagaggaggagccatcagcataataataactagtggagagataataaacaacacattcacaaacaacagcggatatagcggaggaggaatactttgctatggaaataatgtaagcataatcaacaatacaatggaaagcaacattgcatcctacgatggaggagcactttacgtcagcatggattatgcaatgataataaacaatacaataaaaaacaacaatgcatccgacaatggaggagcaatctactgggatagatataagggaataataagcctaaacacaatcgccaacaataatgcaaatcatgggggagcaatctactatgagggatattcttcaaatcttaactataacatcatcttaaacaataagaatagtgaaatctatttcgacaatgtcagaactttcaacggaagcaataattggtttggaaacaatgcaagcaattataatttgaatccaaacactagcttcgaatatgacaatagcccaaatgtaacccttagtgattggctatttttaaatggaacagcaaatccaaaaatagtgaatgcctttgaaagctcccaaatcttatttaaattatattcctatgacggaatattgataagtgaatatgacaattccctaataacagacaccaagctaaacttaagtgcagaaaggggaagatttgacaagacaagcgccagtttcaatgagccgataaactatactgcaatagaagggggaagagatacaataagaggagcaatagataagagtggatacagcataaatctaacaaacaggagagtatcctcaaaaattgcaatggatactaaagagataaactatagcagaaatgcatcaatcaagcttaattacaatgactttgcaggaggaaatgtcacaataagactaatgggagaaaataatgaatacctctttgaaaacatgaccctgaacaagacaatattccttggagtcataaatagggacagttacaacgtaagaatagaatattcaggagataggtcattcctagaggagaacataagcgaaagccttatagtgaataaggcaggaacaaaaatagttccaacaaatgacacaatagacctaggcataggagagaactcaaaagtcaactacactttctatgttatagatgatgaaggccaatacataactaacccagaggacattggaaacataagcttcaagtcagatggaagcgcagtcgaagtagattcaaagacaggggaaataaatacaattaaggaaggaactgcaaacatcctaataagattccaaggagatgaaaaccatcttgattccaatgcaagtgtatatgtaatttcaagtaataaaataaggaccaaaataacagcagaaaacctaacaacagattataaaaaggatgactacatcatagcaagattaaccgacctcacaggaaaaccgatagccaatgcaaagctgattgttgaacttaatggcacaaataactatacaactaattcaaagggagagataaaagtcccaacaaaaggattggattcaaatgaatacatagcaaagatcatctatgaaggagatgaaagctacagattttcaaatgcaagtgtaagactaatagtgaataagctaaatacagaaataactgcaaataatatcacaacaatctataatataactaaagaattggtgattagactaaaagacgtcaatggagacccagtaagcggggttgaactaactgttgacctgaacggaatgaataattatacaacagatgataatggacaagcaatagtggaaataaaaggattgattcctaacaattacacagcaaagatcacatttgaaggcaatggaaactataacaaggccagcacagaatcagatatagaaatattaaaaattccaagcattttaaatggaacagacatgacagtaaactataaggaagataaatatttgacagttagcctaaaagacaaagataataagcctatccataatgcaagtatctcagttgaattagagggtattaaaaattacactactaattctgatgggcaaataaaagttccaacaagcagtttacctgcaaaaaaccatacagcaatgattagatttgaaggaaacgaaatttacgaaaaatcaaatgctacagcgaaaataactgtaaataaaatttccggcaaattgactgcaagcaatgtcactgcaagatatggagacaatcagaacctagttattagtttaaaagacagcaagaaaaatccattaagtggttttaaagtgtctgttgacttaaacggcaaaaagaactacactacagattcttcaggacaaatcaaagtttcaactaaagatctagttccagacacttataaggcaatcatagtctttgcgggaaatgagaactatacaggatcaaatgcaagtgcaagtgtgagaataaatagaataaatacaacattcaaatacacaaacatgaatacaattgcttttgattcaaatatagaaggacgtattggagaatatttccgcttccaattgttggatgaagatggaaaaccattatctggcaaacaagtctttattggatttaatggagtcaaatacaatagaacaacaaatgaaacaggagaggcaaggcttcaaatcaacttaaaatatgtcaaccattatacctttgcaatagcattcttaggagatgattattataagggaagctttaatgttgctttaatcaatgtgactgaacagattccagtcttaagcacaagtgctaaaacatataaatcaagtgcaaagaccaagactttgactgctactcttaaatcatctagaggacatgtccttgcaggcaagaagattagttttacacttaatggaaaggtatacactgcaaatacaaacagtaaaggtttagcaagtgtaaaggtctctttaagcaaaaaaggaacttatagttttacagttcagtttggaggagacagtacttataagaaggtaactaaaagttcaaaacttacaataaaataa

SEQ ID NO: 417 - DNA, 1392 bp, Methanobrevibacter ruminantium
  source 1..1392: mol_type = genomic DNA
atgaaattcaaaaaatatttatttattctgctaatagctcttatttgcataatcagtgtctctgcagttgctgcatctgatgcaaatgaccctattagccaagacaataatcaaggactagttttagaagaaacaaatcaggatctttcgataactaagactaaagaaatagtggaatcaagcaccaataaagaaattagcctagaagacaacaaagttatttctaaggaaaataagaaaacaagtcttaaagatgaagaaacagactcattcaccaatctaaataatctaataaacatagacaaccccaacaaccatacaattagcctaaattgcgattatgtcctcttggaagaggactgcacctacattgacactgaaatattaagttcctcaaatcttacaacatcccacatcttaagggatgagggaagcctgccgattgacttgaatccaaaaacatataaagcccgattaatggttgaaaattccaatgaccaatccattgaagtgataaaaaccacaaatatagaaggatcctcattctggctcttaaatcagaccataaacaataacagcaatagtgaaatcacattagatagcaattacacatttaattccagcgcagattccggatttataaatgggatatacatcaaccgcagcttaaagctgaatggaaacggcattacaataaacggattggatgaaggacgaatcttcataatcactgcagacaatgtgaccattacaaacgtcaattttgcaaatggaaaatctgacaagggaggagccatcctatggcttggaaaaaatggaaatatcagcaactgtaactttacagacaatatggcaacatctggaggagccatcttttggggaaatacaaatctaacagattattatagcaatggacaaggggatgacggcaccataataaactgcaatttcattggaaacgaagcccaaaagggaggggcaatgtttttccataccggcggagccaccataaaagatggttgcaccttccataacaatactggaggccaagagggaggagccctattttggcttaactatggcggaaggatagaaaataactgcaatttcacatttaacactgcaaaaggttctggcggcgcaatctattgtcctcaagtagagatactcaataactgcattttccaaaacaacacagcccaatccaaaattgaagagagaataatgaaaggagggggcgcaatctatttacagaaaggaggaacagtaagagactgtacattcataggcaatattgctttaaacgacgaatcagatggattgagattttataaaggaggggagccatttacattgaaaggaatgcctccgtttccaactgcaccttcatag

SEQ ID NO: 418 - DNA, 4176 bp, Methanobrevibacter ruminantium
  source 1..4176: mol_type = genomic DNA
atgaaattaaaaagatattcatacataataatgatatttcttgtttgcatgataagcatctctgcaataagtgctgcagatgactcatcaatagctactgacgattcaaacaagataatcaatgataataacaatcaggacattgtattagaagaaaatggaccctcaacaaatatagctttagaagacaagaattataaaattgaaaagccacagcttaaggaaaatagcccaggcaattttaccgatttaaattatctaataaatgaggatgaaaccacccgccataacactacaatcactttagaccgtgactacatcggcggtgagaaaggcataagaatcgatcgtcccctaatcattgacgggcaagggcatacattaaatgcatcccaaaataacagagtcttccatattacttcagaaaatgttacccttaaaaacatcattttcacaggaggtagatcagattatggtggcgcaatttactggcaaggagacaatgggaagataatcaattgtaactttacttacaacacagccactaaatatggcggtgccgttttctggggagatgacgaatttgaaggtacagctgaccaaacaatagctaaagatggaattataataaactctaatttcatctccaataaagcgaatgtaggaaatggagaggcctgggaaaatggcggaggcggagaaggtggtgcagtttactggtatgccaataatggaaccatatgcaactcctatttccataataatcgtgccggtggacaaggaggcgccatcacttggaaaggaaatgatgggatcatatgcaataacaccaacttcactgccaatagtgcaggagattctggcggtgccgttttctggcgtggagataacggaaccataagcaataactgtgagtttaataataatatagcctatggtcgtaccagtgatggcatatccagaggaggaggagctattttttgtcatggcgaaaatggtaagataagcaactgctcttttatggaaaacagtgcaaaacctgaaagtgaaagcggtaaaggaggaggagcaatttatgctgaatataatactttcatcacagattgcatttttataagaaactctgcagattattatggaggtgcaattctcatattcagaacaggtgatgtctatagaaatatctttataaacaacactgccttaaacggcaacactataacattaaaaggaataggccattcaaccataacaaacaacattatcctaaataagacaaatgcaatctactggaatgaatccgactatacaatcgaagctaattggtttggaaacaatgctacacaatattcagaaccttatgaatactcacaaacctggttgtttttaaatgcaacagcaaatccaaaccctgcaccattcaatattccaactgaagtgaaattcaagctatggctctacaataaaaagactaaaaaaataacagaatatgacaattccttactgccaactatccaattaagcttaagccaaacaaagggaagcattaataaggagactgcaggattggatgacccaatcaactatactgcaaatgaggtaggaacaggaagcataactggaaaaatggaatggataacagatagcatcttctttgaaatcgtaaatgaccctaaattagaggtatctgttaatcctagcgaaatcgactacggagacaatattaccctccatctcggatatgaggatgaggctacaggaacagtaaacatcagctttaaaggaagtacacacgaaaaaacaatagaaaacattcctttaaacaagactatcacaattacagagtccattttgccagacgaatataccgttactgtattctattcaggagataatcaattctcaagagcaagtaagaccgcagatgaaaaattgaaaataaatcaaaagaatccgaatatgacagtgacatcctatgagatctatgtaaatgacactaacggagtcatgtttagcataaagctagataaggatgccacaggaaagataattcttacaggagacattggaagggaaatcaatctgactgaaggcagcataaaggatgggaaaagaattattgaaattaaaaacaatggttttgatcttggcaaatacaatgtcacattttcatatcctggagatgagatatattgggaatatgaaacaactgccctctcagagattaaagtcatagaaaccaaaataattccacaaaaggaagaaatagtcttaataattggcgataagtcaaagataaactataccataaatccaagcaatgcagttggagatgtcactttcacaagcaatgacacaaatgtggtcaaagtcaatggaagcggagatattgaggcaatcgataaaggacaggccacaatcacaataaaattctctggaagcaaagactatgccccttcaaatgcaactgtaaacataacaatcggcagggaaatggctaagttaactgccgaaaacattactgtaacatataatgctgaaggataccttaaggttgccttaaaggatagtaaaaacaagtcaataagcggagccatattgattgtagacttaatcaataaaacaaattacactacagactccaacggagagataaaagtcccaacaaagtcattggctgctggaaactatactgcaagcatagaatttgaaggaaatgataagtacttgccagcaaacacaacagcaggagttacaatcgagaaggataatcctagattgacttcaaacaatatcacaaacaaatatcatactgaagattacctgatagtgagcttaaaggacagtgcatcaggacctataagcggtgccgagcttactgtatacctaaatggaagcgaaacttataagacagatggaaacggacaaataaaaatccctactaaagacttgcttccaaacatatatgtggcaaatataagctttgcaggcaatgaaaactacacagaagcaaacgcaagcgcaagcataaacataactaaactagatacaaggctgaatgcaacagacacaatcacaaaatacaatgtaaataaagatatgatagtcaccttaaaggacattgatggaaatgccataagcggtttgaatatacttgtagatctggacggagttaaaaattacacaacagactccaacggagaggtaaaagtgccaacaaagtcattggctgctggaaactatactgcaaacatagcatttgaaggcgacaatatctatattggatcaaatgcaacagcaaaggtcacaatagaaaaagagagcaccgaaataagcgctacaaatgtcagcgcaaaatatggctcaaaccaaagcatgatagtcactctaaaggacagccaaggcaatccaataagcggagctaaagtctctgttgagatagatggcaaaaaggactacactaccgactctaatggacaggtgaatgttccaagcaaaaacatagttccagacacttacaacgcgaccattacttttgctggaaatgagaactacacctcttcaaacacaagcgcaagcgtggtcataaaaagagtcaaaactgcacttaactacacagacatgaatacaactgcatttgattcaaatattgaaggaagagtaggagagtatttcagtttccaattgcttgacgaatatggaaagccattatccggaaaacaggtcttcattggatttaatggagttaaatacaaccgtacaacaaatgaaacaggagaggcaaggcttcagataaacctgaaatatgcaaacaattacacatttgccatagcattccttggagatgaaaactatagcggatcattcaattttgcaattatcagtgtaagcgaacagactccaagcttatccacaagccctaagacatataaggcaagtgcaaagacaaaggcattgactgcaacattgaaatcctataagggaacagcaattccggacaaaaagattacttttactgtcaatggaaaaacatatagtgcaaataccaattcaaagggcatagcaactgtgaatgtaagtctaaacaagaaaggaacttataactttacagtccaatatgcaggagatagtacttataagaagataagtaaaagtgaaaagcttactataaaataa

SEQ ID NO: 419 - DNA, 789 bp, Methanobrevibacter ruminantium
  source 1..789: mol_type = genomic DNA
atgaagaatatattaatatccaatgatgatggggttatgggtcctgggatattggctagcaagcaggctcttgaagggcttgccaatgtggttgtcgtagctcctcaggaaaacaacagcgctgtaggccgcaaggtcaatatcatgaagcatatgtatttggaaaactatgaattggctgatggaagcatggcttatggcttgtctggaactcctgcagattctgttaatgtggggattaattatgtgtgtgatgaggttccagatcttgttgtaactggaataaatcctggaataaacatcagcagattgcagataacaacatctggaactgtctgtgcagcgattgaagctgttggtttaggcattccagccattgcatgctcattgtttttggatgacgattgctttaagcaggatgatgagggcaattggtatgtggatacagattacagttttgctcaaaagatccttgcaaaacttgtaaagaaggtattggatgagggcatgccagatggcgttgacttatttaatcttaatattccatctaagccattatcggataagattaagattacaagacttgcagatagcatgctgaagtttaatattcttgaaagggttgatgatgatggcaatgatactgtcatgaatgttccggaactgattgaggattatgaggaaggaaccgatggatattgcttgcttgttgagaggaggccaagtcttactcctttgaatgttcattttggtgctgaaattagtaatttggaagattgggagttttag

SEQ ID NO: 420 - DNA, 735 bp, Methanobrevibacter ruminantium
  source 1..735: mol_type = genomic DNA
atggatataaatgaatgggaagaatggtatgaagagattcttaatacctttggatttcgtagggaagatgatgagaagactgcagacctattggatgaaatccttgcagatcatggttttttgaccattgatgagttctatgatgagatcatgcttaagaagggatacactgataagtttattgtctttggagcaggaccttcattgaaggagcatataagattcttgaaggaaaactatgacttaagcaaatacatgcttgtatctgccgatggggctacaacagcccttttggaagaggatgtcgttccagatattgttgcaactgacttagacggcaagatgtctgaccttttgactgcaaattcacttggctcatactttgtgattcatgcccatggaaacaatgaggagcttattgacctatggacaacaagctttaataagatccttggaacaacccagtctgttccagtaggcaatctctataactttggaggattcactgatggagatagggcaatgttctttgttgtagagcttggtgcaaaagagatggttcttgctggaatggactttggaacagttgtaaccaagtattcaaggccaaacattgagggtgagacaggccctgccgatgagataaagactaaaaagcttatttttgctgaaaggttattaaattggattagggaaaatgaggatgtggaagtgattaatttaatcgatagttaa

SEQ ID NO: 421 - DNA, 627 bp, Methanobrevibacter ruminantium
  source 1..627: mol_type = genomic DNA
atgaaagaaattgaatttgacttaaagaacaatccgttttataatttcctatcttcaagatatagcatgtctgcacgtttgaatgtggagaagatgtggaattattcaaaggaaaatgatctttccttttttacattatctcttgctgctttaatcaacagcttgaatgaaatccctgaaatgagacgaaggatagtgaatggaaaggtcattgaatatgattatctggatgcagtttgcccgataatggatgaggatagcggaatctataaggagatgagggtaaaggctccccagagatttgatgagatattggattggcatgattatgttcaagagcatgaaaggaagattttaaatggaacagaagacgcttttgaggtgaagactaccgaaagagatgagctgaatattgccaatttctcttgcattccttgggtggattttgattcaatcacaaattgcacagcaagctccaatcagattcagcctttgataacttggggaaaggtcaatgaggattatgaaatgactgtggctataacagttagccatatctttgtaaatgggcgagagttagcttatttttatcaattcgctcaggacaattttaataatcttttttag

SEQ ID NO: 422 - DNA, 1119 bp, Methanobrevibacter ruminantium
  source 1..1119: mol_type = genomic DNA
atggcaatagaagatattttgatgtttgacgagacaatatttaatgatataaatgcattcaatccagactatatgccacctaactataattttagagacagtcagatggaaggaatggctatggctatacgccctgccataagaggtggacgtccaaccaattcagtaatattaggatcatgcgctacaggtaagacaactgcaattaaaaaggtatttgaattggttgaaaagactacagataaagtggtttgtgtttatatcaattgtcagcttcacactacacgttttggaatcttttctcaaattcataaaaagatatttggacatcagcctccagagactggagttccattctcaagggtatatgaaaaggttatggataaactttcctcagatggaaagtctcttattgttgcctttgatgatgtaaactatctattccagactcctcatgcaaacaaggtattctatgatatccttagggcctatgaggaatatgaaggggtaagaacaggaatctttgcaatcctttcagacttggagtttcgattcgcccttgacaagaatgtaaataccgtattcattcctcaagacattgtatttccgccttataactatagcgagatattcagcattctaaaggatagggctaaggcaggattcttcccaggtgttgtctctgatgaaatcattgaagagatagccaatcagacctatgaagtaggtgacttgagagtgggaattgaccttttaagggttagcggaaacattgccgaatccaatgcaagcagaaccatagaattggagcatgttgaagaggcagttgcaaagcaaggctctgttaatcttatggaaacaatcaattcattgaatgacttagaaaaaaccatgatcaaggtcttaattgatagggatgaggttgttacagcaggagcattgtctaaggaatttaaggagcaggctggagtaagctatgcgacattcaacagaacccttgaaaagttggaattcttaagattggttgatacaaggtatacaggaaaaggagtaagaggcaattccagggagataattttaagattctctccagaggatattaaacgttgcaatctttag

SEQ ID NO: 423 - DNA, 192 bp, Methanobrevibacter ruminantium
  source 1..192: mol_type = genomic DNA
atgatggtaagccataataacagaacttgtgatttaagaaaaaaacaaaatttaagagatcctttgactttcaacaaccttagaataaacattaaagattgcatggtaatatttgtagtgtttacagtattgcttttatctattttagctgtaagtgcagctccaagcccagattttatgctctgggtataa

SEQ ID NO: 424 - DNA, 474 bp, Methanobrevibacter ruminantium
  source 1..474: mol_type = genomic DNA
atgattttaattcattgtggtgcaattatgagtgaaaataatcaaagggagaaaaaattcgaatattttgaagttactgcagatattggattttatgcttatggtaatactctggaagaggcttacgaaaatgctgctttagctatgtttaatgtggtgactgatatagataaggttaaaactagcgaaacccgtgagtttgaggtcgaatcagaggatttggtttctcttttatatgattatttggatgagttcttattccttcaagatactgaattcttgtttttcagtgagtttaaggttgatatagataaaacagaggatggttataagttaaattgcattgcatctggtgaggaaatcaattgggacgttcatgttccacgctctgaagttaaggccatcacttttcataagatgtgtgtaaaaaaggaagatggtgtttttaagcttagggctattttggatttgtaa

SEQ ID NO: 425 - DNA, 1449 bp, Methanobrevibacter ruminantium
  source 1..1449: mol_type = genomic DNA
atgtcaattagagaaagtcttgtaaaagttagagaaaatgtttgggaacttccaagtgactataagaaggaaatgagagttcctggaaggatgtatcttgatgatgaagctgtaaagaccattgaagaaggtgctcttgaacaggtttcaaatgtggcctgcatgcctggtattcaaggggcatcaatcgccatgcctgatattcacttcggatacggtttcagcataggaggagtaggtgcattcaattataataacggtgttgtaagtcctggaggagtgggctttgacattaactgtggagtaagaatgcttaggaccaatcttactgaagatgaaatcaagccgcatcttaaggagcttacagaggttctctttaaaaacattccatcaggtgttggaagcaaaggtcagataaggcttaaggacaatgagatcaatgaggttcttgattatggtgcctggtgggcagttgaacgtggattcggctgggaagaagacctaaaattccttgaagagaatgggagaatggaagaggccgaatctgaagtcgtaagcaaaaaggctaaaaaaagaggagttcctcaattaggttcattaggttctggaaaccacttccttgaggttcaaaagattgaggaagtctatgacgataatgttgcaaaggcatttggtctagagcctggaaatgttacaataatgattcacagcggttcaagaggctgcggacaccaaatctgttctgattatttaagaaagatggataaggcttatagaaactataagatcaagcttccagacagacaattggcatgtgctcctattgactctccagaggctacaggataccttaaggctatggctgcaggtgcaaactatgcttgggctaaccgtcagatgatgtcccattgggtaaggcaatcctttgaagaggtatttaagagggatgcagaagatatgggaatgagcacaatctatgatgttgcccataacattgctaaaaaggaagtccataaggttaaaaattcccatatggaagttcttgttcacagaaaaggtgcaacccgtgcattctgtcctggaagacgtgagattcctaaggaatatcgtgatgtaggtcagcctgtccttattcctggaaccatgggaaccgcttcatatatcttgcatggtactgatgttgctatggaagagacctttggatccactgcacatggtgctggaagggtattgtccagaactgctgctaaaaagcaatacactgctaaggatattgaaaaagaattgaatgataagggaattcatgtaaaagctaattcagctcctgtgttagctgaagaggctcctggtgcatataagaatgtggattctgttgttaagacctctcacgatgctggcattgctaagctggttgctaaggttgttccactagcagttacaaaaggatag

SEQ ID NO: 426 - DNA, 774 bp, Methanobrevibacter ruminantium
  source 1..774: mol_type = genomic DNA
atgattgcaattattggaggaagcggtgtcgatgagattacagacatggcagaatcaatagagaaaaagatagtagataccgaatatggctctgtacaggtttctctatttgaaattgaaggaaaagaagttgttttccttccaagacattcagaaggacatacctgtcctccacataagattaactttaaggcaaatatcatggccttaaaggagttaggggttagtcagattttagctacaaatgcagtaggttcagttgatttggaaattggcccgggatccatagtaattccagatgacttcttggactttactgtaaatagggataggacattctatgacgatgatgttgttcatattgacatgagcgagccttactgcaataggcttagaaatgcattgctagagaattctgattgtgtaaatggaggtcttgtagatggtggaacccatatttgtacagaaggacctagatttgaaactccatctgaaatcaggatgtttaaaatgattggcggaactgttgtgggaatgactacattacctgaagctgttcttgcaagggaaaaggagatgtgctatgcttccatagccattgtatccaattattgcacttccattgccaagcataaattaggagtggaagagataattgaaataatggctgtaaaaaaggaagaattgattagtcttctgtttaatacaattaagaatctgcctgtagactatgattgtgaatgccatcatgcattaggtgatgcggagttttaa

SEQ ID NO: 427 - DNA, 627 bp, Methanobrevibacter ruminantium
  source 1..627: mol_type = genomic DNA
atgaatataaaagagttatttatagaatccctaaaagacaataagaaactaataataggactatatgcattttttataatagttttcattgcagcttggattataaccggtccgaaaatgcaggccattgcaagcaatgtaactgcaatgaatggtcctggaggagcccaaagcagcgcaattgaacttttcatccataacgaacttggaggaatcattacataccttgcatcagtattctttggaattgctgcaattgtattgctaggatacaatgcattaaatttaggaagcattggacaattattcaatcatttcatgccaaatggaggaatcttatacctaatttacctaattccccatggaatatttgaaattactgcaacagtccttcagtccgcagctggaatactattgttcctattcatttggaggttcataaaggcatttagaagcaaggatacaaatggggcctctgacgcatttgagatgactaaaaagacactgattcagagcatagtgctaatggttattgcaacaatcctcttacttattgccgctccaatcgaagcatatttctcaactgcattttcagaatttattatggggtttttaggacttagataa

SEQ ID NO: 428 - DNA, 393 bp, Methanobrevibacter ruminantium
  source 1..393: mol_type = genomic DNA
atgaatgaatttggacaattacaattaatctggattagaagacttgcaagagaaactggtagaattactgcattgatagaagctggaaatctttctgtaattgatttggtcagatataaaaagagcatttcatcaatggatggattttgtcgttttgtaattgaatctcaagattgggatgatgttagaagaattcctgaaattgttgaagatgttgaagaaaagttattcttgcacttttatgaaatgatcgacagattcgatggagaaggagctcatttagacttttccaaagaagatgagggtaagatatgcttaaatttcgacgatgcttctttagaggacattgtatttacaatcattgatgacgaagacattgatgtgtttttataa

SEQ ID NO: 429 - DNA, 204 bp, Methanobrevibacter ruminantium
  source 1..204: mol_type = genomic DNA
atgagaaataatctaaaaatatatagggcaatagaaaatattactcaaaaggaattagcagatgaattaggcgttagcagacagacaattgtattgattgaaaataataaaaatgatccgtcattggaattagcctttaaaatagcccataaatttgatgtgaaaatcgaagacatatttattaatgattctaataaaaaataa

SEQ ID NO: 430 - DNA, 300 bp, Methanobrevibacter ruminantium
  source 1..300: mol_type = genomic DNA
atggaaaatcttttaaatttaaaatatacttgtaaagactgtgattttacttggataacattaaatggagaacatagcatttgtcctaagtgccatagtgaaaatattgatttattaggagaagtaaaggatttggatattgaagcaattcttgctcataataaaatgaggggaggatgttgtggttctgcacgtggaaaaggtcctttgacatgtggaaaaccaatgcctgaccatgcaaatccaaatattcctcatcataaccacaataagaaaacttgttgtggatacaatgaataa

SEQ ID NO: 431 - DNA, 1068 bp, Methanobrevibacter ruminantium
  source 1..1068: mol_type = genomic DNA
atgaatgtaagtgatttaaaaagagaccattatatgctaaagggtccccttgcaaagcaaggctatgactggtggtggcattccctcactgcatacaataaggaaactggggaaccaagacctttctttatagaatactttgtgtgcaatcctgctcttgctgaggatgagcctaccttaggccaagaccctaaaaacattgaagcagggaaaaagccatcctactgtatgctgaaggtaggagcatggggtaaggagcctaagcagattcataatttctattccatgaaggatttcgaatgtccagatgacaagttggatgttaagattggagagttcagcttaactgaaaaacatatgaccggatactgtaaggttacagaggaggaagcacgtgaccatccggagtacatgtgtgatgcaggagagatgaaatgggacttggacattgacaagcaaatcacttttaatgtgggatatggagctaacactctctttagaaaacttaattcatttgaaatgttttggcatgctgaaggaataaagactcaatacagcggaaccattgagcttgatggggtcgaatatgaggttattccagaaaagtcattcggatatgccgacaagaactggggagcagactttacaagcccttggctatggatctcctcatgcaatctaacaagcctcattactggagagaagcttaacaactctgcctttgaagcaggtggaggaaagcctaaggcatttggtatttcacttcctagaaagcttctgataggattctattatgaaggaaagatgtatgaatataactttgcaagattctggaatatggtaaaggttgatttcggatttaaggaaggtgaagagttgaatgaatggtttatcaatgcaagtaataaggacagcaagatggaaatgaagctttattgcaagcgtgatgagatgttgctctttaattatgaagctccaaccggtaagaagctacacacccgtctttggaatggtggtaacggctttggtgagataaagcttatgaaaaaaggacggcacattgattga

SEQ ID NO: 432 - DNA, 690 bp, Methanobrevibacter ruminantium
  source 1..690: mol_type = genomic DNA
atgttgtggacagattttattgttttggcgattgtttatatttatgtggttgcaatttttatactgtctgagaaggtcttaaagagcaggccagaggtctcccgtaagtttttacatattatggtaggtaatatgatatttgccatgccattcttctcagatccttggattatgcttttattcattaccttgcctgtaactgtggcactattcttccttacagagtactcccctattcagattgaaaacagcgttaccgaatccggacatgcattaggactcctcttttatgcattgatttggtccatattgctctttgtctacccaatcatgcttgatcctaactatctttggattgtagcaatggcaatcgttccattggtatatggtgacggatttgctgctcttgttggaggaaaatggggtacaatcaaatatcatgtatttggaggagagaaaactgttgtaggttcccttgcaatgctttctgtaactgcagttctttctgtatttgtttgggtgttctacagttcaataggatacactcttccagagcttaatttatggtatatattgcttatatcagcagttgcaacattgtgtgaagctctcagttatggtggtgtggacaaccttactgttcctgctgtaacttccgttttgtattatattgttgcgaccgtcctctaa

SEQ ID NO: 433 - DNA, 1059 bp, Methanobrevibacter ruminantium
  source 1..1059: mol_type = genomic DNA
atgaagcatagattaaatttagataataaagacccaaattatattttgttgaaagaaatatttaaaattatggattctagaaaatccaaaagtatattagcatcctatggatttaaaaacttaaatagaacaatatttacttttaaaattatatttataagtatgttctttggaattgacattccattcattttaaacgagcttaaatccaaaaaagaacttcgcaaatactttaatatttctgaagttttgactgcagatcaagtttataaaattttttcagaaataaactctgaaaaacttataaaatgtttaaacagaatcttaaactcaaggaatatggttaaaagaagaggaaaaaagacttttattgttgatgcgaccccagtggacgtagatattaatttccacagaaataaaaagactaaagaacatctggaaaaaattaatctcaaatggagttattcatcctctaaaggttattatattggatttaaagcaactgttgtattagattatgattctatgaatcctgtttgtattttagtccactctggagctccaaacgatgcaaaacttttcgaagaaattttagaaaaccttcaaaaaagacgaataatcagaaaaggagacacattaatctttgataaaggatattacagctataaaaactaccaaatcggaatcagcaaatacaaaatcattcctttcatttttccaaaagaaaaattcagcagaacccgattggatgacattttaacttatttactagccgtatttaacaaaacaaagagaataatgaaagaaaaaagattatacaatagtttaaaaatggaattaatgaaaaaaatagattcatgggaaaaatttaaaccaataaggggcaaaatagaagattttttcaaattattaaaacaaggcttgaatatgagagaaatccacaaatatactccaaaatcagtagaaaaaaccgtttatctaaatgtatttttgggagcactgattatatcacaaggattttactcaaaaacggccatacaacaattatctgaaaactaa

SEQ ID NO: 434 - DNA, 2208 bp, Methanobrevibacter ruminantium
  source 1..2208: mol_type = genomic DNA
atgactgatgtagaacttaaaatcaaagttgcagaaaccttgtctcaaaatgatgtaggcaaaaacattgctaaattggatatggaatccatgtttaagctcggcttaaaagacggagacattatcgaaatagtcggatctaaaaacactgcagctattgctgtcgcttctcaatctgatatggaaacaatcatcaggattgacggtaccacccgtaagaattccggtgcttcaataggagaggaagttaccatcagaagagcagatgtaaaggaagctaaaaaaatagtcctcgctcctatcgatgcaagaatcaggattggtggtgactttaacagggcattcgcaaatcaagtcatggttcaaggcgacttgataaacactggaatcaagacccctcaaagaagggtttcaggaagcggattctttgatgatatctttgatgaccttatgaatgtgcctggaataggtgcaatgagccagatcaagttggctgttgtaagcacaagccctggaggtgttgtaaaagttggccctaacactaaattggaaataaatgaagagccagttgacatctctaaattggaaggtgtatccaatcttgtagatatcagttacgatgacattggcggtttgaaggaggaagtcaagaaggtaagggaaatgattgagattcctcttaagaaaccggaattatttgaaaaattaggtatctcacctccaaaaggtgtattgatgcatggtcctcctggaaccggtaagaccttgcttgcaaaggctgtagcaaatgaaagtgatgcacacttcattgtaataaacggtcctgaaatcatgagcaaatatgttggaggctctgaagagaaccttagggaattctttgaagaagctgaagagaatgctccatcaattatcttcattgatgaattggatgcaattgctccaaaacgtgaagagaccaatggtgaagtggaaagaagaactgttgcacagcttttaaccttgatggatggtcttaattcaagaggtcaagttgttgtaatcggagcaacaaacagacctgattcacttgacggcgctcttagaagacctggaagatttgaccgtgaaattgaaatcggcgttccagataaggatgagcgtaaggaaatcatggaaatccacacaagaggaatgcctcttgcagaggatgttgacttggaccaaatcgcaaatacaacccatggatttgtaggtgcagatcttgaggcattggctaaggaagctgctatgagggttgtaagaagaatcattccggatttaggttcagacgatgagattccacctgaagtccttgaaaagcttgtggtaaccaaggaagactttaagtctgcccaaagggagattcagccttcagctttaagggaagtccttgtacaagttccaaatgtaacttgggatgatgtaggtggattggatgacgctaaacaggaattgaaggaagctgtcgaatggccattgaaatatcctaacaagttcaaggaatttggagtcagacctcctaaaggaaccttgctctatggtattccaggtactggtaagaccatgcttgcaaaagcagttgcaaatgaaagtgaagctaacttcattgcaatcaagggacctgaactcctctctaaatgggttggagaatctgaaaaaggagtaagggaagtctttagaaaggcaagacagactgctcctactgtaatcttctttgatgagattgattcaattgcaagctcaagaggaggcgaatctggagattctggagtaaccaaacgcgttgtaaatcaattgttaaccgaaatcgacggtcttgaagagctagaggatgttgcaatcattgcagcaaccaacagaccagacattatcgatccaggtctcatgagaccaggaagatttgacagacacattaaggtggacgctcctaatgaggacgctagacttgcaatattcaaggttcacaccaaagacatgcctcttgctaaggatgtaaagcttaagaaattagctaaacgtgctgaaggatatgttggagctgacattgaagcagtttgccgtgaagcagctatgctagctttaagggatgatattgaagcaaaagaagtttcagcaaaattctttgacgaggctatggataaggtgaagccaaaaagcagtaatgaagaagaattgatccaatacttctag

SEQ ID NO: 435 - DNA, 840 bp, Methanobrevibacter ruminantium
  source 1..840: mol_type = genomic DNA
atggataggcatgtgattgaagcattaggtagggctagaataacagtggaaaatgggaaggttgttgatgtaggagagcctatgattgaatattgtcctttatttgacaagcataggggaataaaggaacttacaaaagaggaaatagaaaaaaacattcaatttagaatagatgactttggaatgtgtactaaaaatcgtcaattaagacttaaagactttttatcctttggaatatctgaaatattgtctacattgcttgatgagaatcttattgactgtgcagtcatggtttgtgaaggatgtggaactgtccttgtaaccgaaagtgagatggctcagggagttggaggaagagtctctggacttgttgaaacaagtcctatttcccagagctttatttggaagagttttggtcaagatcgtgttgttgacagcgagactgcaagaatagatcaggtggatggccttagattggctattgacaatggatataagaacattgcagtaacaatttgccttgctgaagatggaatcattcttagggaattggaaaaggaatatgaagacattaatgtctatatatttgcagtccattcaacaggccttggaagagaagaagcagaaataatatttgatactgcggatgtggttacaggatgtgcttcaaagcatcttagggatattggaaaggagctaaaggttttctctgtaggaacttcaattccaatttttgctgcaagcgataagggtgaggagtttattaaattaagattggataaaataggtgggccaaaaaagaaaactggtaattccaaacagcctaatcctttagtttag

SEQ ID NO: 436 - DNA, 636 bp, Methanobrevibacter ruminantium
  source 1..636: mol_type = genomic DNA
atgtcaaaagatgtggttttaatattatcaggaggtttagactctactacattattatataaattattaaatgaaggaaataatgtcactgcactcagtttcaactatggccaaaaggctgctatagagattgaacgtgcaagtgagatatgtaaaatgaacgatgtaaatcattttgtttttgatataagaaatattgtagacttgcttagcagcagcttaaccgataaggataatgacaatgttcaagagccaaaaagcactgttgttccaagcagaaatacaatcttgcttgagcttgcaactgcatttgcaataagcaacaacttagaggaagtttattatggtgcaatcaaggcagacactggcgactatccagacaccactcctgaattcttaaagcagataaatgaattaaataaggttaataattatgaatacattccagtttgtgctccttttattgatacagataaaaaggatgttgtaaagcttgctttagagttaggagtgcctattgaaaagacttggagttgctatgtaaacaatgacggaactccttgtggggaatgctttagctgcaagtcaagaatagaagctataaaagaagctaaggaagaattaggtattgaataa

SEQ ID NO: 437 - DNA, 360 bp, Methanobrevibacter ruminantium
  source 1..360: mol_type = genomic DNA
atgttaacattagtatcagaacacagaatatatggctgtcacaagctaaaggaccaaggaggaaagtgtacacaatggcatggacaccaatatagagttatattaactttacaggctccttataaggatttggattatagaaatatgatcatggacacctatgacattgaagctatctttaatgagttcattggtgtggatcatttgaatttaaatgaattcatggattctgaaaatcctaccatggaagagatgagcaaattcttctatgatggtcttaaggataagattgaatgcttggtaagcgttggagtttatgaaactcctgaaactggagttacctatactcctatggaatag

SEQ ID NO: 438 - DNA, 609 bp, Methanobrevibacter ruminantium
  source 1..609: mol_type = genomic DNA
gtgattaaaattaaggtaagtgaaatattcacatcatttcaaggcgaagggccttatatagggactcctgcaactttcttaagattgtatggatgcaatcttaactgcccatggtgtgacactgatatctccacatatgaaattctatcagtggatgaggtctttgagatacttatgactcaaatggagtttaataatataaggatattggttataactggtggagagcctacattgcagatggaagagcttaagcgtttgattaaggaaattccagatgagattaagattcaaatcgaaacaaacggttcaatttttgaatacgttccagaaatcgattatgtgataagtccgaaggaagataaggaaaccgtatttaagaactattataaatatgataatgtgttctttaagtttgttatttgctcacaggaggatattgatgaggtcatttatctaaaggataaatataattatgataaaaccatatggcttcaaggagagtttagcaaggatggtgaaatggcagacttgattagggagaatttccctcatttggagaatgttaagttgtctgttcaaactcataaatatttgaatcaaagatga

SEQ ID NO: 439 - DNA, 423 bp, Methanobrevibacter ruminantium
  source 1..423: mol_type = genomic DNA
atgtataaaaagattatattaccaactgatggatctgaatattctaatagagaaattttaagagctactaagttattagctgaagatggagaagtcattattctttctgttgcaacagaattaagaaaaactgctttccaaagaagcaaagatattgatagggctaataaggagtctattcaagaagctaaagaatatgttgcagctatgaaaaaaggatttgatgacagcgtaaatgtcaggactaaagtcgttgtaggatttccagctgaagctattaatcaagttgcagaagaggaaggggctgatttgattattattgcttcttcaggtaaaagagggcttcataggtttgttattggaagcgttgctgaaaaggtacttaaagattctgaaattgatgtgttattagttcatgattaa

SEQ ID NO: 440 - DNA, 582 bp, Methanobrevibacter ruminantium
  source 1..582: mol_type = genomic DNA
atggcggataaaaaacctactgcagaaaactggcctgttgtaagtggagattatattgtaggagatccagaaagccctgttgctgtaaccacattggcttctcacaatgaagacattcctgcagctgctggcgcagccattgctggaccttgcaagactgaaaaccttggaattgaaaaggttgttgcaaacatcatttcaaaccctaacataagatttttgattttatgtggtgctgaagtgcaaggacacattacaggtcaaagttttaaggcattatatgaaaacggctgtgaccctgagaaaaagaaaatcactggagctactggagctattccttttgtagaaaacattccaatggaaggtgttgaacgattccaacaacaattggaacttgttgatatgattgacaacgaagacggtggagcaatcactgcaaaagttaaggaatgcatagaaaaagatcctggtgcttttgaagaggattctttagtgattaagattgatgaagaaagatattctaaaaaaagcagttttgtggaatcttcatctgaaagtgaaaaaatagaatccgaagcataa

SEQ ID NO: 441 - DNA, 450 bp, Methanobrevibacter ruminantium
  source 1..450: mol_type = genomic DNA
atgaaaaaagaatcaatattcaatgacgaagtaagcctattcaattccatttatgtaatgcacaaggcatttgaaaagtttttaaaaacccatgtaaatgatttaaatatcaataaggcagaatctaaatttttaggtgaaatctattataatgaagggataagccaaagggaaattgctcgaaacttatttgtttcagaagcaaatattgcaaagacatacaagatattagaaaaaaaaggatttatctataagaaagttgatgaaaagaacaatacccgtcgtcagttatacttaactgaaaaaggcaaagaatcctttgaagaaatcattaagctttatgaagagtatcatcatttcattttaagtgattacacagaagaggaaatcagaaagcatgaagaaatgatgaaaggaattgcagacaaatccttaaaattcttaaaataa

SEQ ID NO: 442 - DNA, 771 bp, Methanobrevibacter ruminantium
  source 1..771: mol_type = genomic DNA
atgaaaaattatttcgacataaaagacaaagtagcagttgtaaccggtgcttcttccggattaggttggcaaattgcacaagcttacgcaagccaaggtgctaaattagctttattcgcaagaagagaagaaagattacaagaaaacgtaaaagaaatcgaagacaaatttggtactgaagtaatgtacgctgttacagatgtcggagattatgacagcattaccgcatccgttcaaaaagtaatggacgcatatggaagaattgacattctcgtaaacgcagcgggtatgggtaacaacaaaatggttgtagaccaatccaacgaagaatgggcaagacacatccacatcgacttaacaggtgtatactacatgtgtaaagctgttggagaaatcatgattgaacaagaatacggtaaaatcatcaacatcggttccatccacagtagagttatcttccctggcggaggtatcagcgcatactcctctgcaaaaggtgcagtaatgaacttaaccaaaaacttagctgtagaatgggctaaatacaacattaccgtaaacgcaatcggccctgcagtattcgaaaccgaattaactgttgactccattgaaatggacggattcatggatctcattgcagcatactgtccagcaggcagattaggtaaacctggtgaattagacggacttgcaatctacttagcatctgacgcatccagcttctgtaccggtcaattaatctgtgttgacggtggatggactgctatataa

SEQ ID NO: 443 - DNA, 1275 bp, Methanobrevibacter ruminantium
  source 1..1275: mol_type = genomic DNA
atgactcaaatgactgaagctaagaaaggcaatgtaacccctgagatgcaagctgttgctgaatttgaaagagtagatgttggaaagattctaaacggacttgcaagtggtagaatagtaattccaaagaatattaatagagatacaaaggcttgcggtattggtcagggcttaacaaccaaaatcaatgcaaatataggatcttcaagcaaaatcgaagacattgatttggagattaaaaaagcaaaattggcagttgattttggtgcagatgcaatcatggacctaagcacaggacctaaattattagagttcagggaaaggataatggactcagtggatgtggccattggaactgtccctatctatgaagcaggggtagttacattaaataagggcaatgaaataatagatatggatgaggatgacatattcaattccataatccatcaggcaaaggatggggttgacttcatgacccttcactgtggaatcaatcaggatttggtctataaacttcaagaggctaaaagaatgatgggtattgtaagcagaggaggaactttcctcgcttcttggatattgcataatgaaaaggaaaacccattatattcaaattatgattatttgcttgagattgcattggaatatgatataactctctcattaggtgacggacttcgtccgggatgccagtctgatgcaacagacacttcccagattcaggagcttgtaaccttgggaacccttgtaaagagagcacaggaagcgggagttcagacaatggttgaagggccaggacatgttccccttaatcagataagggcaaatatggagattcaaaagacattgtgtcatggcgctccattctatgtattagggcctattgtaactgatttggctccaggctatgatcatatcacttcagctattggaggagcaattgcagcatcaagcggagctgacttcctatgttatgtgactccagcagagcatctctcacttccatcccttgaagacgttaaggaaggagtcattgcaagcaagattgctgcccaagctgcagatgttgctttaggattggacactgcatgggagaaggaagtggaaatggcacaggctcgtaaaaactttgattgggaaaagcagtttgatttagcttttgatagtgtaaagccacgtcattataggaataagtgtgaattggatgatgatgagatgtgtgctatgtgcggagagtattgtgcggtaaagatagctaaaggtgacttttag

SEQ ID NO: 444 - DNA, 1653 bp, Methanobrevibacter ruminantium
  source 1..1653: mol_type = genomic DNA
atgaaatacgaagaacttgttaatgtttatgaggcattaggtgcaactacaaaaagattagagaaaacagagatattggcagattttcttaaaacagtggaactagaagatttacagaagattactttaatggctttaggtcgtgtttttcctccttggagtgaagaggaacagggaattggcgataagcttgttatgaaagctgtaggagatgctgtaggagtctctgtagcagtagttgaagatgcaatcagagatgaaggagacattggagcagctgcagagaagctttacggcaaaaagactcaaatgactttcttctcacagcccttgacagttaactttgtctataatcagctgagaaaattggccaaaataactggaaacaggtccacagccaaaaagatctcaaacattttggaattattgtcatctgcatctgcacttgaagctaaatacatttgccgaaccatattggaagaacttagaatcggtgtaggtgaaggaatcattcgtgatgcaatttcacaagcctttggtgttgataaggcacttgctgagagggcacatatgcttacaaatgatttaggccttgttgcaaaggttgcaaaggaagaaggtgaagatggccttaaaaaactttcattaattccaggaaggcctgtcaagccaatgcttgcccaattgtctgagggaattgaaataagcataaatgaaatgggttgtgcactttgtgagacaaaatacgatggaattcgtatgcaggttcataagaaggatgatgagattacaatattcactcgcagactggagaatgtgactatggcccttccagaggcagttgacctaatcagggaagctttcccagatgaggacttcattgcagaaggtgaaatcatagcaatccgtgatggaaagccgactacattccagaacatccttcagagagtcagaagaaaacataatattgaagaagctatggaaaaggttcctattaagatttatctatatgatttgctctactttaaggagccaaccattgatgagccgataatcaagcgtcgtgaaatattggaaagtgtagtggattgctcaaatcctaatttggccctcagttcccttgtcaaggtaggtccagataatattgatgatgcagtggatttattcaataagtcaattgaagggggacatgaaggaatcatgattaaagactgcgatgagccttatattccaggaattagaggcaaaaaaatgctaaagcttaaggcagagcctgaaacattggatgcagttgtaatcggtggagttaaaggaataggcaaaaggggagactttataggctcttatgtgattgcccttcgagatgagaatgaccagttgcagcctattgctcatgtaggaaccggtctttcagatgatgacttggcaaatctcactgaaaagatggaagctcttaagataactgaaaagggaactagaataactgttcatcctaagatagtctttgagatagcttatagtgagattgtaaagagtccagagtatagtgcaggttattcattgcgtttccctgtagttaaaaggataagggatgataaaggcgttgatgacattgatacaattgaaagattagagtctatgtttaagggatag

SEQ ID NO: 445 - DNA, 399 bp, Methanobrevibacter ruminantium
  source 1..399: mol_type = genomic DNA
atggaattgaatgatgaaataatatttaaagttgcactgattactgcattggtcggaatgattgggatgctagcttttgcctcttatattgaaccaaaggagataacaatcaatgaaattacaagaaacaatattggtgagacagtttctgtctctggtgttgtagagtcggttaaattatcctcaagcggaagctcctgctttctggagctaaatgacggaacaggtaaaataaatgtcattgttttcgaatcggttttagtggagcttaaagatgctggaaacgacttaaatgattttaaaggtcataatataaaagttgtaggcagcataacagaatataagtcttctatggaattgattttagctaattccaattcaattaaattggaatcttag

SEQ ID NO: 446 - DNA, 213 bp, Methanobrevibacter ruminantium
  source 1..213: mol_type = genomic DNA
atgtatgaaaaggataaattagtattgcctaatatcattaaagaagaatttgattgcatagaattaaatgaagacaccatatttgattgggctattgaagatgacaaaatcattcttaaacctagaaatatagttacaactgacgatattataggtattatagatgatgatggtggagaatgggatattgataatgaaatttattccttatga

SEQ ID NO: 447 - DNA, 234 bp, Methanobrevibacter ruminantium
  source 1..234: mol_type = genomic DNA
atggggtttttagctagttctaagatttatggggattatcaaatagatattcccaaggaagttatagaagaattcaatgtggaaagagattctattatggaatggattattaatgaagatggaagaatttccattaatttcagaaagaaatattctataaaagatttggtaggtgcttttcatctggatgatgaagtcagttctgttgatttaaaaagaagtttgtatgagtag

SEQ ID NO: 448 - DNA, 1365 bp, Methanobrevibacter ruminantium
  source 1..1365: mol_type = genomic DNA
atggtagaaaaacgattatttggtacatttggtgtaagaagaaactgcgaaatgatggtgttgactcctgaatttgcatccagacttgccgcaagttatggatctattgtgcaagggaccgtagccattggaggagatacaaggacaagcactccaatgcttaaacatgcaatcactgcaggtttgctctcttcaggctgtgatgttgtggatttaggaatcctcccaactcctgctattcaatatgcagttagaaattattatgatgggggaattattgtaacagcttcacacaatcctccaaaatacaatggtcttaagtttgtagatgaatttggtataggaactccagatgatatggaaattgaggttgaaaagctatactttgatgaggagcctattcgcgcttcttgggataagattggtgaagtctttacaaacgaatcaatcattaaggaatatattgcagagactttaaagagagttgatgtggaagcaatcagggcaagaaagcttaaggttgttgtagactgcggttcaggtgcaggatcatacaccgccccatacattcttaaggaattaggatgcgaggtaaccacattgaactgtcaggctgacggatttttcccaggaagggacccagagccaatagagccaaatcttcaggacttgattgcaacagtaaagaaccttggagcagacattggacttgcccatgacggtgatgcagacagaaccatttgcattgatgagaaaggaaacttcatattaggagataagacctttgcccttgttgaaaagcatatgcttaaggaaaacggtggaggaattgttgtaaccactgtagctacctctcaagccatttatgatattgcagaagagtttggcggtgaagttattgcaactgctgttggagatttgcttgttgcaagaaagcttaaggatacagatggactctttggaggagaagaaaacggtggactaattttcccagactttatctatggaagagatgctgccatgactgtggcaaagatacttgaaattcttgttaaggaagataagccattatctgaacttgtagcagagcttccagtctattatcaggaaaagttaaagattgaatgtccagatgatcaaaagcaagatgtcatggctaatattgcaaatgagattaaggacacaactgactttgagcttgatacaactgacggagttaagattctaaaagaggatggctgggtaattattaggccatctggtaccgaaccgatattcagatgctttgctgaatctgattccatggataaggctcaagagatggctaactggggaatcagtttagtggagaagtataagaattag

SEQ ID NO: 449 - DNA, 804 bp, Methanobrevibacter ruminantium
  source 1..804: mol_type = genomic DNA
atgatttccgatagacaaaaaacattgctcattcttattctagtgcttgttttagcttttgcaataatatttctaggatattccatctccttaggaaacaatcaaacagcaggtgttaagctaaatgattccaataagatttatattaatcaatcttatccggcagagcctattccagatgctaaaattgatacaagcggtgtaaattcagttttattaggtcaaaatgaattaggtagcgtagagcttctcggcccatttggaaactccgattcagagattaagatagcctattcaataggtatgcatccttgggaaagcaaggttcataaggctttgtttgataccgtccttgctaaaaacagctctttaaaatattgctattatatttataagataaatgtgacaaattataatactgatgatgagggcagaatggatgggcagcttcttgctcaggagtttgtggcacctcatataattaatggagattatgacttgtttttagacattcacagcaataagggaactgttggaggaacttatgagcaaactaactttgcttttgcagttggtcaagatgaaaagtccgaggcctttgtaaagaaaatattagataagatgccagagcttgtttattatttcccagctgatcagtcaagccctccttatataaccttacctgtagagcaagcaggaactcctacagttaattatgaaacattctcatatgaggacattaatacaacctatgatttgattgataaattggttgatgtggttgataatttggagtttaaatga

SEQ ID NO: 450 - DNA, 714 bp, Methanobrevibacter ruminantium
  source 1..714: mol_type = genomic DNA
ttgtgtgatttgatattgaatttaattattaaaatagatgatattatgattattaaaaattattctaatgaacctactgatgaagcaaaggtagattcaagtttatatgatgctcaattaattggagaaaacgatttaggaactgtacaccttcatggcccatttggaaatgaggaatcagacattaagatagcttatctaatcggcatgcatcctttggagagcaaggcacatagggctttatttgatacagttcttgataaggatggggatttgaattattcatattatatctataacataaatgttataggagaacttgatgaggcaactgaaggtcgtatggatggccagcttcttgctcaggagtttgtagcccatcatataattgataggggatacgatttctttttagacattcatagcaatagggggtctaggagtcctggaacttatgaaataagcaattttctatttgctccaggctttgatgaagaatctagtaaatatatgaatgtattgctttctaagatagatgaattggtttattatgctcctgaatatagaacaagtcctgaatttattacagttcctgttcaaaagagtggaattcctacactagtttatgagacctattcctatgagccaattgagctcacttatgaattgagtgaaaaattagtggatgctgttgacagtttggactttgattga

SEQ ID NO: 451 - DNA, 1137 bp, Methanobrevibacter ruminantium
  source 1..1137: mol_type = genomic DNA
atgcctataatgtcctttggaagtcagaacatcaatatcataacaaataaaaaagcaatgaccataaggaaattatggaaaacccctttaaagaaaggtgataggcttcattgttactggaatcttgcttctaaggaaaagaaaaaaatctttgaagctgaagtcacagaagtggaaaccattaccttcaaggaactaaaggataacgatgaattggcaagagaggaaggatacgaagattccaaggaaatggttaaggaatttaaaaaaatgtatcccgacagaatcgcagacgacgacctattccaaataatctattttgaaaagcttgacataaacaaatggaaaggtgaaaagatagatcaaaaggaaatgatcacccaaagggcagatatcctttttgatactggaaaatacgacaagtctgtactatgctataatgctgccttaaagatagaccctaatgatgtttaccttttaaacaagaaaggagacaatttaggaaggctagacagatttgaagagtctattgaatgttatgacaaggcccttgaaatagaaggagacaatgaatatatctggaacaataaggcaatagccatgcttaactctggaaatatagaggaagctttagttgcaagcgatggagcattaaatgcaaacccagacaatccagttgtcctatactggagaggattcatccttgaaatcctatcagaattcgataaggctttagaggtttatgataagctaatcacaattgatgacactaaccctgaagtatggaacgcaagaggaaatgtcttaacagacatggaccgactggaagaggcattgcaatcatatgacaaggcattggaattatgcttagaagattctgaaatagacgcatctgcacaaaacagaaaaggaaacgcacttttagaccttggaagatttgaagaggcaatccaatgctatgacagagcaatcgaacttgaaccactaaacacatcattcctattaaacaagggagttgtattgatggagattgataagtttgatgaggcagaaatcctttttactaaagttcttgcattagacccttccaatgatgatgcaagggttttaaaattggaatgtcttgaaaatatgtaa

SEQ ID NO: 452 - DNA, 723 bp, Methanobrevibacter ruminantium
  source 1..723: mol_type = genomic DNA
atggaatatggtgctacaattacttcttcaatcgaatatcctaaaaaaatgtcatttgttatctttttagcaaagtgtcctttaagctgtccttactgcagcaatagcgaactgctctatggaggagaggaaataagcttagaagagattattgaaaagatagatgattccgctttcctatcagatgcagttgttgtctccggaggagagccattggtacagcttgaagatacaattgaaatattaaaatacacaagaaaaataggactcaacaccaaattagacacaagcggagtctatccaaacagattaagaaaagtattggatttaggattggtcgattaccttgcaatggatgtgaaggcaccatttaacaaatataaagaagtcatccattcagacattggagataaggtaaaggaatcattggatattgcaaatgaatatgatgatgttttccttgaatgcagaacaacctattgtccagcattacttgaagaagaagacctatttaagatagttgatgaagtggaatgtgacttatacacaatccagcaattcagaaacagatgcacattggatgaaagtctagacggtgcagaagagccaaacccacataatatgagagaaatagctcaaaaaataaaagaattgcaccctaatcaggatataaacattaaaactgctgaatttggccaacagaaaatcgaattagaaaattaa

SEQ ID NO: 453 - DNA, 1125 bp, Methanobrevibacter ruminantium
  source 1..1125: mol_type = genomic DNA
atgaaagcccgtaaagcagtagaagaaatagatccatatgttccaggccgttcaaaagaagagatagcacaggaattcggagttaaaaaggaagatataatcaagctaggatccaatgaaaatccatggggaccatccccaaaagcattggaagcaatcaaggaagaactgaataacatcaacagataccctgaatctgacgttgagctattgaaaaaggaatttgcaagatactctaatgtaaagcctgaaaacattattatcggaggagacggagcagacgaaatccttgacacccttgcaaagacattcatagaaaaaggagacgaattcatagtgccactgccttcttatatgtattatgaatttctattcaagccttacggagctatccctaactatgcaaaatggaatcttgaaactaacacattagatttagactctgtgcttgatgcaatcaatgaaaaaacaaagatgcttttcctatgcagtccaaacaatccaactggcgcattgattacacaggatgaattcagaccaatcctagagaaaacaaacaagtccagaggaggagtctgtgatgcaatagtagtaatcgatgaggcatatgttgaatatgcagagggaaccaatgtaaatctccttgaggagtatgacaatatattcatcataagaacaatgtctaaagtcatgggacttgctggaatgagaataggctatggaatatcaagccctgaaatcattgaatacatgcacaggataaagcctgtattctcacttacaaagctttcatatgtagctgcattagctacaatcagagacacagaatacatagaagaatcaatcaaaaagggaattgaaagcagagaatacctatacaatgaaataaacaagatgaagtctgtaaaagtcttcaaatcctactcaaactttatgctaatcgatatccacaatacaggatacacagcagcagaacttacaagagaatttatgaaaagaggaatgattgtaagagactgcacttcctttaagggaatcgatgaatactactttagaattagcatctgtaccctagaggaagataaaaagttcatagaagccatgaaagatatcttgaatgaataa

SEQ ID NO: 454 - DNA, 477 bp, Methanobrevibacter ruminantium
  source 1..477: mol_type = genomic DNA
atgaaactcaaagaacccgtaaaaatattccctggtgcacaagtaatcggcgatgttgaaatagatgaaaactgttccatttggcatggagcaatcataagaggagatgtcggaccaataagaattggaaaaaactctaatgtccaagacaactgtgtccttcatacttcagcaaatctaacccttaagataggagataacgttactgtaggacatggagctgttgttcatggctgtgaaattggcgacaatgttcttataggaatgaatgcaactattttaaatggtgccaagataggcaaaaactctattgtaggtgctggagcagtagtaagcgaaaataaggagtttccagaaaatagccttattctaggagttcctggaaaactcattaaggaaaccactcaagagcaaagagacaatatcgcttggaatgctaagcactatgtagaacttgctaatgaatatgatgaataa

SEQ ID NO: 455 - DNA, 1320 bp, Methanobrevibacter ruminantium
  source 1..1320: mol_type = genomic DNA
gtgaaagcattaatactaagcgccggggaaggtactcgtatgagaccattaacacttacaaaacctaaaacaatgctccctgtcgctggaaaacctatcatacaatataacatagaagcattacgtgaatgtggcgtaaaagacattcttcttatagttggctataaggaagaaatggtaaaaaattactttgatgacggaagcaaattcggcgttaacataagctatgcaacccaaaccaaattagaaggaactgcaaatgcaattagctacggaaaagacttcatagaagatagcctaatcacacttaacggagacatcatcctcgatgaggagatactcagggaaatcatagaggactacgaagagtctggcgcagatacattaatggtattaaccgaagtggaagatccaagcgcattcggtgttgttgaattggatggagaaaaaatcacaaacattgtggaaaagcctaaaaaggaagaggctccaagcaatctagtcaacacaggaatatatatctttaacaaagacatcttcgacaagatagacaaaactaaagtctccccaaggggagaatatgaaatcacagactccctatccctacagattgaagatggcaaatttgtaaaaggccataagaccgaaaaggaatggatggatattggaaagccatgggagcttattgaaataaacgaatccctcctcaacaatatcaaaggagaaatcaaaggaaccgtagaggaaggagccaccttacatggagaggtattccttgatgagggaagccttatccgttctggagtttacattaaaggtcctgtatacataggaaaggactgtgacataggccctaactcatatatccgtggaaactcatacttcggcgacgatgtccatattggaaacgctgtggaaatcaaaaactcaattattatggaaaacaccaatgtaagccacctaagctacgttggagactctatcctaggctcaaactgtaatattgcagctggaaccaacattgcaaacttgcgttttgacaataagaccgtaaaattcaatataaaaaataaaaaagtagacacaggcagacgtaagctaggagcaattgttggggatggagttaaaactggaatcaattcaagcctttcccctggagtaaccataggtacaagagctacaataggttctggcgtcttattatatgacgatcttccatcagacatgagagttctccttaagcaggagcatataattcaaaacaagaaagaaaatggacaaatccgcttagaagaagttgaagaggatatgaataaatag

SEQ ID NO: 456 - DNA, 162 bp, Methanobrevibacter ruminantium
  source 1..162: mol_type = genomic DNA
atggtaaaatatgtatgtatgcattgtgaatatacttgggactctgaaactggtgatgaaacttacaaagtaccagcaggacctatcgaagacttcccagatgactgggtatgccctcaatgtgctgcaggtattgaaggaattattaccgaagaagactag

SEQ ID NO: 457 - DNA, 1347 bp, Methanobrevibacter ruminantium
  source 1..1347: mol_type = genomic DNA
atggcaaataaaaaattattcggaacttctggaatcagaggaaagataggttcagaagtcacctctgaattggcacttaaaataggaaaatcattagccaaatacttaaataacactggaaaggtagttatcggctatgacacccgtactacaaacagaatgcttgaacaggcaatcactgcaggactcatcgagcatggagtcgatgtaatcaagatagctatggttccaacacctcttgtaggatatgcaaccattaagctaggtgcagatgctggaataatgcttacagcctcccacaacccttcagagtataatggaatcaagctctggaatgcaaacggaatggcttatacaccagaacaggaagaaaagatagaagaaatctactacaacgaagacttcggaaaggttgaatgggacaaaataggaataataagccataatgatgagattaaaaagcaatatatagatgatcttttagacattgtagacatcaagccaggtcttaaagtggtcatcgactgtgcatgcggagcaggatctgaactttccccagtattgtttagaaaagcaggatgtgaagtaatcaccttaaactcacaggttgacggattcttccctggaagaaacccagagccaaatatagcaaacctttcaagccttatgaaagcggttgtagcaaccgaatcagaccttggaattgctcacgacggtgatgcagacagaatgattaccgtcgatgagaacggtaaggtttcagactttgacaagcttcttgctcttgtatccaagaaattcggaggaacagtggtaacaactgtagatgcaggattatgcatggatgaggctatggaagaagtaggaggaaaggtcctcagaacaaaggtaggagacgtaaacgtagctgaagtgatgatagaagaaaatgcaagcttcggcggagagccttcaggaacttggcttcaccaagacttttgcatgtgtccagacggaatcctatcagggcttagaatggcagaaatcgtttcaaaggaaggaaagctatcagagcttctagcacaattcactgactatcctcatatgagggaaaaggtcatatgttcaaaagagcaaaagatagccgtgatggaaaacatggaagagctccttaaaaacgcctttgatgacattaaggaaatcaatacaatcgacggcataagattaagctttgaagacggcagttgggtattggtaaggccatcaggtactgaagactatgtcagagtaactttagaagccaaaacccaagaaaaagcagaattcattagagacacttgtgtcaaaatcattaaagagaatatttag

SEQ ID NO: 458 - DNA, 1239 bp, Methanobrevibacter ruminantium
  source 1..1239: mol_type = genomic DNA
atgaaaggaatgatattggttatggacggattgggtggccgtcccttaaaggaacttaacaatcaaactacactccaagctgcaaagactccaaatatggataaaatggctgaaagaggaataacaggaataatggactcaatagctcctggaatcataccaggcagtgacacagcacacttatccctattaggatatgacccttacgaagtatacactggaagaggcccatttgaagcctctggagtcggagtggatgtaatacctggagacattgcattcagatgtaatttctcaacttcagatgaggatggaataatcacagacagacgtgcaggcagaatcagagaaggcacaaaggacattgtagacgtcctaaacacaatggtcattgaaggctacgaagacattgaaatcatattcaaggaatccactgggcatagggcagttctagtccttagaggagaaggattatctggtgaggtaagcgatgcagaccctaaagtggaaggaaacaaaccaaaagaagtaaaaggccttgacggaagcccagaagcagataaaactgcagacatccttaacaaattagtggtcaaatcctatgaaatggttaaagatcatccagtaaaccttaaaagaattgaagaaggacttccaccagcaaatatcataattcctcgtggtgcaggagaagtgcctgaagtggagccaatcaacgagaaatatgaagtcaattctgcatgcattgcagaaacagggcttatcatgggaatcggacgctttgctggaatggacatcattgaaatggaagatgttaccggcggagtggacaccaacctttacaatatcagagatacaatcgtagatcaggtaaacaactcagaacatgacttcttccttgtaaacattgacggagcagacgaagcaggtcacgatggaaatgcaaaagacaagcttgaattcattgaaaaggtggatgagattgtaatgagcgaacttttaaagctagaggacatttatattttcctaactgcagatcattccacaccgatttcagttaaaaaccactcaggagacccagttcctataataatcaacggccctgaagtgagagtagacgatgtaaaggaatacaatgaatatgcagtggctaaaggaggaatgtgcagaatccgaggagcagatgtaatgaacattcttactgacctaatgggctatgcacataagtttggagcctaa

SEQ ID NO: 459 - DNA, 699 bp, Methanobrevibacter ruminantium
  source 1..699: mol_type = genomic DNA
atgaaagaagccttaatgataaattggggatatgtagtgcttctttttattttaggagcaataagctataaaagaaaaagcctagacatgctaggtgccctaataatgatttttatgggaataaccatcatcttctcagcaggagtgtcatggtttatcttaatcgtactgttcttcatattaagcataatggccacacgcttttcaaagccatacaaaaaggaaataggacaatacgaaaagaccagaactgcaaagaatgttatctctaacggattggtggccttcctgatggctgcattcggaagctattatctgccattggctggaggatttatcggagcagtagctacagctacagcagacacattagccagtgaaataggtgtccttcaagagcctcgtttgattacaagctttaagaaagtacctgcaggcacagatggggcaatatcaattttaggaacatcagcagcgattgtaggagcaggaattattggaatcgcttcatttttacttggaatcatgccagatccattgatagcaattaagatttctgtaatctctggaaccgtaggctgctttatagacagtatccttggagcagtcctagagagaagaaactttattaacaatgagcatgttaacttgcttgctaccatctctggagcaataataggtattatttctgtaatgtaa

SEQ ID NO: 460 - DNA, 579 bp, Methanobrevibacter ruminantium
  source 1..579: mol_type = genomic DNA
atggcaaagaaacaaagacgtagagtacgtgacacttggaaagaaaaatcttggtacaccatcaaaactcctatagcattcggagaaaaggaaatcggtaccacccctgcaagagacccagaacttgtatacggaagaactgtagaagtaaccatgagagaattaaccggagacttctccaaacaatacatcaaattacaatttgaagttgacaacgttgcaggagacattgcaagcaccaaatttaccggacacaagaccactaccgattatgtaagaagcatgatcagaagaggaaccagtagaatcgacgctccggttattgtaaccacccaagatgaacgtaaattaaaactccatgtattagctgtaaccaccagaagagctaaatcttcccaacaaaaatacatgagagaaaccattaccgaattagttagcaatgttgctagcgaaaaaacctttgatgaacttgtagaaatctctgtaaacggtagattagcttctgaagtttaccacaaagctaaaaaaatctatcctttaaagagagtagaaatcatcaaaagcaaagtattagattaa

SEQ ID NO: 461 - DNA, 804 bp, Methanobrevibacter ruminantium
  source 1..804: mol_type = genomic DNA
atgtgtgagatatttggattctcatcctctagggaagaggaattaaatgattatttaaagacatttttcagtcattgtgaagagcaccctcacggttggggattggctattttagattcagataaatatcaaataagaaaagaaccggtaaaggcccgaagtagtgtaatgttaggaaatattttattaaatccaatagtctgtaaaaatatgcttgcacatataagattggctacgataggcaatttggatttctataactgccatccttttgtaaagaaagacaattcagataggagatggactcttattcataatggaactatctttgactgccaggatctttgtagatacagtacagaagaggaaggggagacagattccgaaaggatattgctttatattgtagatacaatcaataattatgaatctgtaaagggagagcctttaagcttaaaggaacgttttgatatagtttccagcttgattaaaggaatgtcctgcaccaataagttaaatcttatggtttcagatggtgagcagatctatgttcacactaatctaaaggattcccttcattatctaaagaaggaccattccattttcgtttcaacacagccattggatgatgatgactggaaggaggttccattaaataagacattttcaatcattaacggtgacgtattgtttgaaagcgattcacattcaaatgaatatttcgaaacagaggaacagcttagattcattgaaaagttcttagagtcattaaagacagattcagatgaggagtacgcttggtaa

SEQ ID NO: 462 - DNA, 726 bp, Methanobrevibacter ruminantium
  source 1..726: mol_type = genomic DNA
atgtgtaaagatggtattagcgatgaggcattaagagaaaaattgtatcaagcatttttagagcctaccaaaaaggataaaaaggaatacataggcattgaaatagagatgccaataatcaatcttaacaaggaagcggtagactttaaagttgttcataaggtcactagggatttcagtgaggaatttgataactttgaacttgaaggaatagattatgatggaaacatctatgcattgagagataaggctagtgatgatataatttgctatggctgctcctataacaatatagaatttgcaatgggaaaggaagagaatcttttttctgtaaatgagcgtttccttaaatattattcatattttaaagataagtttgaagagcatggacatacattgactggaatgggaatcaatccatatagaaagtacaataatgaggttccgattccaaatgaaaggtatcttatgctttttcatcatctaaagtcttcctctgactatgtaggaatggagtttcaccaatatcctgcttatggcatgttttcaagcgcatctcaggtgcaattggatgttccttatgatgaattggtggacaatattaatgtcttttcaaaattagagccgattaaagcactgcttttttcaaattccgttttttggaagagaatgaagactatctttgctttagagatatcttatgggaattcagtacccatggcgtaa

SEQ ID NO: 463 - DNA, 654 bp, Methanobrevibacter ruminantium
  source 1..654: mol_type = genomic DNA
atgtataatcaggaatttgaggacattgatgagctgctttcctatttggagtccttaaatatctattgtgttatgagagatgggttatatattaattttccttcaatggggcttaaggaattcttcagcaaggacaagataacaggagaatactattgtaagggagaatataagaaaagggaatttgaaccctctttggatgatattcaatatttaagagcttttaagtttatcaatctcacctttaggggaacaattgaatataggagcgtttgtactcagccaattaaggattccatgtctgttgcagcattccatgtaggtttaaagcataaaaccgatgaattgaatgaattattcttaaaatcaggcatttataagaatgactgcgatgcaaatgagcttagaaaactattgattagaagggaaattccagatttcgttgatatggaaaagatttatggattggctttgaaggttcttgacttggcaaaagaaggattgcttgaaagagatttgggagaagaagttttcttagactctttgtatgataatttgaataataggaccaatcctggaaaaagacttttagattcattagatggtggaaaaagcttggaagagattattaaagagtatggtgaagttgaatag

SEQ ID NO: 464 - DNA, 1425 bp, Methanobrevibacter ruminantium
  source 1..1425: mol_type = genomic DNA
atggataaaatatttaatctgtcgcagattaaaaataatttgagctcagagcagctaaaagaaggatcatttgggattgaatgggaatgcttaagggtcaaggaaaatggagagctctcattaagtccgcatcctgagatttttggagataagttgacaaatccatatataacaactgatttttcagagagtcaaatagagataatcactccagcctttgatacaatagatgaggctttttcattcttttcattcatgtctgatctggtaaacagttccctatcagatgatgagtatctttggtttcagtcattgccttgcatacttccagagtctgataaaatccctatagccaaatataaaggcagaggattaggggaagaatctatggagtatagaaagggtttggctaaaaagtatggccttaaaaaacagctcatttcagggattcactttaatttttcatttaaggaagagctaatagaaagcttctatgatggtgtcattggagataaggagaagatttcatataaggaatttaaggatagtctttatttaaagatttcacgtaattatattcgttatgtatggcttattatttatcttactggctgttctgttgctgttcataatagctttactttagattgtcagaaattgatgaatcataaggacaatcagggaagcgtctatagtgatagggggccttcatttagaaattcctcctgcggatataagaatttagagcatttgtatccaagttatgcctctgttgaagagtttacaagagatattcaatcatttattgataatggacatttatctgaggcaaaggaattatacactcaaatcagattgaagccaagaaacccttcagaccttttgggttccttgaataataacggcatacagtatttggagataaggacattggacattaatccattctataaatgtggccttattaagaatgatatgaatttccttcatatgtttatgatctatcttctaattaaggaagagtctgattatgaaagctggcaggaagatgctctttataatgaggaaaagactgctgaatgtggatatgaagatggagttaagcttattaaggatggcaaagaggtagttttaaaggattgggccttatctatcttggatgaaatggagatgatggttgaatcattgaatcttgaaaataagtctgttatagagttgatgaagttaaagataatcaattcagacttgacatatggtaggcgtcttgctcggttggtggaaaaggatggatatattgaaagccaattgaagctctctagaaataataagttaagaagtaagtatctggttgaagagaccaatttgctaaatgatgaaaggtttaaagaatatgtgcctattgctcttcaaggattgagcaaatag

SEQ ID NO: 465 - DNA, 339 bp, Methanobrevibacter ruminantium
  source 1..339: mol_type = genomic DNA
atgagaatagcagttgccacatcaaacggagaggatgtaaatttacactttggaaaagccagttcattatatatctacgaatacgatgaagagaatgatgaaacaagctttatagaacatagaactgtagaaatagaaaaggacagcaaacaccaaaacccaaagatcattaaggcactagcggactgtgaagtagcaatctgtgaagaattcggatttaaggcatctatctttgcagaggatgctggattaaaacttgtaaaggatgaaggaaccgtagaagaagttttaaagaaatacacagatcatgtgaagttcctaaagaatgttaaaatataa

SEQ ID NO: 466 - DNA, 1572 bp, Methanobrevibacter ruminantium
  source 1..1572: mol_type = genomic DNA
atgaaaatgataaagcaaacattaggcttaaatgtagaagataaaaaatactacctgaagctaattatagaggctgtattaatcggtttattctcaggattcattgtatccctgtatcgacttggattagaccactcagaaagcatattatcctacatcctaaagtatatccaaggagacttgaccctaatagttctatggtttgtcatacttgcaatcatgggacttatcaccgcccttctgatgaagtgggacccagacagcctaggaagcggaattcctcaggtcatgggagaggtgaaaggatactttgatgtgacatggtggaaaactctaatagcaaagttcattggaggaacccttacagcccttggaggactttcccttggaagggaagggccatctgtccaattaggagccatggctgcaaaaggagtatcaaaatacctcccaaacagcaagactgatgaaaagcgtcttttagtatgcggaagcggagcagggcttgctgcaacattcagcgcacctcttgcaggattcatattcacattagaggaaatcaacaagggatttgacagatcaatcgtccttgtaggtcttgtttcagcagttgtagcggttttagtatccaatgtattcttcgggcaaagcccaatctttccatttacatccttaaatcttccattggaatatttctggctattaatcgtcctaggaatagcaattggaatattaggatacatctacaatgtaggaatgatcaaggcagctgaaatgtgggataaattaagtttcctccctcttgagataaaattcatcatagttttccttgtaactggaattgtaggactcttcttgcctgaagtgcttggaggaggatactctatgatgcaccttatagagctaagcttgcctccattatctgtcctaattgtccttttgattggaaaataccttcttttaatattctgtttcggctcaagcgcccctggaggaatattctaccctgttcttgtaatcggagcatatatcggagcaatattcagtgccatcgtaattccaatatttggactgaacccattaatcgcatataagttcattatgatttcaatggctgcaatgtttgcaagctcagttaggactccaataactgcagttgtccttattgccgaaatgactggagttacaaattccattgttgcaatgatagttgtagtaatccttgcatatatcattccaaccattctagacaatgatccgatttatgagaccttgcttatgagactcctaaaaaagaataagggaatcgactttgataagacaaaaagcgtattggaagagtatgtggttccaatggactgtgcattgataggaactaaaatctgggagcttcctattccaaagtcagcaatggtggtttcagttgtaagaagcggaaacactctcatcccagatgagaatctagagttaaagtatgcagatgagttatttatcattatgaatcaaaacacttacccagaagacaataataagatagaatcattgatttacaacaattggaaagaagaatag

SEQ ID NO: 467 - DNA, 1308 bp, Methanobrevibacter ruminantium
  source 1..1308: mol_type = genomic DNA
atgaaaataggcattataggaggaactagaggtttaggaagaaccttagcctggtatttaaaggattttgactttgatgttacagttacaggaagagattccatagttggagctcaagtaagcgaagagattggagtgaaatactcaaacaacaacaagaagatagttcaagacagcgatatagtaatcatatccgtccctatctccagcaccgaatcagtgatagaggaactggcaccattcatgaaagacgggtcagtgatgcttgatgtcacctccgtcaaggaagggccaagcaaaaagatgaaagaatgcttgagcgaaggagtggaattcatcccaacccaccctgtcttcggtccgagaacaaccgacctgaagggacagatcattgtcctcaccccaattaaaaagggaaaatggtatcctagaatctataagttcctagaggataagggaatgagaataatagaaaccactgcagagcatcacgatgacatgatgggaatcgttcaggtcttaactcacttctcctacatctcaacagcttcagcaatcgaaaggctgcaggtagacctcaaggacacccaaaactatgaaagtccgatctataatctcatgatcgatacaattgcaaggatcgtatcccaaaacccatatcttacctattccatacagcatgaaaacaaaaagggagagaaaataagacaagccctatttgattcaatgagtgaattaaaggatgccttaagcaaagaggacgaagaggaatttgttgaaattgcacttaaggcaaccaaacatatgggagacattcaaggagctttaggtaggagtgacaaggcgataaatgccctcacccaagaatataacatattgctccaatccattggagaggaagtggggcttaagcatatctattccgatacaatccatgtaggaaaaatcaaaaaaatcgatttggatttcctatatcttgaagatgaaaacgggaaagtcaaaaagcttaagatgtctaatgtagcgattttaagtgaaaaggaactctttgaatggaaaataaacaatcaaaagacctattcaagagacataagcgctatgtttacaaaaaattcaaatccccatatcattaaagacaccttaaagctgatggaagacataattgacgtggaaataattgatatttatgatggagagcctgtaaaggaagaccaaatcagctatacctttaagatagaagctctcagtatggaagcaattaaaaactgcagagacatcttaataggatttggcggaatcagcagataa

SEQ ID NO: 468 - DNA, 1062 bp, Methanobrevibacter ruminantium
  source 1..1062: mol_type = genomic DNA
atgaaagtgacttctgaagatgagagcaaaggaactgttgagctttttcctgaaactttagatgacttatggcatttgtcccatattgtagctgaaggggacatagtctactctaagactacccgtaggattcaagatacaagcggagatttaattaggggagaccgaggggttaaaaagacattcaccttaggaatttctgttaagaatgtcagttttcatcttttcacaggcaaattaagaataatcggatcaattgtaagcggtcctgaagagtttgttcctttaggatctcaccacaccatcgaagccaagcttcacactcccatcacaatcaaaaaggaaagatggtccagctatgccttaaaacgtattgaacgagctattgaagcatctaaaaaattatctgcaatcattgtggttattgaggatgatgttgccgattttggccttatgagacagtttggaatcgaatattatggtcctatcatgggaaatgtctctggaaagaggataattgataagaataggaagaaaaacatcgaaaagttctatgaaaagattgtagactacattaataagtttgataatattcaaaccattgtccttgcaggtcctggattctttaagaatgacttctttaagtatttggagttaaagcataaggatttggctaaaaacacaatcatagaatctacaggttcaggtggccgtgtaggaatcaatgaggtattaaagaagggcaccgttgaaaagcttgctaccgaaaatagggtcgcttatgaaatatctgctgtagatgctattttaaaggagatagctatgaattctccattggttgtttatggaaagaagcaagtccatgaagccatcaatatgggagcaattgagaagctacttgttttggataatttggttagaagtgaaaacatggaagattctatggatatggttgaaaacatgtctggtgaggttttggtaatcagcagtcagcatgaggggggtaaacagcttgaagcccttggtggaatggcagctaacttgagatatgccatttcttaa

SEQ ID NO: 469 - DNA, 957 bp, Methanobrevibacter ruminantium
  source 1..957: mol_type = genomic DNA
atgtttttcgaattattaattgtattcttattatgtttttttggaaccgggatcgtaagtatagtgttccgtttcttgggaaaacgaggatatatgggtaatctatatgaaacagtccgaggagggactcctagagctgttgggatagttccttttattcttatcagtctctttatgccaagcggatttaataatcttgttttggtgatgggtctatgtgccttaatagatgatataatcggcagaaaaacaattgctaatttgccgattgagattggtcagcttgcaagaggaataggcatgctttgtgtaataggattaggatatcctattatgggagtctcatctattttggttgtccttttaatccagccaatgaatattgcagatatgcaaccgggaactgctgcagctacaaccattataatgagtttcttcactcttttagctgttgtgattatgcaagtaggtcctgtcttagagatacatccatattactatccattgcttgttttagttacatgtctagcttattgtcctttggatttcgctggaaagatcatgatgggtgaggtaggtaaccatacctttgcaatatctttaggaatctgtttttatgctctaggcggatttataggaactttaatattattcattgtaaccactggattgattgcatatttaagaagatataatctctctagattccttataaataaattgcatattccaaatcctacttttggagatttatttatggatgtcttaactggaggaggtttaggtgacttatttagaaagattctcttgaaatcaaaccagtatgatgttgataatgagatattgattgcccttggatttagacggttattgtataatccttattctcctaaccttgaaaaagtggttcaaaaagatagtagaacaaaacgtgcagatttaagaaggttttattag

SEQ ID NO: 470 - DNA, 546 bp, Methanobrevibacter ruminantium
  source 1..546: mol_type = genomic DNA
atggctgatgtttttgatgtaattaagaatagaagaggcgtaagagcttataaagatgagcaaattgatgatgaggatattgagaagatattgcaggcagctatcatggctcctactgcaaggggagaggctccatggcattttactgtagttcaaaataaggagcttcttgatgagatcaatgattctgtacacagcatattaactaattctggtgatgagcttcttgaagcaatcgctgcatctggcagaaatgtaatgcacaatgctccaactgttgtttttgtttctgctaaatcagatgctactaatatgcaagcagactgttctgcagctattgaaaatatgcttcttgcagctgaaggattagacattgggtcctgctggttaggtcttgtcgctttattcttcagcgttgaggaaaacttgaaaaagcttcacattcctgaaggttatactccattatacggtgtttccttaggatataaggttgaagaaaacgaaccaaacccacgcagtgatgttttggttaattggttaaaataa

SEQ ID NO: 471 - DNA, 1374 bp, Methanobrevibacter ruminantium
  source 1..1374: mol_type = genomic DNA
atgaaagaaactaaaaaaataaaaaacattgtcattggagcaggccctgcaggaagacttgcttcatttgaacttggaaaattaggtgaggaaaccttactaattgaaaagaaatacattgcagggacttgccttaatgaaggatgcatggttgtctgtgcattgactgacatcagccgcttttggaagaattgccaaagattttccgaaatgggattggtcaatggacttttagagttgaactacaattccatatgtgaaaacattaaaaagacccaaaaattccttcgtaaacttaaccaagaagaaaatgaaagcgtgagcaataaagttctctatggagaagctagtgtagaagtggatgaagatgagaaaatcatcgttaccgtcaaattggacaatgacaacgagcttcaaaaagaggagtacaagggaaaagaaactttgagctttgaagcagaaaatttactcatagccactggagcaaggccattcattccaaatatccctggagcagaatatgccctaacaagcagtgatgtaattaatctagatgaagttcctcctaaattaaacatagttggaggaggaataattgcaactgagctttctaacatcttttcaagctttggaagcgaggtaaaaatcattgcaagaagcgaaattctaaaagacctagagcctgaaatcaaaagttatgtagtcaaaaagattatcaatgatgttgaaatccacgaaaacaccaatgtcctaaagattaacgaagactcaatcgaaacagataatggagaatttgaaggcaaaacattaatagccaccggaagagtccctaattctgaaatactaaaaggacttgtggatttgaatgaagacggttcaatcaaggtcaacgaattcttccaaacatcaaaaccccatatctatgcagcaggagatgtcaccggaggaataaccttaaccccatatgctagaaaagagggaatttcagcagcaagaaatatggctggatacttgaataaatttgaagagatgattgttccccaatctttaactctagatttggatgtgagcttcactcaaaagacagataaagaagcagacccagataagattgaagatgtaatcatcccaggccttggaggacctcatgcattttggagaattctaagaggagaaacaggccttacaaagatttcattaaataccgaaaccgatgaaattgtaagagcaagccagatatccccatcttcaattgatgatacagcttatcttgcattcctaatgaatttgggaattaaaaaagaagcatttgatgactttttagaagttcatccatctactgatgcttattataaaattttaaagattatgtaa

SEQ ID NO: 472 - DNA, 267 bp, Methanobrevibacter ruminantium
  source 1..267: mol_type = genomic DNA
atgtgtattgctgcaccagctaaaattgtagaaatcgatacagaatctaacatttgtgctgctgattttggaggagtcagacaaaatgcaaaattggatcttcttccagatgctgaaattggcgattatgttttaattcatgcaggatatgctatagaaaaactatccgaagaagccgctaaggaatctttagagtcttggaatgaattaatggaaatgttagatgaagaagacagagaacgtgaattacaaatgaatggcttataa

SEQ ID NO: 473 - DNA, 495 bp, Methanobrevibacter ruminantium
  source 1..495: mol_type = genomic DNA
atgtgtgaggaaattaagttattgaaggatttgggatgtccagaatgggttatagaacattctaaaggtgtttcaagaaaagcagttcaaatagcgagcaattttgatgatgttgatattgagcttgtaagagttggaggtcttttgcatgatatcggaagatctaaaaccaattcaattgagcatgcagtcattggagcaaaaatagtttctgatttgggctattctcaagagatagtcaatattgttgaaaggcatattggaactgggctaactgaagaggatgctaaggaattgggacttcctataaaggattacactcctcagactcttgaagagaagatagtttctcatgcagataatctttttaatggtgcagatgaggttgatgttgattttaccatcaataaatggaaaagaaagttaggtgaaaatcatccatcaattgagaaaataaaagagattcatgaagagttggttggtcgttttgagtaa

SEQ ID NO: 474 - DNA, 909 bp, Methanobrevibacter ruminantium
  source 1..909: mol_type = genomic DNA
atgaaagttatttgtacagttgacgagtccttatacaggccagaagtagttcgttggagagaaagaatggctatgatggagccattaggtgaagtggttgtagcgcttccttgcagtatgaaaaagccatattccaattcacagtctcatcagaaatttaaaagagctaccaaaggctatcaggaagttatagttacctctccatttggtatttgtcctcgtgaaatggaaaacactttcccaattcagtcttatgatgtgacagtctctggagattggagctttgatgaggtgagaatctctggtgagttgttacgtgattatgtaggagataagcctgtcattgccaatgttcatggaggctatgaagaggtttgccgtgaataccttgacaattgtgtttatgtctgtcaggatggacgtcctacctctcctgattcaatctatcatttaagggaagagcttaaaaagtattctaaggtcaaacatagggataaggttttaaatgaacttagatccattgcaaaatatcagtttggtcctgaagcatataagataattagcgatgatgttgttgctaagggaaggtatcataggactatctatagcgagggaaagcaattggctcttttaaatagggatattggattgtatactctcaatttggaaggtggaagaagacttgcagagcttgacattcatgttgttgagattgattttgacttaaagactaattctgtatttgcgccaggaatttccaatgctgatttgagcatcgttccaaaggacgaggttgttgttgtaagggacggtgaagtggtaggtgttggaaaggctgtcttaactggaaaagagatgattgagtctactagtggaatcggtgtaaagataaggcataggaaaaaataa

SEQ ID NO: 475 - DNA, 288 bp, Methanobrevibacter ruminantium
  source 1..288: mol_type = genomic DNA
atgtctgaagaattagcacttgctgttaaagatgcagtttctgtagtaaacgaccctcacatgggtgtaagtattgtagatatgggtattgtacaatctattgcaattgaaggttcaactgctgaattggtaatcaaacctaccaatcctggttgtatgagtgttactcgtattgcagctcaagctaaagctgaagctttaaaagttgaaggtatcgataaggtaaaaattattattgaaggtcatgtaatggctgattctcttaatgagatgctcaatagagattaa

SEQ ID NO: 476 - DNA, 504 bp, Methanobrevibacter ruminantium
  source 1..504: mol_type = genomic DNA
atgtgggaaagtttaaattcaaaatttagcaaatatcctgcaagaatgactgtggctcaaaagatgtttgagctaggtttaagaatcggtgaagacaataagatttattgcggaaatcttaagatcagtgattctgctttagctgcagctgcaaatgtggatcgtagagttattaaatctacagttaatgtaattgttcaagatgaagatttatttgaggtcttttcaaacattgtccctgcaggaacattgcttaaaaacattgcaaaaaatttaggattaggtgtagttgaaatagaagctggagaagaaagcgaaggtattttggctgctgtagctacaacaatgagcgaacatgatatagacattcgtcaagcttatgctggagacactaaatttgaaggaaatcctgttttgactattattactgaaaatccaattccaggtgaacttttaaatgaatttattaagataaatggagttttaaaggtttcagttttataa

SEQ ID NO: 477 - DNA, 1074 bp, Methanobrevibacter ruminantium
  source 1..1074: mol_type = genomic DNA
atgctaagcgatcctattattcaaaagaattttccgggaacatttgaattcgaagaggccatggttattattgattgtctaaaggaatggcctaaaagcagattatgtgatgataaagctattgcaaggaaagccgctaagacaattgacatagacattaagacagttagggatgttcttgctttacttgaagtaaataactgtgcttataatataaagattaatgagctatgcattaaattaattaagcattatcgttctggaaaacttactcataagaagattgctaaaaaacttaagatagatgataatattgttgatcagttcattgaagaaaatgaatctcttttagaagaaactaaaaagacttattctcaagaaactttaatggctttaaatgatagtttcaatgactttattaaaggaaggaaacctcttaaaataaataaggatgaagaggaagataatccagatgaagattctaaagatgaaaaggctacagatgaagagttcaaatctggagaagtagaaattaaagaggaagttgaagaaaccaaagaagaagaggaagtagaggaagaaaaacctgctaaaaagagaactgttaatcaaaagttctggtatcttacctttgatgaagtaatcgattgccttaagaacggatatgctacagatgaagaaatatctgaaaaaatcggttgcaagttaaatatcgtaagaaaaatcctttacagcttatatgacatgcatttagcaagctataagagggataaggataaggaaacccaatggtatacttacgattggaaattcaatgaaagcgaatataaaaaattagaattgaatattgcaagtgccgaacttaagaagctaaatgaagatttagaatatgaagcgaacaatatgttcttcatttgtcctgtgggacactaccgtcttgactttgaggacgcttccactgtcgaatttatttgtcctgaatgtggggcagaattagaatttgatgacaattctgaagttgttgaagctttgaaggaccagattgcatatattgaagaaatgatttctgaatag

SEQ ID NO: 478 - DNA, 903 bp, Methanobrevibacter ruminantium
  source 1..903: mol_type = genomic DNA
atgacagacaatccaaactataaagaagcagaaactgagcaaggacaagtttacaaatatgttgagattagaggatatcaagttatccctattgaaacacattatataaagcctaatgaaagcatagactttatgattgatgacatctcaaaattatgcaagtccggcgactatttagtaatagccgaaactccaatatcagtctctcaaggaagattggttgatgaagcagactatactccatcccttaaggcaaaattcctagccacatattggagcaaatacttttggggatatgtccttggacctattctaggaataaaggagagaacaattaaaaaccttagaaaacttccagaagagtctaaaagacataaggaagttgttctccaattatatggttggaaacatgcattaaagccagcttcagaagcgggaattgacttaagcaatgctccgggaacttgcgtatcccttcttcccgaaaatccagaaaaggttgcaaaggaaatcagcgaaagccttatggaaaaaacaaatcaagatgtcaccacattaattattgacacagatgcaacctatagaagaaagaacaaatactttacaggacttcctattgcaatagatggaattgaagcagataagggagtttttggatacgcgttaggacaattgtctgaaaatatgggatccaccccacttggatgctcaagggaaatctctgttgaagagggaataaaaatagccaatattgctgaagactatcagaaatcattatctacagcaatggagacaatctatagcgcaaaggacgttttaaattcagacactcctgaagttactgtagaatccttggattcaattattcatacacctgctgttttagttagaaaaatagaataa

SEQ ID NO: 479 - DNA, 570 bp, Methanobrevibacter ruminantium
  source 1..570: mol_type = genomic DNA
atggaaaaatcaataacttattttgaaaatcccggtgctgagaatactgatgcagttatcgaacttgttcgtgaaagattagaaggttctaacatcaaatatgttgctgttgcatcttctacaggtgcaagtgccttaaagttaaatgaagctttaaaggatcttgatgtgacaatagtaaattgctcccatcatgttggattcagggaacctaataaggcacaaataagtgctgaaactaagactgaacttgaagagaagggaatagtcacattcattggttcacatgccttaagcggtgttggcaaaagcatttccaagaagtttggtggagtcactccagttgagatcattgctgcagtctatagaactttctctcaaggaataaaggtatgtgctgaaatttctatcatgcttgcagatgccggattggttcctgtaggtgaagagataatcgctattggtggaacaggctctggtttggacactgctgctgtattgactcctgcaaacatgacaaatgtctttgatatgaagtttcatgagattatagcaatgccaagaccttaa

SEQ ID NO: 480 - DNA, 1170 bp, Methanobrevibacter ruminantium
  source 1..1170: mol_type = genomic DNA
gtgaaatttatagatgatgcaatcaaagaatctgaggaaagtattgaaaaaactgcttctcctaaaaaatcagatgatgaattagataaagaattactcgacattatcagtcgcagtcgagctaaaattattgtagtcggtgctggtggagccggaaataacactatttcaagattgactgaaataggtattgaaggcgctgaaacaattactgtaaacaccgatgcacaagacttgttctacagtcaagctgataaaaaattacttttaggaagacaaacctgtggcggtctcggtgctggtggagaacctgccatcggtgaggaatctgctgaagaaagtgaagaagacattagagcagaattggaaggggctgacatggtatttgttacctgcggtctcggtggaggaaccggtactggatctgctcctgtaattgctaaagtggctaagaaagctggagctttaactgtagctgttgctaccatgccattctctgctgaaggtgtaaaaagaagagaaaatgcagaaatcggtttagaaaaactccaagaaaatgcagatactgtaattgtcattcctaatgataaattattagaagttgctccaaaccttcctttaaacaaagcatttatggcttccgatgaaatcttaggaagagctgttaaaggaattaccgaactcattaccaaaccaggactcatcagtctggactttgctgatatcagttccatcatgaaaggctctggtatggctatgataggtatgggagaatctgaatccggtgacagagcaatcgaatctgtacatgaagctttaagcagtcctttattagacattgacatttccaatgctaaaggagctcttattaacatttcaggaagctctgacttgaccttgcaagaagctgaaaaaatcgttcagattgttgctgacagattagatcctgaagctaatattatttggggagctcaaatcgatgaagaattgcagaacatgatacgcacaaccattgttgtatctggagtaaaatcacaatataattcctcttcaagcggaagtgatgatggagaatttactgatattgatgattttactgatgctgacattcttggtgaagacacagctccaaatgatccattagatgaattcctagacggaatcttctag

SEQ ID NO: 481 - DNA, 180 bp, Methanobrevibacter ruminantium
  source 1..180: mol_type = genomic DNA
atgaattatcaagaagaattaagtgatttttggaaacaatgtaaaagagttttaaaagtagctaaaaaaccagaccgtgaagaattttttgatttttctaaagttacagctattggtatagctattattggtgtaattggttttgtaattgttctattcggccaattattaggattataa

SEQ ID NO: 482 - DNA, 492 bp, Methanobrevibacter ruminantium
  source 1..492: mol_type = genomic DNA
atggaagatgataaaaattccatatttgctcttaaaacatcagcaggtcaagaaagaactgtagctagattgttaggtatgaaagcggataagcctggtgtagatattaaggcaatagttgtgcctgaatctttaaaaggttatatcattgtagaatctgctacaaaccttgatatgaagaaccctgatatgaaagttcgtcatttaagaggtattgtaggggcaaaaagagatggaaccattgatccatccagtcagataaccttggaagaagtcaaaaaattcttaaagccacaacctattatctcatctatacaaaaaggaagtattgtggaacttgtttccggtcctttcaaaggagaaaaatcaaaagttgtccgtttagatgaatctcgtgaagaagttgttctcgagttaattgaagcggcggttccgattcctgttactgttaaagctgatcaaattagaattattaaaaaggaggctgactaa

SEQ ID NO: 483 - DNA, 483 bp, Methanobrevibacter ruminantium
  source 1..483: mol_type = genomic DNA
atggctaaagatacagttgaagttcttctcgaaggtggaacagccactcctggaccaccattaggacctgcaattggacctttcggggtaaatatgatgcaggtagtagaagaaattaatgaaaaaagtgctgatttcgcaggtatgaaagtacctgtcataattactatcgacagtaatacaaaagaatttgaaatcgagattggtactcctccaacaactgcccttattatggatgaacttggcattgaaaagggcgctcatgaacctggtgctgaagttgcagcagatttatctgtagaacaagctttaaaaatcgcaagaatgaaattcgattccttactttcaaacgattacaaaagcgcaaccaaagagatcatgggtacctgtgttagtatgggaattaccgtagacggtaaagatcctagagatgctcaaaaagcagttgacgctggagaatacgacgatatcttagtagaatag

SEQ ID NO: 484 - DNA, 639 bp, Methanobrevibacter ruminantium
  source 1..639: mol_type = genomic DNA
atgacacaagagattattgatgcggtgaaggaggcaaaagaacaagctaagccgagaaacttcactcaatccattgatgttatcattaacattaaggatttagatgtcagaaaaccagaaaacagatttagcgaagaagtagctcttcctcacggacgtggaaaaccggtcaagatcggtgttatcgctgacggggaattagctcttggagctaaaaatgctggtgtcgatgttgtgatttccaaagaagatttacaagaatttggtaaagacattaaggcagctaaaaaagtagtaaactctgttgattcatttatagctcaagctgacatgatgccacttgtaggtagattcttaggtcgtatcttaggacctcgtaacaaaatgcctaagccagtgccagctagcgctaaaatcgagccattactcgaaagacaacaagctactattaaagttggcgtaaaacaacaaccatctattcaaatcttagttggaactcaagacatggatgacgagaagttggctgaaaatattgaagctgttcttgcagttttagaccgcaatttagaaaaaggaagaaaccaaataaaatccatgtatattaaagcgactatgggttcagtagtgagggtgatttaa

SEQ ID NO: 485 - DNA, 1008 bp, Methanobrevibacter ruminantium
  source 1..1008: mol_type = genomic DNA
atggctcacgttgctgaatggaaaaaagaagaagttaatgaacttaagggcattattgattctgctgaagtagtaggtattgttaacttattaaacattcctgctagacaattacaggaaatgagaaaaaccctttccggtaaggctaccatcagattatcaaaaattaaccttatgaaattagctttagaagattgtgtaaatgagaaagctaacattactgagctttcagattatatggaaggtcaacctgcacttgtatgtaccgacatgaatcctttcagattgtacaaaatattagaagacagtaaaacatctgctcctgcaaaagcaggcgctattgctcctgaagatattgttgtacctgctggagatactggtttcccaccaggtccgttcctcggtgacttacaacaaataggtgtacctgcaaaaatcgacaaaggaaaaattgtagttcaaaaagacactacagttgtagaagctggagaacctgtccctaaagctgtcgctgctgctttaactaggatggatatcaaacctatggaagtaggtatggatcttaaggctgtatacgaagatggttccatctttaaggcagacgtattggctatcgacgaggaagaaacctttgcagatattcaaaatgcatttactagagcattcaacttatctgtattcagtgctttcccaaccagtgaaacaatatccacaatcattagtactgcacataccaaagcttacaatgttgctattgaagcagctattcctactggtaagacttctgatatgttaattgcacttgcaaacgctaagatgttagcattagctggtgaattagcttccgatgcaatcgacgatgaaatcgctaataagttagcaaacgttgcagttgctgcagcacctgtcgttgaagaagcagaagaagaagttgaggaagaagaagaggaagaagaagacaaaagcgaagaaactgcagcacttggtttaggtgctttgttcggttag

SEQ ID NO: 486 - DNA, 312 bp, Methanobrevibacter ruminantium
  source 1..312: mol_type = genomic DNA
atggaatatatatatgcggcaatgattttgcacaccacagaacaagatattaatgaagaaaatgtaactaaaatcttagaagcagctggcgctaacgtagatgattctagagtaaaagctttaatcgcagcattagaagatgttgatattgaagaagctatggaaactactgctatggcagcagctcctgcagcagcagctcctgtagctgaagcagcagtagaagaagaggaagaagaagaggaagaagaagaagacgaagaacaagcagctgcagcagcaaccgctggtttaggtgctttattcggatag

SEQ ID NO: 487 - DNA, 726 bp, Methanobrevibacter ruminantium
  source 1..726: mol_type = genomic DNA
atgatatgtcctgagtgtggtgcggaaaatcaagactctgcaaagttttgcaagcaatgtggaacttctttaaatcctgttgccacaatgaaaaaaactaattctgatgaatcaagacctatcaagtcaggtatatttaatgaaaataattcttcaccttcctcctttgaagccaaaggatcaggtggagacaataaaaatctaattataatttgcttaactgtaattatttgtgctgttttgatagcaggaggcttaatattcctatcaaatggttcaaataatggaaatgactctagtgatgttggaaattccataagtcttccagacaattctgttaatcaaacagatgatagtcaaaatcaaactgacaccgaacctgctcctaaaaagtctagcgtttcagatatgaagatactgagcggaagcttcacaaccggaagctctctaagcgataagacttggtgttccgtttatgttggagaaaagtatgctggcgaggatgttaaaataagcgttttatacagccgtgatggctctgacttgaatcaaggaaagattgtgccaaaaaatgttggttcagatggtactgtaagcgttccaagtgcagatgcatttaagtattatccagatcatgctttagtaaccatttatgatagcaatggtaatgttttagacactcaagaggttatcatgagtgctaaaagtggtactcagacattttaa

SEQ ID NO: 488 - DNA, 606 bp, Methanobrevibacter ruminantium
  source 1..606: mol_type = genomic DNA
atggaaactaaaaatcttataatcatttgtgcaactgtaatattggctgttgtaatagttttatctgcttttatttatgtcaacatgggcaatgaaactcatataagttctaatattgcagatactttacaaaatggcgatgaaatcgttgtcaagcttgtggataaggataataagcctttggtaaataagaccattagcttaaactttaaagatgaaaatggcaagggcaatgccgttagctatgatcttcttactaatgacaaaggtgaagtatattataatgtcaatttgactgaaggaaaatatgtattttccgcagattatgctggagaaacatttattggctcatcaagtttaaataagtctgttgaagttaaaaaagatgttaaaactgcaaatctcagttctacagatacgactaaaaccgctaaaaccaagacctatacagattggcaggaagactatgagactggacgttatgacgaagacggaaatcctatctataggtctataatgtctacctccggaggccaatatgagcctggaatctatgaatgctattggtctgcaaatggtccaatcagtgaaagaagaattggttaa

SEQ ID NO: 489 - DNA, 348 bp, Methanobrevibacter ruminantium
  source 1..348: mol_type = genomic DNA
atgaaatgtccggtttgtggctgtgagaatccagatggctataaattttgtcatgattgtgggaatcctttgataatgcctgattatgatgaaatgaataatgattacccctcctttgatagcaaaaagcttatcataataggttatataatcgctatcctattcggttggggaacttttatattaagtgccatatttggatcctatggatttatcggtttcatcgggctctttttcccaggattcatgttaaatagcaaggattccaatatccgaaagcacgcctatatccaattggcaattatgattgtaggtatacttgcgacctttttagtcttatttagataa

SEQ ID NO: 490 - DNA, 726 bp, Methanobrevibacter ruminantium
  source 1..726: mol_type = genomic DNA
atgaataagaaacttaaaataatcctttatattttattggctttaataatcattattgcaggaattagcctttggtatttgatggattattctcctgcaagtgcagatgctaattctcttattaatggaacatcagaggtttcagtaagtaaaataaacaatggattgttcttagatggtcctggaaatgatagcgctgtcatattttatcctggtgcaaagatagaatacactgcatatctgcctttattaatcaatctgtctgcagatggtgtagattgctttttagttgaaatgccttttaatttagcattctttggaacaaacagtgcagatgaaataattaataatgcttcctataattattctaattggtatattggaggacattccttaggaggagtcatggcttcccgctatgcccataatcattttgataaaatcaaaggagtgatactccttgcagcttatcctgcagatagtttagagaatggttctgtgctttccatttatggatccaatgataagtccttaaataaggaatcttatgatgatgcaaagaaatatatgccaagcaatttcactgaatatgtgataaaaggtggaaatcatgcccagtttgcttcttatggcaatcaaactggagatggagtagccactatttccgcataccagcaagaaaatgaaaccattaaagatattcttttatacatcaatggttcttaa

SEQ ID NO: 491 - DNA, 2733 bp, Methanobrevibacter ruminantium
  source 1..2733: mol_type = genomic DNA
atgcttaaaatatttgaagatttaggatataagaaacaaatatgtaagacttgtggtcaagagttctattcacaagtggacagagacacatgcggagacgctccatgtgacgaatatggatttatcggaaatccagctactgacaagccttatgatttatacggaatccaagagacttttagaactttcctagaaaaagagggccatgaacctattagtcgttatccaattcttgcaaaaagatggagagatgacgtattcttagttggagcttcaatattttgcttccaaccttgggtaacctccggtttggtggaacctccagctaatcctcttgaagttgaacagccatccatacgcttgaacgatgtggataatgtaggccgtaccggaaggcacatgacctgctttacaatgggttcacatactgtaatcaataagcctgataactttatctattgggaagatgagacaatacgcctttgccatgagttcttcaagtcaatcggaatcaatacagaagagcttacctttatcaagtcatggtggaaaggtggaggaaacgaaggcccatgttatgaggtatgctgccgtggggtagagcttgcaacccttgtattcatgcaatataagacccttgaaaacggagataaggaagagattccaatcaaggttgtggataccggatacggacttgagaggattgcatggatttcccaaggaactccaactgcatatgatgcctgttttgctccggttgttgataagctgaaggaaatcactaatgtatccgttaacgaagagattttagctagaaatgctgagattgcaggaatgatggatattgaggatattggtgatattcgtgatcttcgccaacaggtagctgacagcttaaacatcagtcttgaagagtacttggaaaatgcagagcctatggaagctatctatatcattgcagatcatacaagatgcttggcatttatgctggctgatggaatcattccatccaacgttaaggaaggataccttgcaaggcttgtattaagaagaactatcagattcatgaaggaattagagatggaagagtctctatctgacattatggccattcagcttgacttcttaagggaattctatcctgaaatcgccgagtcccaagagcatatcatgaacatcatcaaccttgaagaggaaagatatgcaaaaaccattgaaaagggtaaaaagactgttaagagaacaatcaaacgtcttaaaaaagaaggaaaaacttccatgcctcttgaaacattgattgatttatacgacgctcaaggaatgcctccagaaactgtagaagagcttgcaagtggagataaggactttgaggtctttgtgccagataatttctttacaatcgtagcggatatgcacgaagaggataaggtagctaaaaaagagacctttgagcttgatgttccagagactgagcttgacttctataaggacatctatcaaaaggaatctgatggaacaatcattgaagtcgttgaaaaagatggcaatttaaacattattcttgataggacaatattctaccctgaagggggaggtcagccttcagacattggtataatttctatagaaggcacaatctatgaggttgtctatgctgaaaagttagatggtgttgtattgcataggatagccacaaaagaggatgaggatgtggcttcccttgtagaggacttaaggaaatatattggaactgaagtccatatggcaatcaattggaataggagaataacccttgcaaggcatcacacaggtactcaccttgtaattgcagctgctagaaagattttaggccagcacatctggcaggcaggtgcacagaagggtcttgcacgttcccgtatcgatttggctcattataaacgtatcaccataggggaattggatgagattgagaaattggctaatgagtatgtgatgatgaacattgacttggatatcaattggctaagccgtgatgatgcagagaagaaatatggtttgatattataccaaggtggtgtagtgccaggctctcaaatcagggtagttaagattccaggcatagacgttcaggcatgtgcaggtactcacctttccagaaccggtgaggtaggtccaattaaaatcaataagactgaaagggttcaggatggtgttgaaaggattgatttctcagcaggtcttgcagctattgattccattcaaaatgataaggcaatcataaaggaaagtagtgatgtatttagtgtaaccaatgatcaattgcctaaaacctgtgaaaggttcttcaatgaatggaaagctcaaaagaatgagattgcaaggcttcaaaaggaaattgctaatttaaaggtcagcacacttgcagaaaatgcatttgaagttaatggattgaaagtgcttaaggaaatccttgatgcaaacattaaagagcttcaaaagatagccactgactttacagacaatgacaaggttgatttggtcttcattggtaataatgagggtaagattgtaggttcagcaagtaagaatgctattgatagtggagttcaagttaataatattattaaggaagctgcttccctacttggtggtggcggcggaggccgtccaactttagctcaaggtgcaggtcctaatgcagataagatggctgatgctttagatttggctgttgagttattgaataaataa

SEQ ID NO: 492 - DNA, 2448 bp, Methanobrevibacter ruminantium
  source 1..2448: mol_type = genomic DNA
atgattaaaaagataacgattttgtcagttattctgattctgtttttagcagtttcaacggtagctgcaattgatgtggatacgaatgataatttggatgatggtagttcttctaattcagatttaattagttcttcttcattggattcttctagttctgatgatgtttcttctggttctagtgaggtttctagttctgatgaatcacttgatggaaataatttgtctgatggtaatgtttcttcttctgatgagtctgttggtgctgataatttgtctgatggtaatgtttcttcttctgatgagtctgttggtgctgataatttgtctgatgatgagtcatcttctgatgctctatctgaagaattgcctaaaactgaaacagtcattaaagcagacccaataaattataattatgcttcagttaaaggattaaccattaatctaacagattctgcgggacttgctttatccaataagactttgactgtcaaggtcagtgctttaaataagacttctaatctgactaccaattctaaaggacaggctatctttaagctaagcgcttctgttggatcatatgatgtttttatttcttttactggggatgaaagctatgctccatccaatgcaagttctaaaataactatcaaaaagtcctcaacaaagattaaattgagcaatattcacggatatttgactatttcaaattatgtaagtgtcacattactggattctgctggaaagcctataaaaagcaaatcagtaacaattcaagttaataaggcaaaatataatgtcaaaacagacagcaaaggcattgctaaagtcaaggttgcaaataagattggaacttactctgtgaatgctaaattcagtggagataagaattattacgcctcttcaaatagctccaaattgacaataactaaaatgaaggtttatattaaggctccatctgtaaagtattatatgacaaacagctctgctccttatttgacaattaacctgactaacgttaaaggcagtccacttgcaaaaaagaaagtctctgttaagataggcaaaaagacttatacattaaagaccaattcacagggaatcgctaaattcaagttcactaagaaagtgtcaagctataattgtaagattaattttaaggccacttccaatttctatggtgcatctgtaaattcaaagatgactattcaaaagatgccaacctcccttaaggcacctagcgttagcattaattcaactaactatggaaaagttctaataagcttaaaggatggaaagggaaaagccttgaaaaatactacagtcactgtaaatgtcactgaacttaagaaggttttcaccctaaagacaaatgccagcggagttgccacatttagctttaatggtgaaaagacattcaatcttaaaataaagtatgcaggaaataagaattatgcagcaagctctgtaagttctaaaataaacgttaaacagattaaggtaaagctcagcgatgtcattggtgcatcaagggtattgattgactatgtaaacagaacaaaggacttgccttcaaatgtccaatataataattataatttcactgtcactcagcttacatatttggcttctaaggcagttaaaaatataaacaataagaattatggagatattgttcttatttctgttccaaaaagctataagtcctctggagagatttatgatacagtttataagaaggactttgttaagatagcaaatagcgttgtcggatcttcttacaattataagaataaggagtatgtaagctattccatttataaggttccatttaaggtatattccattagctttgctaaggttctaaacttctatggaaataataagaaattgcctaattattcactctttacccttgcagactttgctaaggttaaagataatggaggatataatttctatctgacaactgataatattgcaggtaagaaatctgatttgaatatgcttaagagcttagctaagaccttaaaatccatgggatataatgcagtcattgtaggtatcggtccggatatacataatgtggcttataggtatggatgtactggaaacaattctgttttgcttgcttgcttcggcggagttgatgtaggatgcatagaagaatgggctggcgatttaggtgacttgaatggtcattcatttgtcaatagctatcaaggagctcatgttttaggattatggtttactaagccatatggtgcatctgtaagcttgaataagaaggtaggcattgcatgggatgcagattatggtttcccattaaacactccggctaaatatatgaaaagtcataatattagctatattgagactggaactgttgcaaatgcatgtaaattgttaagcgagggtaaaatgggtggtcctcaattgattagctaa

SEQ ID NO: 493 - DNA, 1161 bp, Methanobrevibacter ruminantium
  source 1..1161: mol_type = genomic DNA
atgaggtattttatgaattatgatttaatcattgctcgatatggtgaagtagcattaaaaagtaatcgagtaaggcgcagatttgaaagtcgtttagtaaataatataaaagcgtcaatagatgcggaagtgaaggttaaccaagcaagaatttacatctttccaaaagagtttgatgatgcaatagagaaactggagaggatatttggaattgtatcatattctcctgcaatatccaccaaatccacttttgaggatattgaaaaaactgttggggaatatgcagagcatctttatgaagaaggtcttttggatgagaacactaaatttgcaataagctgcagaagggtaggtcaacatgaattctcttcacaggaaatggctgcttttgcaggggctgttgtagttcgcaaatactcttgtcctgttgacttgtcaaatccagaacttactatctatcttgaagtaagagacggcgatgcttatgtttatcacgaaaagattgaaggtccgggaggccttcctcttggaactcaaggaaaggtcgtttcacttgtatcaagtggaatagactctcctgtagctacatatcttatgatgaaaagaggctgtcaggttattgctttatattgtgataatgagccttatacttctcctgaggcactgcagaactttaatgacttgatagatcaattgaatctatatgcaagcggagctccaatcaaaagaagggttgtaaaatatggagaatacctttccacctgtaaggcggaggctccagataagatgacttgtgttctctgcaagtctggaatgtataagttagctggcaaattggctaaaaagcttaatgcagaggctgttattgatggaagcagcttaggtcaggtagcttcccagacacttccaaacatacttgcaacccgtgaggatcttgatgttccggttttaagtccccttataggtcttgataaattggagataactagaattgcagagaaaattggcacattcgagatttccaaaagggatgatgggggctgcaaggcagttccaaggtatcctgaaacaaatgcagatttggaatttgtaaaacaggtaaaagaagagatgaatcaggatgaagagcttgaaaaggcttttaagaccattgtttattag

SEQ ID NO: 494 - DNA, 627 bp, Methanobrevibacter ruminantium
  source 1..627: mol_type = genomic DNA
atgagggattgtagcaattgcaatagggaatcttgccttttgcagaaagtagcaggaataataatggtttttggcagcttatactatattcttgctgaattgatttcagcaggatttttcaatgattccttaatcaacacctatctttttcataccatttcagaattgggagttcctgtggccaattctcctttatcctttttaatgaattctgcttttattctaattggaattactcttttattaggttattttgctaagtttagggattttattataaaatataaattaatcatttccattttggcggtcattacagctcttggagtgataattgttggctttattcatgctggaaatccattgactgatggctatcatagtttaggcgctgttatggctatccttggcggaaatgtgatgctgattcttgtttcaagagctatggctgaatttgaaagctatcagaaaatcacttttatattgggaattattggatttattgtcttttggataatgtttttcaatctagaaagcctttatatgcctgtctttgaaagattatctgtttataccttaataatctggaattttatgactggtttttatttgtataaaaatagttaa

SEQ ID NO: 495 - DNA, 567 bp, Methanobrevibacter ruminantium
  source 1..567: mol_type = genomic DNA
atgaacactaacagatttgaaacattttttgatgcgattatagcaatcataatcacagttcttgtattaaagttatcacagcctgcagctcctaccgttcctgcatttttagccttaaatgcaaggtttataacttatgcaatctgttatttggccctttttatcatttggtatgataatcataatttattccaggtagttgaagagataaataatactgtattgattatttatgccattcagatgtttgcaatttctcttcttccttattttgctacttgggtggcattgaatgtgaattcaattgctgctgagacaatgtttggaatcgattttcttgcaatacttattctttatgtattgtctatttatgcggtttatagggctgacccctataattgcggaatatctaaaaacaatttcagaaagatctattgctatattccgattataatcgttcttatagggatttttaataagctatacagtttatactccaggaatatttgtctgcattctgattgcactgatttgctggcttttcttttcaagacttcaaagacctga

SEQ ID NO: 496 - DNA, 522 bp, Methanobrevibacter ruminantium
  source 1..522: mol_type = genomic DNA
gtgattacagtgattgtccttgagattccaatggctgtagatggatcttggggagctttgcttgatataaaattggaatttattgtttatgcagtaagttttatcgtttgctttaacttttggaattataacaataatgtttttagcatggtaaataagatagatcataaggttatctggtcaataggcattgcaatgtttttcctatctttaattccttatttgactacattcgttgccttaaatcctgatgcattcttgcctagcttcttatatggtttggactttataatcgttgctattttgacaatttttactataaatgctttaaagaattcggataaggcaaatattgctcttcagatagcattggcagataatcagccatatgttacaacaatcgtatttgtattgtttggaatgatcgttggctattttatttatccattggctattgtgattgcatgcttgttttcaataattactctatggttaatttcttattataaaaagcatggctaa

SEQ ID NO: 497 - DNA, 1101 bp, Methanobrevibacter ruminantium
  source 1..1101: mol_type = genomic DNA
atgaaaactactgtaagtgtaatcaaagcggatattggaagtgtttccggacactgtgtatctcatcctgcattaatggaaaaatgtgatgaggttttagctaatgctttagaaactggaattcttgaagattactatataacccgttgtggtgacgacattgatttaatcatgacccacagaaacggtgaattgaacgaagaagttcacaaaactgcatatgatgctttcattcaagcaactgaaattgcaagagacttaaaattatacggtgcaggtcaagacttattatctgacactttctctggaaacgttaaaggtatgggtccaggctgtgcagaaatggaatttaaagaaagaagaagtgaccctgtaattgtatactgtatggataagactgaacctggtgcattcaacttgcctatattcaagatctttgcagacccattcaacactgcaggacttgtaattgacccaagtttacatgacggattcagttttgaagtctttgatgtaatggaacacaaaaaagtagtattagactgtcctgaagaaatgtacgacttacttgcattaatcggttccactggaagatacgtaattaaaagagtatttaagaaaaacggtgaaatcgcagcagcagtaagtactgacaaattaaacatgttagctggtgaatacgttggtaaagacgaccctgtagctattgtaagagctcaatctggtttccctgctaatggtgaatgtgtagaaccatttgcattccctcacatggtaagtggatggatgagaggttcccacaacggtcctatgatgccaaccagccaagaagaagctaacccaatcagatttgacggacctcctagggttgtaggtttaggtttccaagtaactgatgctaaattagtcggtcctgtagacttatttgacgaccctgcatttgatgaaaccagaagacaatctgcaaacattgcaacctacatcagaagacacggtccattcgaaccacacagattaccatctgaagagatggaatacacttcattacctggcgtaatggaaaaattagaacctaggttcgaagatatggatgatgactaa

SEQ ID NO: 498 - DNA, 378 bp, Methanobrevibacter ruminantium
  source 1..378: mol_type = genomic DNA
atgagtttttgtccaaattgtggagtggaacgaaaagaaggaagtcatttttgccatcattgtggctatgattatagagaagctaattcatctgggatgggctctagttctagttctgattcacaagtaaatcagaatcctagttttaattctcaagtaaatcaaagttctacttataatgtcccaacaaagcaaaatcctcataattttgctaagatcactggttatatattgtcctttttaatacctgtatttgcaatcgtaattggtatatatttgattttatctaaaaatgaggaagttcataaacatggaataattattatcggaatttctatagttgttcaaatactttctatgatttttatgatgggttaa

SEQ ID NO: 499 - DNA, 513 bp, Methanobrevibacter ruminantium
  source 1..513: mol_type = genomic DNA
atgattttaaaaacagcacgacttattttaagaccttggaaagaggaagatgcagaatgcttatatcattttgctaaaaatccaaagattggacctattgcaggatggccaccacataaaagcgttgaagagagcttagagattataaaaactatttttgcaaaaaaagaaacttatgcaattacaataaatgataaggcaataggatgtgtagggcttttattctatccagatactaatcacaagtgggaaaatgaaggtgtagaattaggctattggattggagaggaatattggggccaaggattagtagtagaagcatgcaatgaactcatcagacatgcctttgaagacattgatataaataaaatttatgctagttttaaatatgaaaatcatcaatctaaaagagttttagaaaaattaggatttaaatattattgtgatttaaaaaataaggattataccggagaagaattctatgaaatagctatgtttttagagaaaaagtaa

SEQ ID NO: 500 - DNA, 192 bp, Methanobrevibacter ruminantium
  source 1..192: mol_type = genomic DNA
atggcagatgtggatgttactgaaattagaattattttagaagacctttctaaagatcaattaactgaaattttagaaaaaaacggctataccagcaaaggtagcgaaaaattcctgattaaagaaatcatgactaaaatttcccacgacattattattgatgaattagaccagcttggcgttttagactaa

SEQ ID NO: 501 - DNA, 243 bp, Methanobrevibacter ruminantium
  source 1..243: mol_type = genomic DNA
atgaaagatttggaaagtgaagaaaagatagcaattgatattgccaaacttgaaagaaatcttaatcaagttgaagacatcaagtttgaaggaaaagaaaaggaagtttatgatagggcaatagattactggaatgattcaaaatattacctagagaaaaaagacacaagaactgcttttggttgcattgaatatagccacggcttgttagatgcgctaagaatgattcatggattaatttaa

SEQ ID NO: 502 - DNA, 597 bp, Methanobrevibacter ruminantium
  source 1..597: mol_type = genomic DNA
atgcttgaaagtttaagaccatttctcacaaaaatattagaacctatagccagccgattaaatataaatccaaatattgtaactataatttcgccatttttagctataatatctgcatatttctttgctacagggaatttgattggcggagcattattcatacttcttagcggatttttagatgttgttgatggagctgtagcaagataccacaacagatcaagcccatttggtgcatttctagactctacaatggacagatttgcagatgcaatcatattcattggaataatctttggaggttattgtaattggtttgttggagttttagcaatccattcagcaattacagtaagctatgtaaaggcaagagccgaatcacaaggagttgagtgcaatactggaatagccgaacgtgcagttagattgataattcttatggtgggagcggtaattgcattcatattcaattcagatataattttcacatactttatctacatacttgtagttctttcatactttacagtaggccaaagagtttaccacgtctggaaagagctaaataaaaagaaaatcccacaaagaagattgtag

SEQ ID NO: 503 - DNA, 666 bp, Methanobrevibacter ruminantium
  source 1..666: mol_type = genomic DNA
atgaaaatatttaaaatgaatcctgaaaatccagatatggatcttatagatgaggctattgacattatggctcaaggaggagttatattatatcctacagacactgtctatggcttgggagcaaatattttcaataatcaggctgttcaacgaatttataaaattaagcatagggaaagatcaaagccattatctgttttggtttcggatattgaaagcttggagcttatcgctcatttagatgatcattcacgtgaagtggttaataaatggcttccaggaccttttacttttattttaaacaagcaaaagactgtttctccctatgtaagttcaagcactaaagtaggtgttaggattccagataataagattgcaagagaattggcttccatttttccaataacaactacaagtgcaaatattgcaaatgaagagactttatctaatccacatgacatattaaaacaaattggtgattgcattgatttggctattgatgttggagacttgactgggggaaagccatcaactgtgattgatttgacttctgctaaaccttctttagttaggaaaggactaatttcaaatgatttggaatctattaaagaagatattggtgatatggactctaataaaaatgatattgatgatatgaacttataa

SEQ ID NO: 504 - DNA, 696 bp, Methanobrevibacter ruminantium
  source 1..696: mol_type = genomic DNA
atgaaaattttatctactatgcaagattatgaaaaaatatccactaattctcctttagatgaattgttagatgggggaattgataaaagaactatcactcagatttacggacctccaggtgttggaaaaaccaatgtttccttaaatattgcagttaatgttgcaagaagtggaaaaaaggtaatctatattgataccgaagggggaatctctgttgagaggattaagcaaatatctggtgaagattttgataatgttgctaaaaatatagttgtctttgaaccgacttcatttaaggaacaggaagaggatttggaactgattgaagattggctagcttctaataacagtgaagtggaattaatcgttcttgattctgctgttgcattgtttagggttgaagacgataagtcaagatcacatcttttaggtaagcaaatgcagcagcttgctaaatttgcagttgattatgatttggctgttttagtgacaaatcaaatctatgcctcctttgaggaagacagtgatgaaatggctcctgttggtggaacaatcattcaatataggagcaaaatcattattgaattgaaacgtgaagaaggaagcagtgaaagaattgccattttaaaacgccataaaacccgaagggaaggattagctattcatttctcaattacaaataatggaattgaatga

SEQ ID NO: 505 - DNA, 1161 bp, Methanobrevibacter ruminantium
  source 1..1161: mol_type = genomic DNA
atgatccaaaagaagaaatatgcaaaggcagcaaagattattccagaaggttataaatctgcgaatcaattctttgaatctgtttttcaagataaagaaatgatttggatgggtcaaaacacaaatgaattgcatattggtcacaatgaagaagttcataaggcaatgattgattgcattgaaagtgacgaatactgtaagtacccacctccagaaggatttacagagctccaatctttaattttaaaggatttggatttggaagacttaagcatttatattaatgcaggggcaacagaatctttatacttggctatgaatgccgttttatctgatacagataatgtaataactccagatccaggatatcttatcattgataattttgcaagcagatttgccggtgaagtaagggctgtaaagatttatagtgaagaaaacaattataaattaactccaaagcttgttagagagaatatggatgaaaatactagagtaattcttttaattgatccattaaacccacttggaagctcttacactgaagaggaaattaaggaatttgcagaaattgcaaaagaaaatgatttattcttattacatgacataacttatagagattttgcacaaaaacatactctcgctgcaaaatacgctccagacaatactataacctgttatagtttctctaagatatttggtatggcaggtcttagattaggtgctatcgtatcaactcaggaagttattgatgttgtcaaaagcattatcattaacgacgtaggtacaagcatggttgcacaggctggtgcaattgcagccttaaagactaagcctcaatggattgatagggttaaagacaccacttttgaaaatcagaagatcattaaggaagctgtggatcagtgtgaaggtgttttcttgccagtctatccgtcaagtggaaatatgatgggaattgacttatccggtgcaggaatcgactcagaagacatgtctcaatatctaattgacagaaaagtctttacaaggcaaggatcctatacaagcaatacctttggtcataaatatttaagagtaagttactcaatcgacccagaaaaggttaaagtatttgctcgtgagtttgttttagctgtagaagctttaagaactaaataa

SEQ ID NO: 506 - DNA, 1776 bp, Methanobrevibacter ruminantium
  source 1..1776: mol_type = genomic DNA
atgagtagaatttctattttagacaaggacaagtgccaaccaaagaaatgtaacacagtatgtatgcactactgtcctggcgtacgtatggatgaagatacaattgtaattgatgaaaagactaaaaaaccacttatttccgaagagctatgttctggatgtggtatctgcaccaacagatgtccatttggtgcaatcagcgttattaacttacctgaagcattagatgaccctatccacagatatggtcaaaacagctttgaactctttggacttccaagccttaaagaaggcacagtgcttggtttgcttggtcaaaacggtatcggtaagtctacaatcatgagaatcctatctggagagctcattccaaaccttggaaactatgaggaggaagccacttgggataaggtaattgaatattataaaggttcatcccttcaaaactactttaaggcgctccaagcaggagaaattaagaccatccacaagccacaaatggtggatcagctctctaaggtagttcaaggaaatgtaaagacccttctttcaaatgtggatgaaagaggcaaattggatgaaataatcgatgaccttgaccttaagaatgtgctagagagagacatgcaaaacctaagtggaggggaacttcaaagagtggcaatagctgctacagttcttcgtgaaggagacttctactacttcgacgaaccaacatcatggttggatgttcgccaaagattaaatgcagttaaagtaattcgttcccttgcagaagcaggcaaatccgtccttgtgattgagcacgacttagctacattagatgcattaagtgacaatgtccacttattatatggtgaacctggaggatacggtgttgtaagtggaaacaaaggtgttagagtaggaatcaatgcatacattaacggattcctccaagaggaaaacgtaagaatccgaaaacaggcaattgaattcagcattcgtccacctacccctgaagatgacggtgaagtcttaagcgaatacagcgatcttaaaaaggaatatgacggatttacacttgaagcggaagctggaaaaatctatcacgatgagattgtaactgcattcggttcaaacggtatcggtaagaccacatttgccaaaatattggcaggagttgaaaagccaagtgaaggaaacattttagaaaaggttgaaattgcatataaaccacaatacattgaatctgactttgatggaactgctcaagacttcctttttgctaacgccccaacatatggatccaatatcttcaacagtgaaatcggaaagccacttgcacttgaaaacctattggacaaaaaggttaagaaactaagtggaggggaacttcaaagacttgccctcgctgtaaccttatcacaggatgcagacacctatcttttcgacgagccaactgctttcttggatgtagagcaaagactgattgcagcaagagtaatcagaaagatagttgaaagcagaaatgcagcttcacttatcatagatcacgatatcgtatttattgattatatttcagacagagctatggtctttagcggagagcctggacttaatggtaaggcatctaaacctgcagaccttagaacaagcatgaatcagttcttaggagatttagatattacatttagaagagataaggaaactaaacgtcctagagtaaataaatatgattcttatcttgatagagagcaaaaagaacaaggagagtattattacttaaaagaataa

SEQ ID NO: 507 - DNA, 339 bp, Methanobrevibacter ruminantium
  source 1..339: mol_type = genomic DNA
atgaaacaggtaatggttgtaagaacagatataaagatgggaaaaggtaagatagctgctcagtgttgccatgctgctataggtgcttataagcaagcggataaggaaaaaataagaaagtgggaaaatgaggcctatgcaaaagtggttttaaaagcacctacattacaggatctttataatttaagggaaattgcaagggcaaatggtgtggcctattatttggtgacagatgctggcagaacccaattgccaaaatccactgtgactgttttaggattaggtcctgatgaagatgatgttttagataaaataactggtgatttgaagttattataa

SEQ ID NO: 508 - DNA, 816 bp, Methanobrevibacter ruminantium
  source 1..816: mol_type = genomic DNA
atgaataaaataaaaaagcatgaaagtaaatttacaaacaataggctacttaatcccgctgaatatatgccaaaagaggaagttgaaacattaaagcaagtatcctatttaatagtgctatttttactcttcatattcttcatatacagtttttggccaatggcaaatatgaaattcttctcatttttagaaattgtattgatggtatacattgcattaaacatagactatagcaactggaaaaacaaggtactgtttttctttttagtgccttatggatcaatagcatggttcctttttgaagaacttacaaacagcctattcgacatattccatatgataattcttttatactttatgaaagtctattatgagaagtttagggaatatactgaaacaaatggtttaggaataaccatattgctattatttaccataatatttattagttttattttaacaatgattgtagaaggagtctcaccgatcgattcaatagcaatggtctcaaatgcatttacaagtaatggatatgcagttttaggaagttcattcggtggaaaattaaacagcatactattggtttggagcggttatatcctttcaggagtaggtactgctacaatgacagttgctcttctttcaaaacacttcaataaaagaatcaaggaaaatgaaaaaacaaatgaagcacaatatgccgaattaaaagagatgattgaaagaaataatgaggaaattaaagagatccttaaagagaacaatctggaaaaaaagactgaagaagaattagaaaagaaaattatagaaccgtaa

SEQ ID NO: 509 - DNA, 711 bp, Methanobrevibacter ruminantium
  source 1..711: mol_type = genomic DNA
atgaattatttaaatcaaaattatgccactgtctttatgggcaatgactttttattgataattgcctcgttaatcataatgattttcatatttggatatggatcagtcataacaaaggatgtgataagagggggcaagaaactgcctaaaatatacattaaagagtgcaccatctatggaattaaatgtgttatagtggcactcatatactctgcagttcaaaccttagttatggttgacctttcccatagattcctttttccagaatttgaattagagcatgcccttacagatataactggaacattacaaatgttcactgcaaataatcctatattgattggcgaatatgttgtaataagtataatattaacctatatttttgtgttctttatggaaatttcacttgcaagacttgcagatgggggaaaattgcttgaatcatttaatttgcttgcaatcaaacgatgcatagacactataggctggaaaaaatatacaattgattatacaaagcttcttcttgcaataactattttaacttatctccaatatggattccaattcttaggattcttcgattacataacagatttgatttttggccttctagtcttcataatccaatttattggaattgggcaaatctataagatatataaaattaaaaaatatagcaatctggataggccgacaaaaaagagtgtttaa

SEQ ID NO: 510 - DNA, 915 bp, Methanobrevibacter ruminantium
  source 1..915: mol_type = genomic DNA
atgtcaaataaaaagtcatttcttgcaaaaattgaagagattatcttgatgcaaacaaaacctgattatatggattcctatgaaaaggtaaatgatttaataaaagagagattaaacgctcaagagaagcctcctaaaagcgccttattcaaaagcacatacttaaatggaacacagatattccattatggaaatagccaatcaaaaaatctgattgtttacattcatggaggggcctttataaatgaaataggattccagcatcacttcttctgttcatatatttctaaaaaattagatgcttatgtaatctctccagtttaccctttggctcctaagcattcctgcaatgaaacctttaatcaaataactgatttatataagtctttaattgaagagaataaatctaatggagataataaaaataataactataataacagtaataacaataaatccatttatctgatgggagactctgctgggggtggatttgtcttatcattctgccaatacttaaagacagtcaatcttccacaacctgataagatagtggtttattctccatgggtagatatttcaatggatgattctccttatgataatgaatccgatccgatccttggtgagataggccttagagaaataggaaagtcatgggctggagaattggatacaaaggattacagagtaagcccattgtttggagacaattctggcttggctccaatacttatctttgctggagacaatgagatattctataaggacatattgaagtattatgaaaagttaaaagaagataatgttgatgctcgattggttgtaggaagtggcatgtttcatatttatcctctatttccttccccagaggcaagtgaggcttttaaagagctaaaaaaagagtttgaataa

SEQ ID NO: 511 - DNA, 1044 bp, Methanobrevibacter ruminantium
  source 1..1044: mol_type = genomic DNA
atgagcaagaatagaattgaatggattgatctcgtaagagctctcgctattttaaccgttctatacattcatgcaacagatggaatctatattatctcctctgatttaatcccctattggactcctttttcaagagttttccaattcatatcactttttattggacgtataggagttccattcttcttaatgattacaggttatctattgcttgatagaacctatgacgatgagagagtcaaaaagttttggaacaagagctgtaagggcttggtcatagttacaatcatctggtccctgatttatgcagtgagcatacagcttgtggcctattccagcatacaagtcaatacaatagaagctggaaacctattcttcagccatatgtggtatatgccaatgattatcggtatgtatttatccatgcctttcgtagcgaatgcattgaaaaactttgatccaagaacaattaaccaagctacaatcgtattctcctgcctggcattcctgctgcctttcatttcgattgtatgtgagatgcaagggcttcagaatgtaaacatccaatactgccttggtttcagtggaggagtatatggtatctatatcatactgggttggctggttaagaagggactattcaagaagtattcctcaaacagcttgaggctgcttgcaatagtttcgtttataatttgcgttctcttccaatggtatgcattctctatagacttcagtttctcattatggtatgagttcccatttatcctaaccggatcatttgcattgtttgaattatgttcaagaagagaaaaggtcagaggatttagaggagttgaatttttagccaaatattcatttgctgtgtttttaatacacaacctgtttagaatcatattgcttcctatggtggtttacctgccatatacagaaccggttaaagcgattatactttggatacttttaataataaccagttatgcagctgcagttattatttatagaattcctaagttcggtaaatttattttatatatgagataa

SEQ ID NO: 512 - DNA, 300 bp, Methanobrevibacter ruminantium
  source 1..300: mol_type = genomic DNA
atggaattgataaaaaattataatgaaaaggaattaacaattgaaactggaaacaagatagatacaaccactgcacctgactttgaaaatgaaataatggatgaaatgggcaactttgattcattgactttagatttaaagaatttggaatacatttccagtgcaggcttaagggttttaattcttgttcaaaagaaattaaaagctgacgacattccgtttgttatcataaacactaatgacaacattaaaaacattctaacaatgtctggctttgacaagattttaaatattcaataa

SEQ ID NO: 513 - DNA, 633 bp, Methanobrevibacter ruminantium
  source 1..633: mol_type = genomic DNA
atgataaaattagcctattgcaatgtagaagaacttgacttaaaaagagcttacagcttagtctccaagagccgtcaagaaaaaatcgacttttacagattcgataaggataagaagctaagcgctggagcatatcttctattgaaaaggctattgtctgaggtgaatattaaggattttgaaataattattgaaaaatatgagaagccccgtatagtcgaccatgagaacatatatttcaatataagtcattcaagcaaaatggttttatgtgcaatatccgataaggaacttggcgtagatattgaaaatattgatggcgaaattgatttaaatatagctaaaaattttttctataatgatgagtataagtcgattatgaactgcgacaatccaagtgatgaattcttcaaatattgggtcctgaaggaaagctatatgaaatacactggccttggaatgaatttgaaactggatagttttgaaatagttattggagatgagatcaaacttaaagatgacgatagtgatttaaaattcaatctatttgaaatagaagattataaaattggaatagcaagccattacaatgtatatgacttgattgaatatgatcttaaggaactgtattaa

SEQ ID NO: 514 - DNA, 1875 bp, Methanobrevibacter ruminantium
  source 1..1875: mol_type = genomic DNA
atgaagactaaactaaaacaaatattaatctcatttattgtgacaacaatattttattttgcgctttctcaaacctttataactcaattaggattagggagcccacaaataggattattatacgtttttggcctattatttggcccttttggtgcattaggtgcatcattatcaaacgtagcaatagatgtttatcatggatatacctttgttcaaatactcccttcagccatcatcagctttggagtttctcttttggcatataagctttggtactccggatttaaatcagatgagtatacaaaaccaagattggatacaatttaccacctatgcctatttttagcaagcataatcatatgcggaatgatttattcagtaggccacggaaatctggcatatatcctaatcagcccagatatagaggaatcaataatcattccatccttcttgaactttacaaacgttgcattcattatgggtattgcaggaatttggctttttaaaagaacaaatctcatagagacccctaaaaaatcagagcgtcgattgaacaagaacctataccgtttgatcttttccttattaatggtcatgacaatagtctcattcatattcataattagaaattcagataatctcacaataatcacaggcctaataatagttgtggccctaatgtatgcctatatgacaaagccattcatacatgagatacaagaggtcaacgagaacagcataattgcaaagattgtccgcaatttcattataattaccctaatccttggattctttggagggctcgtttccatagccagctttgactatgttgaaacaagcattacactcaacatctacctccatctgatgccgattcttgtgataagcgacataatcataattctcttcttcattccaggaatcattatccttaaatacattggagataatgtagtcaagccaatcacctcattttccgaaatcgaaggattcatcaaggaagatgaaaagatagaagcggaagggctcattaaggtctattcagaatatgtcaatgaacagaatgaaataggaacccttgcaaggtcatatacagagcttatcaatcataacaacaactatatcgaaaacattcaaaagatcgaaggggaaaaggagcgcacaaatgcagagcttgacattgcaacaaacattcaggcagctgcccttccaactgaagcaattaaaacagatgcattcattgtcaatggatattcaaagcctgcaaaagaggtcggaggagacttctttgactattatgagttggatgatggcaatttagcaattgtaatcggagacgcttcaggaaaaggagttccagcagcactggttgccatgattacacaagtggtaatcaagcagacactgataaacaatcacgacccttcagaagtcctattctcattgaataatcagctatgtgtaaacaatcccgaatcaatgttcattaccctatggctcggaatatataataaaacaaataaaaagctgacattttccaatgccggacataatcctcctttaatcaaggaaaacggcaaattcaaatatttggatatcgaaagcggaattgtccttggaataatggaagacttccaatatgaggatgaggaaataaccatagatggagaattggttacatatactgatggaatcaccgatgcaaacaataatgatggtgaaatgtatggcgaggataggcttttagaattctttaataaatttaaaagcgataaagacccaatattaccattattaaaagacattaatgactttactaaagatacagaacagtttgatgacatgactttattatacttgaaagtgaatgattaa

SEQ ID NO: 515 - DNA, 378 bp, Methanobrevibacter ruminantium
  source 1..378: mol_type = genomic DNA
atgaattcaatgaactttaaagtagaaatagatgaattacatagactaaacgagtttattttaaacgaacttcctcatgaagactttatggtaaatctgattgtagaagagatctttgtaaacatagttaactattcccaaacagaatatatcatagttaatttagattacaaagagcctaatttaacaattgagtttgttgacaatggaatagaattcaatcctctttcaaaggaagattatgaagccccagacagtattgaggatgcaaaaataggaggtcttggaattcatctaaccaaggaaatagctgatgaactggattatcactacgaagatggtgaaaatcacttgatgattgttaaaaaagtagaataa

SEQ ID NO: 516 - DNA, 318 bp, Methanobrevibacter ruminantium
  source 1..318: mol_type = genomic DNA
atgtcatcaagcaaggaatatttagaatatatactggaacagctctctgaactggatgagataacttaccgtgcaatgatgggagaatacatcatctactaccgaggcaagatcattggaggagtctatgatgaccgctttctagtcaagcctgtaaaatcagcaagggaaatgatgccaaatgcaaatatggaattgccttatgaaggagcaaaggaaatgatccttgtagatgatgtggaagacaaggagtttttaagagaacttgtagaagcgatgtatgaagagctacctgcccctagaaaaagacgtaaatga

SEQ ID NO: 517 - DNA, 471 bp, Methanobrevibacter ruminantium
  source 1..471: mol_type = genomic DNA
atggacatcttagctaaattgctgaatgataaattagcatttgcagaaatcagctatacaatagaagaagcaaaaagtatatctgattcaaataagataccaattatgatttgtagcgaaattctaaaggaaaatgagccatttgcacattcctgggatgttacaagcgactcaattgcagcatatattgcaagccttttagatgcaaagcttttaatagcaacagatgtaaatggtatatatactaaagatccatccttaagtggagcagagcttattaaagagattgatgtaaatgaactgctgacttttgaagaatcatcaatcgatttgatgctgcccagtttattgattgagtatggattggattgttatgtcgtaaatggagagtatcctaagagagttttatccataatcaacaatgaggattgctcttttgaatatactttcataagaaatggaaacgactaa

SEQ ID NO: 518 - DNA, 162 bp, Methanobrevibacter ruminantium
  source 1..162: mol_type = genomic DNA
atggaaaaagtaaactgtcaatcttgtaaacaagaaataccattaattgaaccttatgttcaattcaactgtccagaatgtggtagacctatcgcaagatgtgaaagctgccgtactttcggtcactcttacaaatgcgaatgtggatttgaaggaccataa

SEQ ID NO: 519 - DNA, 270 bp, Methanobrevibacter ruminantium
  source 1..270: mol_type = genomic DNA
atgggagaagttgttaacactttaaaagtaatgccagaaagtccagaagtagatttagaagcattaaaagtagcaattactgatgcaatgcctgaagatgcagaattacacgaaattactgaagaacctattgcatttggtttagtagctttaaatgttgtattcatcgtagaagacggtgaaggtggaactggacctactgaagatgctattaatgctatcgaagatgtagctagtgcagaaattactgattctagaagattaatgtaa

SEQ ID NO: 520 - DNA, 1251 bp, Methanobrevibacter ruminantium
  source 1..1251: mol_type = genomic DNA
atgtttgatctattagcggcatgttttattggaatagcaattggaacaggtacaggaatggttccaggcatccatgtaaacactgccggagcaatcatgtttgcatcatcaggatttttgcttagtttcttatctcctgaatttttatgtatagttatggtatcaatgagtattgctcacgctttgattgagtttgttccatcaatgcttcttggagttcccgaagagggcactgcaagttctattcttccaggacataggatggttttggaaggaagatctaaggaagctatcagaatagtttcagtaggcgggtttggcgctattgttgtagtgatattaatgttgccaatatttgcagtggcattgccatttctgcaggatttatcaaagccttacacttggatgatacttacggttgtttctattttaatgatatataagttaagcaatggaaggctcgcatttatgtggtctatcttgttatttgtattatctgggattttaggttggataatgcttcagacccctatatcttcaggaatttcattaatgtgcactttcagtgggttatttggaattagcactattctttttagcttaaatgatagctcttcaattcctcatcaaaataaatactacgatttcgtaatcgataaggatacaataaagagcattttcgcaggaggcactgcaggagctatcttaggctttttaccaggttttggaccagctcaaggaagcattattgcacagggagtatgtggaacaagcgcagatggggatgacactaaaaattttcttctagcaaacagtggattgaatacttcagacaccttattttccctaatagcaatctatctgataggaaatcctagaagtgggattgcagtgtatatgtcctatttgatatctgaatttactttgtctcatttgatgatattcacttttgcttctttaattgcagtttcaatatcattgattatttgcttaaagctgggagacggcttttcaaacctaatgcaaggtgttgattatagaaaactgtccatatcagtaatcctattgatgatagtaattctctatatattcgccataatatatgaaggtcctattttatatctcacccttgcattgatcacatcaactgcaatgggtttgttgccccactatttgggggtcagtaaatcccatttgatgggggtcttgattctcccggctataataatctatatgcagatgttcatgtag

SEQ ID NO: 521 - DNA, 1515 bp, Methanobrevibacter ruminantium
  source 1..1515: mol_type = genomic DNA
atggctaaaacaattattccaaaatataaggtttcaaagtttgaatttacagaagaagagagaagaactctagaagagttgcgggaaaatctaatcgatctggctatctcagagagaatgtccaacttcaatgaggatctaatactaaacgatatcattcgttttttagacaatcgtctattctcaaatgcagattatgtgagaaatattgattttgagaaactggacagtttcaatccttcaaaatataagcatatcggaaatcctaaaaggtattctcaattctatgcaatattcaaggatgagattgaaaaatacaagaataatttggctcgaaacatgtttcaagagcttattggatatggggaaattggatttttgattgatgacgatgatttggaagagattatggtgattggactcaataagcctgtatttgtatatcatagggaatatggtatgatggaaactgatttaatcttcaaagaggaggaaaagattctaagcataatcgattcaattgcccgtgagacaaaccgcagaatagatcagcaatctccaattttagatacaagacttcctaatggctcccgtgttaatgcaaccattcctccactttcagcagatggcccaaccataaccattcgaaagtttaagaaagacccattgacaattgttgatttgataagatacaacacattaaacactgaaatcgcatcattcctatggctctgtgttgacgggcttggggtaaagcctgcaaatatcatagtctcaggcggaaccagctcaggtaagacaaccctccttaatgccctttcaatatttatcaatccaaaggagcgaatcgtcacaatagaagatactcttgagcttcaaatccctcataagcatatcttaagaatggaagcacgtacagttaatattgaaaatcaaggggaaatcacaatagaggacttggtaaagaactccttaaggcaaaggccagataggataattgtaggtgaagtgaggggaaaggaagctatcactctgtttacagcccttaacacagggcattcaggattcggcacattgcatgcaaacagttcaagggaaaccattacaaggcttaccaatgctccaatgtctgttccaaagataatgataagttctattgatttcatcattatggaaaaaagaatctacaagtcagatggattgtcctataggagaatcactgaaatagcagaggtggttggaatagaggaaggaacaatccagcttagcaaactctttgaatgggatagtaaaaaggatgagttcaagaatctgacaatcttaagcaaaacattggaaaacattgcaagcctaaagggagttcatatttcaattcttaatgaggaatggaaaaacaggaagaaagttttagattatttggtaagaaatgacatttcttctcaagatgatatatctaaagttctcgaggactattatattaatcccgactatgtattaaatatgatttccaattaa

SEQ ID NO: 522 - DNA, 552 bp, Methanobrevibacter ruminantium
  source 1..552: mol_type = genomic DNA
gtggtgatttttatttttgataaattttttatccaattaagtgattctatcataaatttcttggtttctatctcaaatctttttctttcattttttgataagaataatgattctaaagagaaatggggaaacgaaactaatcaatttgattcaagcaaatatgaggaattgaattattttaacaattttaaatctgttaatttaaattattcagataattctaattctggagacgatttaaaaaatgagaattattcattcatctctaatttaaacttatctaagatttttaataatgaaaatatctttgaatacttggaaaacaaatatttaaacaagcaagcaatgtttataactccaaatggcactaatgaaaatgaatcaaataaaaatttcctatataatttaaagataaaactagttgttttaatattagacaacaggttttttcaaataagatcttctcaagaccttttaaaactgttattttatgtcctttttaattataataaatcctttttccattcttattgctgtatttgtttcttttga

SEQ ID NO: 523 - DNA, 606 bp, Methanobrevibacter ruminantium
  source 1..606: mol_type = genomic DNA
atgttttttatattgtttgctttgtttatcctttatcttcctaaaataagacatgagaatgattattcatcaatctcaaaagaactgccctatgcattgcgccaattgtccactgaattaagggctggaaaaagcttgtttgatgctcttgattctattgttgactctgactatggtgttttatcaagggaattttcaagggttcttgaggagataaaatatggtgaaacaagtgaaaatgcctttttgaatctggagaagagggtaaactccaaggcattatctagagtaatctatgagatacttgcaagcttaaggatagggagcaatctgtcccattcattaaatattattgctgaagatgttaattttgatatgagaatgaagttaaaggaatatagtgaaaaattaaatgctttcattatgatttatacatttttagctattttagcgcctgtgattattttaacaatgcttcttgcagcttctgttgtaattggagatattgttccaagcagtctgctttttattctgtatggattgttctttccaatgataattgtgtttttagcatttgcaattaagaaattagagcctaagctgtga

SEQ ID NO: 524 - DNA, 1509 bp, Methanobrevibacter ruminantium
  source 1..1509: mol_type = genomic DNA
atgtacgaacttattaaggaatcaattaatagtgatgaaagtgctttggaattagctaaaagcaaaaaagatgtaatctctgttgtagatgcaatatccgatttaagctttgaagacaccatgaaacttggaacaagattcaagaagttcccgatcggctgtgacttaactgaagtggtggttggaacctgtgcatcagatttggaaaagatggatctcttcggcaactgcatgcttgcaaacatgatcggtgctcctatacacatatgcgcatatgcgttctcagacattgcagagaaatatggccaaagaggtgtggaaataatggaagaggtctacaatatcacagatgttccactggaccttgaccactttggaaaatacggtgccatgagattcccaaagcatattgtaggatgcggaggagactgctacaaccaaggaccaagctttaccgaatgccctagaggaagaatccacgaaagattgcttgacaaggaaaaggcagagcttgacgataaggaaacctgggtccaattatcatcttccgttgcaatcaacttaagcagcgagcaatgcaatgacggccatgcggcacctcttgaagaggcccaagacttggcagaccttgcaaagaaatatggaaagggccttgaagcaatcatgtttgtaggagacggatatgatgaacttatcacaggctttacaaaggcaatcgaaatgggtgttgatgtatttgtaattgaagggggaccattcaacagatgcgaaaacaccaacgaaagctttgctaagacaattgcaatgagcagagtcttatgtcctggaaaagttgttgccacaaacggtgcatatgaaagtgaatgcagagcagggcttagatccggactaaatgttataattaccggttttcctaaaaaccatcacggatacatgtgcggtttcgagcctggaactgcaagaagaggcaagttcggcctcccaagagtaatcaagatcatgaatgaggaaataagtgcaggcccaacaagagttcctgtccaaagagaagagctattggcattgacccatgcagtcaagcttgcaggacctgaaaacatctatcctaagacaatcggatcatttgcaattggagacgcccattgggctacaatacaaaactctaaaatgtataaggaaatgtatcttccaaaaaccttagaggaaatagctgatagcgtaaatggcaattcagtttcattgcatggaggaagattcgtttcatggcttgttgcaaaagagctggataagaaaggaatcgatgagataataatcactgacagcaacccatgggtagagaaagtcagcgtagacaatcttcaagaggaattgaatgcaactatcatcagaggccatgcagatgataagggagctggaatgattgctaaggaatctattgtaaccactacaattcctaaaatccataatgcaattaaatccaagattcctcatgcagtaaatatcatctaa

SEQ ID NO: 525 - DNA, 1017 bp, Methanobrevibacter ruminantium
  source 1..1017: mol_type = genomic DNA
atgaaagtagcaattttaggtgctggctgttacagaactcacgcagctagtggaattacaaatttttctagagcttgtgaagtagcagacgcaaccggtaaagaaaacatttcaatgacccactctaccattgaaatgggtgcagaacttttagaattagcaggtgtagacgaagttgtagtagctgaccctgtatttgacggcgaattcactgtagtagaagactttgactatgcagaagtaatcgcagctcacaaagctggaaaccctgaagatgtaatgcctgcaatcagagcaaaagtaggagaattagctgaaaccgtacctaaaccagctaacggtgctatccacttcactcaccctgaagacttaggaatgaaatgtactactgacgaccgtgaagcagtagctgacgctgactggatcatgacctggttaccagaaggaggtatgcaacctgctatcatcgaaaaattcgctgatgtaattaaagacggtgcaatcgtaacctccgcatgtaccatcccaactcctggattaaaccaaatctttgaagacttaggcaaaaacgtaaacgtagcttcctaccacccaggtgcagtacctgaaatgaaaggtcaagtttacattgcagaaggatttgctgaccaagcagctatcgacaccttaaaagacttaggtgcaaaagcaagaggttccgcattcaccttacctgcaaacatggtaggtcctgtatgtgatatgtgttccgcagtaactgcaattacctacgctggtcttttatcctacagagacactgtaactcaaatcttaggtgcaccagcaggattcgctcaaatgatggctaacgaagcattaaccaacgtaaccaaattaatggctgatgaaggcattgacaaaatggatgatgctttaaaccctggcgcattattaggtactgctgactcaatgaacttcggtccattatctgaaattgtacctactatcttagaatctttagaaaaaagatccaaatag

SEQ ID NO: 526 - DNA, 1002 bp, Methanobrevibacter ruminantium
  source 1..1002: mol_type = genomic DNA
ttgatagaatctatcttggaaaaagctaaaaatagagaaaagttaagcagaaatgaattgatccaattatttgaaatagatgatgaggaaactttaaaggaattatgtaaaatagcttgcgatattcgcaatgaatgttctgatgtaattaaattaacatccactattcatcttacaaataaatgtcaagttcaacctagatgcaaatattgcggatttgctgctaagacttcatccattggatattatgacgctttttataagtctgatgaagagatacgccaagctgcaatgtgtgttgaaagatcaggcattcctagaataagctgttctggaggacatggatataaaggaaagcaagcagtaaatgctgcaaagatagttaagggagaaacctcccttgaaatattggttaatgtcggcgctgatttaactcaagaagcagtagacgaattgaagaaatatgatgctgatactgtttgctgcaatttagagacaaccaatgaagacgtttttaactttgtaaagcctggtgaaaagttatctgaccgcataaacatatgcagaatggtatcagatgcaggtattggattgtcttccggtctgttgattggcattggagaatcctatgaggatagggttgaccatctattattccttggaagctttgagagcttagaggagattcctataatgggatttaatccatatgttgacacccctatggaaaatcaccctccttgctctatcgaagagcagctaaagacaattgcaattacaaggatcatgtatcctcgcattagaataactgttccaacacctacaatcggtcctgagaatgttgagcttcctttgatggctggagcaaacaatttggcaacagtaatccctgaagactatcctttagtcgttaagggagttggaaatccagaatacggcaatttgcatgaggtgatttcagtagttgagaatttgggccttgaggttcagcttcatgcttaa

SEQ ID NO: 527 - DNA, 474 bp, Methanobrevibacter ruminantium
  source 1..474: mol_type = genomic DNA
atggcctttgaggaaagtattagaaaagcttctatccaatcttatgaaggaacacgtaagggagacactattgaagagattgaagcaatccagaactatattcgaaatgcaaagattgttgttcctaataagaatggcataaaagtagaggtaataaatgaggttctagctaaattcaatattcctcctgctgaatatctgcaggtaaatactaattatgctgatttcagtagaatgcctgcaattgcaaaggctatgatagctgtagatcagtcagatgcagatttggtcattgcaagaggtcgtttaggaatccctggctctggttcttttttggtttttatggacagcaaatccaggattttaactgcagccacttccccatcccatataattcataatcagccactcgaaaagactgtttataaggagacattagaggcgttaaagaaagtaggctttaaagaagaatga

SEQ ID NO: 528 - DNA, 408 bp, Methanobrevibacter ruminantium
  source 1..408: mol_type = genomic DNA
atgaataatcaagattacgatactggaataagttcagaggtttttacagtcaaatcaaatatcaaattaatagatatttttaatttgattttagaaaagaaagcaagggctgttatggacttatttgatagtctaacaaacaaggaaacaatacataatgaaagttccatcataattattggaacctattttacaggaatagccattgcgaaatatttatcatataatggttttaaaaatattactatagttgatatttatccccatttggaaggttttattgattctaacttgggagatcctattgatgtgaataaatcttctaaaggtaaatttaaagagaatatagaattttcatcagatttgggcttaataagaagtgctgatgttgtaattgacactacttga

SEQ ID NO: 529 - DNA, 441 bp, Methanobrevibacter ruminantium
  source 1..441: mol_type = genomic DNA
ttgggaggaatagatgaaagccaatcagaatcaatttacacaaaggtctttttaattgaagaccctatagctgaagacaatgatgacttattgaagaataaaaacaatatctattctcgcataagcctggtgaattcatataataagttcattcttaaaacagaaggtttaaacacaaaaacctctggaaccatgactttgacaatagatatcttaaggcaatcaatgaatgagatattgtcaagggaaggagttctttactgttcatctgaaatgaccttctttgaagagattgtttttaaggaaaatgacttggataagttctttgaattaatagggtctcctgtaattaaagtttcaactattgctccatttgactgtgaggaaattattaaatgctttattgacaaaatctattctgaaatcttgattaggtggtaa

SEQ ID NO: 530 - DNA, 729 bp, Methanobrevibacter ruminantium
  source 1..729: mol_type = genomic DNA
atgtatgcaaatgatatttttaatattatagatgaattggtgcctcgtaaattggcattgaagaatgataaattcggctattttggaaagactttcgacaatttcgatattaaaaatattaaagtcatattagatttattgccagaagatgacttgaaatttgataagggtgatttggttatttcccatcatcctcctctctttatgccaaagactccaacctatgttgtccattccaattgggatattgttcagggaggggcaaatgacgctttggcttattatttgggtttaaagcctatttctatttttcacaagcagacaggcataggccgaatctgctcttcaacaaagacattggatcagttcttagccttggtttgctataagttcggtcctgaaaatgttcgattggttcatgatggcgactttgataagatgcttaggaaaattgctatagtttccggatttggcttaagcaataaggaatttattaaattggctaaggacaggtccgtagatgcatttttatctggtgacttgaaccattcaaatgcgatttatgcgaaaaagctaggaattactttaatcgatgtttctcatcatattattgagattccggggctatttgccttaaaggaattgctaagacgaaatgaggatattactgttcctgtagaaatgattgacaatggagttccttggaaatatatttctgctgatttttag

SEQ ID NO: 531 - DNA, 645 bp, Methanobrevibacter ruminantium
  source 1..645: mol_type = genomic DNA
atgattcaagaaatggaaaatagtttaattccaaaaggaagtattgatttagtgggatttggaagattaggtttaagaacaggaatcaatcttatacaggttcacagaggaggtccagctaagataacagttattgatggacagaagatctctgaatctgatataatatttctattgaaaggagctaaagtcggcacttataaatctgactttttaaaggaaatttccacccattcaaaggattttagagaagttgtttcaatcactgaagacataacagaggataatattgatttaatcactggagatgtggttgtaattgaaatagctggaggaaataccgtacctactgcagcaaagataattaaaaaagctcatgaaaacggctcaaaaacaattggaactgcaggtatattcggaattggggatgaagagattgttgtagcagacatctctgaatttgatgattccaatcccgctattgaagagttaagaaaagaaggaatccttgataaccatttagttataagcactaataggtttattagggatggaattccaataactccttatgtattggatgatattgctaatatcattacaagagaggccttaaaattacttattgaaaagaataatgaatag

SEQ ID NO: 532 - DNA, 609 bp, Methanobrevibacter ruminantium
  source 1..609: mol_type = genomic DNA
atgattactatcgcaactgcagaatgttttacacatgggattttagctcgtgaaatacatgctctcgctcaggattatgatgatatttttgcatcttcctattggggtttggttaacaaagtccaaaaggattgcatcaaggatgcaattcttgaagataaatgttccatttttgatttaagggatttgagtgttagctgtggattgttcattcctacattggatgctgtaaaatctgttttaaagatagaaaatccgctagagcctttgacacttattgatggaattaaggtttatgacgatgatggcgatagggaaatggctatattgatggcagaggctgctaaaaaggtatctggttctgatattggaataggcacaactgcagggattggatatggtggcatagctattgtcgatgatgatattgtcattagcacaagttctgatgtttatgctgatttggtaaatgtggattccgatgatctttatatgcgtcaaagaagtggaatagaaaagactttaaaaatattgatttattatttaaacgataatttagacattattaatcaaatgaataatgtgaaaatatataataaatcagaataa

SEQ ID NO: 533 - DNA, 2169 bp, Methanobrevibacter ruminantium
  source 1..2169: mol_type = genomic DNA
atgatttttacaatagaatatgataaaggaactcgcttaagagtgagatgtggtaaagaagcatttaccaaagaggaatcctatggcttagctgaaaccttaatcgactatgacttcatagatgaagtaaaggtgtctcatagaaacggaagcattcttgtcttatacaatgatcctaaaaaaaggatagaaattcttagaatcatatcaaaaatcagccaagataatttatatgaaacaaaggcaagtgataaggctgctcttgaagagctgaatgacaagtttgcaataaaaattgcaaagcatattctcaaaagatacctctttaagatcatattgccaattcctttaaggaaattaagaatgctttatcatgcgtcatcctatatctggagagggctcgacagcctaacaagtttccgcgctgatgtggcccttcttgatggaacagcaattactgcatcattattgactaaaaactacaagtctgtagggtcaatgatgtttctcctatccatctctgaaatgttagaagactatacaatgcaaaagaccaaaagcacattaaaaagcagtctggccttaaacattgacagcgtatggaaagtggagattgatgatgagggaaatgaaatcgaaagccaattcccattaagcaagcttgaaaaaggagacaagataagaatcagaaccggcgcgatcattccagtcgatggagtcattgcagatggggatgcaatgatcaatgaagcctccatgactggagagtcattagctgttcataaggataatggcaaggctgtccatgcaggaaccgttgttgaagagggctcaatagtcattgaagtccgctccgttaacgatgagacaagattgaataagatcattgacatgattgaggattcagaggagctgaaggctggaattcaaagcaaagcagaaaagctagcagattcaattgtgccatacagcttagctgcaacagcactgacatacctcattacaagaaatgtgacaaaggcattatccgtattgatggtagacttctcctgtgcaatcaagctaacaacccctatttctgtcatctcagcaatgaaagaggcatcagacaataggataatggtaaaaggtggaaagcacctggaagcatatgcaaatgcagacaccattgtctttgataagactggaacattaaccaatgctcatccagtattggaaaaggtcattccttgtggaaaatatgatagagatgaggtcttaagaattgcagcatgcattgaagagcactttgcccatagtgtagccactgccattgtgaagcaagccgaaaaagaaggattgcaccatgaggaagaccatagtgaagtggaatacattgttgcacatggaatctcaactacttatgacggcaagaaagcaatcattggaagcaggcactttttagaagaggacgaaggaatcagatttaccaaaaagcaagaaaaacttattgaagaaaatgcagaagagtattctgtaatctatcttgcaataggtaaaaaacttcaaggaatcctttgcattgcagatcctgtaagagacgaagcccatgaagtaataagtcagcttaaggcattaggcattgaaaatgtagtgatgctaactggagacagcgaaaacgctgcaaaaagaatagccaaggatttaggcattacccggtataaatctcaagtgcttccagaggataaggcaagcattattcaagagattaaagccgaaggccatcaggtcattatggttggagatggaataaacgactctcctgcattatctgctgctgatgtgtcagtagctatgagaaactcatcagacattgcaagagaagttgcagatatttccctactttcagatgacctttatgacttggcaactcttagattgcttgcaacaggcatgcttgataagataaatacaaattacaggcatattgtcatgtttaatggatcactgattggacttggattgcttggagtcattccacctacaacaagctcattgcttcataacttatctacaatgctctttggatatagaagcactaagtctgttttaggtgaaaaagaagaagtcgttattgatacaaacgtaattaataatgatggtgctttgattggccaatcaggcaaataa

SEQ ID NO: 534 - DNA, 279 bp, Methanobrevibacter ruminantium
  source 1..279: mol_type = genomic DNA
atggtagacagacatgaaattgtagacaaaatgtatgaaaacaaacacactttacttttcgtaggaggaattgcaactgcaattgtaggggcaaaaattttaaaatcccaaaccactaaagattacgctgcaaaaggaatggctaaagttctaacttgcaaaagcgacttagaagaatccattcaagacattaaagacaatgcagaagacattcaaactgatgcaaaagctgctcaaaaagaagcaatctgtgtagatgtaactgaagaagaagaataa

SEQ ID NO: 535 - DNA, 234 bp, Methanobrevibacter ruminantium
  source 1..234: mol_type = genomic DNA
atgattaaaaaattaagcgaactcaaatctggagaacaaggcaccttatcttcttacggaactggcggagatttggaattgaaaagacatttgctcggtatgggcttcattaaaggagcagatattgaagtagaaaaagtagctcctcttggagatcctatgcaaattaaggtaaaaggatactctgtatgtcttagaaaagaagaagctaggaatatcgatgtagaagtataa

SEQ ID NO: 536 - DNA, 2016 bp, Methanobrevibacter ruminantium
  source 1..2016: mol_type = genomic DNA
atggcaaatctcaaaataggtttagcaggtaatcctaatgtaggtaaaaccaccctattcaataatttgaccggtttaaaccaacatgtaggtaactggcctggtaaaaccgtagcacaagcaaaaggttcctataaacatagtgggaacgaagttgaagtaattgatttacctggtaactatgctttaagtgctcattcaattgaggaaattgtatcaagagactttatcgtagatgaagactctgatgtaatcgtgaacattatagatgcagcaaacatagaaagaaacctgtatctgactgttcagatgatggagctcggagctaatttagtagttgcattgaatatgaataagtacgcccaagacaagggatatacaatcaatgcagataagctttctgaattattgggagttcctgttgttgaaattgaagcaaatagtgatataggtaaagagcaattgcttaaaactattgaacaagcagctgcaaacccggtagactcttctaaaaaattggtttataacaatgaacttaaagagcatctcgctgaattgcaggctgttatagaagaagacaaaaacttacttgatgttccttcatcttggattgcaatcaaattgcttgaaaatgatgaaatcgttgaagagaagattgaaggatcttcaaaaagaaacaatatagtaaatgaaactcaaaaggtcaaggaccacttgaaaggcatatttggagaaggcagtgaagaggtaatcgcaaatgcaagatatgcattcattgacggattattaaaagaatctctcaccaagccggaccatttgaaaaccactataagtgaaaaaatcgatagaatcgttacaaacaggatattgggcttcccgatattccttgttataatgtatgcaatgtttgaaatcgtatttactttcggcgcacctttccaagatttgattgacgaattctttggaatcttaggtgatgccataatcggctcccttggagaaacaatgctttcttcattcctagtcaatggacttatcggaggggttggcggagtattggtcttcttgcctcaaatcattctattgttcttaattattagtttccttgaagattgcggttatttagctagagctgcattcgttatggataaattaatgcataagtttgtaggattacatggtaaggcatttattcctatgcttttaggaatcggttgtggtgttccaggtattatggcaaccagaaccatggaaaacgaaaaggacagattgatcactatgctgattgttccattcatgtcctgttctgctagaatgcctgtatacttattgttagttggggcatttttcgcagctaatgaaagccttgtaatcttctcattatacttgcttggtatacttgtagcagtcattgttgcatttatattaagaaagactacatttaaagaaatggacgctccatttgtaatggaattacctgactataaattgcctacaatcagaggtatcataatgcacacccttgaaaaatcctggggattcattaaaaaggcaggtaccattattttggtagcaagtattgtaatctggatgttaagctatttccctgctggtgtggaatatggatctgcagatagtgcaatcggtactatcggtcaggtcattgcacctgtgtttgctcctttaggtttcggagaatggcaacctgctgtagccttattatttggtcttgttgctaaggaggttgttgtcggtaccttcagctcgctctttggagtggcagaggagggagccgagattgctgcagctatgcatggaatctttactcctctaaccgcttacgtattcatggtatttgtacttctatacattccgtgttttgcagcattgggggcaatcaagcaggaaaccggtggatggaaatatccattgctgatggctggattgactttagttgttgcatatgtggtagctttcatagtttatatgattggactaggtttgggattgggttaa

SEQ ID NO: 537 - DNA, 198 bp, Methanobrevibacter ruminantium
  source 1..198: mol_type = genomic DNA
atgcaatgtagtatgtgtggttacgagtttgatcctcttgaaggagggccttgtggtgcttgtggacagtgtaaaggctgtaataaggctttttgtccaagatgcggatatgggaattccctttctactgtaaaggaatttgattatatatccaaacttcaagcaaaattaagggcttttaaatcaaaagcaaaatag

SEQ ID NO: 538 - DNA, 627 bp, Methanobrevibacter ruminantium
  source 1..627: mol_type = genomic DNA
atgcatatacctgatggttttatacctctttggcaatgtgcgatctactatgtaatcttgattattgcattgtatttcgctggaaaatgggccaaagcaaatctagatgaaaaacgtataccacttcttgcagtattagctgcaggtatttttgcaattatgtctatgaacatgcctattccatttggtaccagtggccacatggtcggtggggcattagttgctattgtatttatggctcctgaagctgctgttcttgtattcactgcagtattgcttatacaagctttattcttcggagacggtggaattaccgctttaggtgcaaatgtatttaacatggctatcgttggaggatgtgtcggtctttacacctacaaaggattaaacggcatcattggaaaatatccttcaatattcttaggcgcatggcttgcaacattagttgcagctgttgtctgtgctcttgagatggctattgcaggaactttcccattgagtgtgggagtcgcttctatggcactttaccatgcattcattggtttaattgaaggagtattaacagttattgttatatttgctcttgaaaaatacagaccagatctattggcatggaatagagaatag

SEQ ID NO: 539 - DNA, 294 bp, Methanobrevibacter ruminantium
  source 1..294: mol_type = genomic DNA
atggaattaagtaaaagtgacaaatatttaatcgtagtagggattatattctgtcttgcattagcagtattatctccttacattgcatctggagacccagatggattagaaaaatcagcagaagatgcaaacgttggcgaagatgttgaagctccagtaatggaagctccattcccagactatacctatgagcctttagaaaaaataggtgaaatcggcgtattgattctaggcgcgctgataacacttattgttgcatggggtataggttatgcattgaaaagatctgaataa

SEQ ID NO: 540 - DNA, 831 bp, Methanobrevibacter ruminantium
  source 1..831: mol_type = genomic DNA
atggcaatagaagaagttagaaatttggaagtgatcgcttctaaggacactatcattcataatttggaaggtagggttaagcttattgccatcttattaataatcgttttctgtgttttttcagataggctaatagttccacttgtattggaaatattcttgctcattgtaatgtatctggctgaattgtcctttaaggacagctttaaaagaatagctcttcttttgccattcggtggttttgttatcgctttccagccattcatccaccctggaaatatcatttggcaaggtccttatccttggttgtttataacagacactggtttaaattggacagttctcttatttgctagattaatcgtctgtttgacagctattgtcatcctttcatctacctcaccaatgcaggaagttgttcaatcatttagaaagcttggaatgccaagagatcttgctatgattttaacaattatggtcagattcctatttatctttgtagatgaattaagggacatcagacagtcaatgaagtctagaaactttgatcctttcaataagaagattccgtataaatggagagtcaagcaggtgggatatagcatagcgatgatgtttttaaaggcatatgaaaagggagaaaccatttatttaagtatggccagcagatgcttctcagacaattccagattatatcatgccaagactataattggaaagcatgagtatatatttttagcttgtgttataggcattgtcattgttttagaactggttgtattgttctattctggcaatttggattatttaggcgtttctttatctttataa

SEQ ID NO: 541 - DNA, 1350 bp, Methanobrevibacter ruminantium
  source 1..1350: mol_type = genomic DNA
atgagcttaatatattctataactagcacaataactagaaatatagaaaaaatactaagagagtcccttttatttacaatcattttcaatatattggaatttattgaaaatcaatgggtcaacagttattttaagggcttataccctagcgaaagattcctatcaattgtaaataagagtaagatcttaaaggaagagatattttcaccccttattgttttagtcacattcactctttttatacttcttgcaactgatccggtcccaagggatttgcagaccactataatcattgcttttctaagcttttttattggtgcaataatatttccaagatttattttgaataatcaattaaatcaattaaatgatgaaactaataccgacaataaagaatcaaagactgataaaagcaagcaaattcccttatttaattcctacgatgtatattcaataggattctgccttagcttaattggaattgtctttttgtttttaagcattgcctccgttggagggctgccaatactaaagtcctcattaagatattcacttaagccagcatttacaatgcctgtatttttaataattccaggtatcggacttatggcttcacattatctaaaccagtacaagaataatgaaatcagccgcagccaaacaagattcagattcttggttttaactgcaattggaattggaactgtccttacactccaatatagaaccccaatcattgccattttacttatgatgattataataggatattatggtaaaatactatcagtttgggaggtcattttaggtgccctgcttggagtatgtgccatcattggaattggatatttaagatcattgaatgagcttgcaataagctcaaatacaaatatattctccaccttaaactcaagggcaaactttacaatgcatgtattgaacctactgaattatatttcagggaatttcggactaatgcatggaaagatgatagcaagcgccatgcctggaagcgatcttggacctagaatgatggtgggcaaactgatagcttggagaacagaggttactgtaacccctacattgctaggacagatgctagtggatttcggaaaacttggggttgcagtggagatgtgcctgcttggattccttttaggaactggatataaaatagttaaaatcactgaaaactctttttacatagccctttatggcttgattttaacctattccattgtaggtgttgaaactggaatattggacatacagattttagcttacttctttataagtgcttttatctattttgcagttatattaaaagataaaggcataagaatctattaa

SEQ ID NO: 542 - DNA, 792 bp, Methanobrevibacter ruminantium
  source 1..792: mol_type = genomic DNA
atgaaaaaaccagggattttaaataaaattacaattattgacattctaataataatttgtatcattggagcagtgggattcgcagtttaccatatggttgatgatgactcaacaaaggcttcagctacctcctttgactattcaacaaacaataagatgcttgaaacatatatgaattattataaagatggaaaaatagttacaagcagccttattggaactaaatcaaacaccggcgaaaagattgaaatgaacggcacagtcctatggcttggagacaatcaaaacgataaggtaaacattgaaattaacaatgacggcaagcctatactcgctggtttctacaaagacacaccaaatgcagatgtctttattgaacagataagcctagagacaaatggagacagctatgcaaacattacagactttgtagtcagtcctaaagagattaagaatctaaaggaaataatatctaaaattcctaatgatacagaatatgaaatcagtacaagcatcgctatagatgacctagatagcgttactgctcaaaaattagcaaatgcattaaataaaaataagaaaccttgcattgtcttaaagaatagtggaacagtcatacttgaagtcaatagagccaatcagactgattttgaaatagctgacaatgtattaggagactttaaaggacagacaagcgagatacaaattagaatctataattctacagcacaagattccatagacattcaaaatgcatttaatgttttaagcattgctaatacaagtcattaa

SEQ ID NO: 543 - DNA, 162 bp, Methanobrevibacter ruminantium
  source 1..162: mol_type = genomic DNA
gtgattgatttagacgaatgcggagtatgtgaaaaatgcatacctgtctgtcctaaggaactaattgaaaaaaaaggatatacaatgattataaaagatggctgcgatgactgtggcatatgcttggatatgtgtcctttaggagccatctatgaggaatag

SEQ ID NO: 544 - DNA, 984 bp, Methanobrevibacter ruminantium
  source 1..984: mol_type = genomic DNA
atggcaggacttatctctggaattgttgctttgttcacctcttggctaggtgtctctggaacagtcatagggtctgttttcagctcatttctttatcaattcctttcatcctactctgctgagaagtatgaggagcgagttggggaaggaacttcaagaaagcctagaaacattggcagcgaaatagtctatatatttccaatagtggtcatagttataatagaagtgatcttcatactctctgacatgcattatgtatttgataagatctttgacattcttgagtatgggatattccagaacaatctatttaggttaatgggtcttggtcttattgctttaggggtttatccattgttaagctcaactaacattgaaaagatcaatggtgaaatcgttttagttgcaggaatatatctcttcatcagaggaatggtggatataaatgacttgaccatgcaagtgcataacatgttctttgctgattttgacttttttattgcaataatagttgttttagcccttgtatttgtaattttcaatgttttaagaaattctacacaggaatactttaataaggaagatggagattatgatgcagtgaatgatgagttcactcaaaaaagattctctaagcctagaagaaaatcaaaagctcgcaagattgacaccagttccttccataagggccaagagtataaagagcattatctaaacagtgattttaatgataagggtcataatcagagtcctaaccctgattccaatatggatgattatcataatgatgatttaaataattatcaaactcctcaagaggatttacctatctatgaagaggagattatttatctccataatccggaggatcctaataatccaataaagaaaagaatcttaaaaagagtcaatcctgattctcattatgatgatgactatgatgagacttatataattgatgatgccaaaaacgacaatttttaa

SEQ ID NO: 545 - DNA, 318 bp, Methanobrevibacter ruminantium
  source 1..318: mol_type = genomic DNA
atgagattttgtcctaaatgtggtaaaatgctaatgcctaaaaatgatattcttaaatgtgcttgcggatatgaggaaaagatatctgcagaagtagctgaaagggagtataaattcaaaggcgagagaaaaaaagagaataaggttattgttacagacaataataacattgcattgcctaccacaaagataacctgctataaatgcggaggcactaaaggggtttggtggacagttcagacaagatctgctgatgaagcccccacttattttatcagatgcgtaaaatgcggaaacacttggagaaggtctaactga

SEQ ID NO: 546 - DNA, 894 bp, Methanobrevibacter ruminantium
  source 1..894: mol_type = genomic DNA
atgacaacgaatgataaagtatctgattatattagctttcctaagacctttgaaagctataggtggtacaagccgatacttgtttttataataagttttataataactcttatactcggagcactgatagtggcggttttttatctgataatgggtcctgattttataatatccattttcaaagggggagctgaatcattaaacacttcaatgaacatattcttcaccgatctgattattattgcattcattccttcattgtatattgcatcaaagattgttaaggacaggcccttttcctcctattcatcttcacgagggggatggaacttcagactctactttaaggcattggcaattcctgtaatattgtatataatatatttgggggcagaatctctcattttaggatcagaaggcacatctcatttctcaatagcctttcttgctgtgcttttgatttccgtgcctctccaatgtattgcagaggaatatatatttcgtgggattatcatgcaaacattagggtcatggattgggatacctcttatagccatagttattcaagccataatatttactttgggccatggatatgacgccctaggactccttgaaacattggttttaggtattgcctatggattttttgcctggaaaacaaatgggatagagataagttcagcccttcatactgcgaataatttttctcttggcttattcatcatgcttggactggaagcatcaaattcctctttccaattatatgataagataggaggaattgtctatttaataatattatgtataataatgtattatgttggcaagaaaactgattggtttggtgaaatcccagaagactctcaaaatataggattattaaatttttaa

SEQ ID NO: 547 - DNA, 522 bp, Methanobrevibacter ruminantium
  source 1..522: mol_type = genomic DNA
atgattgaaattcgctttcacggacgtggaggacaaggtgctgtaactgcagcagaaattttggctaaagcagcatttaaagatggtaaatactctcaagcgttcccattcttcggtgtagaaagaaggggagctcctgttatggcatttaccagaatcgatacagagcctatcaacctaagatatcaggtatacaatcctgaccatgtgatagttcttgacgacggtctcttaaatgttgtggacgtctattccggattaaaagaaaatggtgaagtaattataaacactcatgaaaaagtcgaatctgaaagtcacaaggtatttgatgttgatgctacaggcatcgcattggaaattttaggtgtaaacatcgttaacaccattattttaggatactttgctaaaaagactggtgaagtaagtattaattcacttattgaagtaataaaggaaactttcccaggtccaattggagagaaaaacgcagtggcagctcaaaaggcttatgatatggcttag

SEQ ID NO: 548 - DNA, 243 bp, Methanobrevibacter ruminantium
  source 1..243: mol_type = genomic DNA
atggtttctattggatgtgcaatttatgaacctggaagtacacgtaagaacaagacagggagttggagaacttttaagccaatccttgataaagacgcttgtgtagattgcaataactgtctcatgttctgtcctgaaggatgcgtaaacaaggagcatgacattgattacgattattgtaaaggttgcggtatttgtaaagtagaatgcccagttcaagctattaaaatggaaatagaatag

SEQ ID NO: 549 - DNA, 1149 bp, Methanobrevibacter ruminantium
  source 1..1149: mol_type = genomic DNA
atggcaaaagaaattatgacaacaaatagagcagttgcagaagctgtaaagttagcaaaaccacaagttgttcctgtttaccctattactcctcaaactacaatatccgaataccttgcacagtttgttgcagacggcgatttggatgctgagtatattagagttgaatctgaacacagtgcgattagtgctactttaggagcttccgaagcgggagtaagagtattcaccgctacttcatctcaaggattaatgcttatgcatgagatattgtttgcagctgcaggtatgagagctccaatagtaatggcagatgcaaacagggcaatttctgctccattaaacatttggaacgatcaacaagactccatcgcacaaagggatgcaggatggatacagctttatgtggaaaatgctcaagaggcattcgacactgtgcttcaagcatatagaattgcagagcatgaagaggtcatgcttccagtaatggtatgtttagacggatttattttaacacacactgtcgagccagtagatttattggaacaagctgatgtggatacattcctcgaaccatacgtacctaagtttgcatttttagaccctgaaaaaccaatgtcattaggtaactttgcagaccctgaatattatacagaagcaagacatgacatgcaagtggctatggacaagtccatggatgtaatcaaggaagtaggtgcggaattcggtgaaaaattcggaaggacctacggcttgactgaaccttacctttgtgacgatgcagagatcatattggtctgtatgggttcaatggcaagtacagtaagatatgtggtagataatttaagagaaaaaggcgaaaaagtaggtctcttaaaaataagggcttacagaccattcccattcgaggaaattgacgaaattgtcaaaaatgctgataaattagctgtgcttgacaagaacttctcatttggtattggaggagcgctttttgcagacttgaaagccaaatgccacaaggaaacctatggtttcattttaggattaggtggaagagacgtaattcctgaatacattgaagaagctgtcgaattaactaaaaatccagtaaaagaagttacttggttaggcttaaaggaggatgaataa

SEQ ID NO: 550 - DNA, 867 bp, Methanobrevibacter ruminantium
  source 1..867: mol_type = genomic DNA
atggaatttcctgaagaagaattattggcaccaggtcacagaggctgtgctggttgcggagcagctatcgctgtaagacttgctcttaaggcattaggcaagaatactgtggttgcttgtgcaactggttgtttggatgttatgacatccccttatcctgaaacagcatgggaagtcccatggattcatgttgcttttgaaaatgcaggggcagtggcttccggtgtggaaagagcattgaaagctcaaggaaaggaagatgtaaatgttgttgctttcggtggtgacggaggtactgcagatattggtatccaatcattatccggtgcaatggaaagaggtcacgacttaacttatatctgttacgataacgaagcttatatgaatacaggtattcaaagaagcggagctacaccttatggtgcatcaacaaccacttcaccagcaggtaagcaaagcttcggtgaagacaagcctaagaagaacatggctttcattatggcagctcatggaattccatatgtggctactgcatcaatttcctatcctgaagactttatgaaaaaggttaaaaaggcagctgaaaccaaaggtccagcttacattcacttgcaacagccatgtaccactggatggggattcaagcctgagcaaaccattcaattaggcagacttgctgttgaaaccggtgcttggggattatttgaaattgaaaacggtgaattcagagtgacttacaggcctcaagaaagaaaacctgttaaggaatacttatccgctcaaaaaagattcaaacatcttgatgatgaacaaattgcaattatacaagaattcgttgacaaccaatgtgaagaattaggtatctaa

SEQ ID NO: 551 - DNA, 501 bp, Methanobrevibacter ruminantium
  source 1..501: mol_type = genomic DNA
ttggagaaattaatagtagataatgaattatgtgatggatgccaggattgtgaaaaagcatgtgcaggagtccatggagttcctagaatcactattcatgaattagacggttcttatttccctattcgttgtcaacaatgtgaggacgctccttgtgaaatcatctgtccaaccggtgcaatgagcaatctgggagtggatgttaccaagtgcatagcctgcggattctgtgcaatggcatgtcctttcggtgcaatcagcattcaatacagcaacgctcataagtgcaatcactgtgcagatagagaggaaggtcctgcatgtgttcgcgcctgttccaaaagggcaattgcagtccatgacattgcaaatgtcatcaaaaggaaacaaagggaacacattgaaaagatgtatggcttagacaagcctgctaaaaagaaaggtcttctcagtgtaattacaactgatacaagggctagaaagccattggatggagaatag

SEQ ID NO: 552 - DNA, 429 bp, Methanobrevibacter ruminantium
  source 1..429: mol_type = genomic DNA
atggatgaattaaaagtcaacccagaattatgtgtagattgcggactttgcgaacgtaattgtcctaacaatgcaattcgtgttcatgatggagtccctttattctgtatgcattgcagtcctgaaaaagcaccttgtcttgctgtttgccctaaaggagctatagttgccctaggcggagcaatcacaattaagcaggataaatgtatcggctgtggattatgtcatagcgtatgtcccattggggctgttaccatcaatgagataggtcaagccacaaaatgtgatctttgcgcagactatgacacccaacagtgcgttgaagcctgtccgacccatgctcttacaaatgatacagaaaagataattcatgataaacaggaaaaaatatccgaaggatttaagaaggttcaaactcttttgaaatag

SEQ ID NO: 553 - DNA, 435 bp, Methanobrevibacter ruminantium
  source 1..435: mol_type = genomic DNA
atgactttcatgaataatggtgcaaatataaaacagttccaattgctcaaattcataaatgagaattgcaatgatgatcatgtgatatccaaaatttcaattgtgcttcgcagggataagatagaggctccctattatatgaatactaaaattagattatctacatgtatggatggggaagaaaagggagttattcatgcaatggacattttaaaccatagcaggaagcataatctctgtgaatataaatatgatgaaatcaaatcactaatctttgacttattcgatagcgaccataagtccgaccaggtggaattctctcaaaatgacaatcgattgaagatatcttttatgtctaagaatgatgaggagttcaggaatcttttcgaaaattatcatgaactttttgaaaagatagatggtctggttgattag

SEQ ID NO: 554 - DNA, 255 bp, Methanobrevibacter ruminantium
  source 1..255: mol_type = genomic DNA
atgtcagatccattgattataaaaaaagaattattatttaatgaatataccgggcatgaagatggaaattgtttagaatgggttgatggtcgactaagcaatagtgatgaccatcatagaattccatgcaatcttgaagatgcttttgaaatagcaaaaaaacaaaaagccgtgcttgtaattcaacctgaatttcaggaacaatgcatatttgcagactttacaggtgaagaaattgatgaaaattgggattga

SEQ ID NO: 555 - DNA, 840 bp, Methanobrevibacter ruminantium
  source 1..840: mol_type = genomic DNA
atgataacagaaaaacagattgaagatactatttatcaattatacaaacaggcagctatcgtccttggagatgatgttaaatctgcacttgaagatgcattaaaacgtgaggatagtgagcttggtcagctaaatattaaagctatcttaaagaatattgaacttgctgaagaaaagtcaattccgatgtgtcaggatacagggctacctataatttttgtaaagcttggtaatgttcaagtggaaaacctttatgagggaataagaaaaggtgttgcaagagcaactgaagaggtgcctctcagaccaaatgtggtggatccaatcacaagggttaactctggcaatgtgggagataaagtgcctattgtggatatagagcttatagatgaagactacattgaatttacaatcatgcctaagggatttggctctgaaaacaataatgcccttaagatggcacttccagctgaaggaatagaaggtgttaaggactttgttgtggagaccgctcttaaggctggaggcaagccatgccctcctatagttgtaggtgttggaatcggcggaagctctgatatggctttgaaattaggaaagaaggctcttcttggaaaagttggagagcgtaatggcgacccaacattggcagaggtcgagcttgaatgcttgaatagaataaacaaggatggaaaaggtcctatgggtcttggcggaagaaccactgcattggatgtgaagattctaaagatggacactcatacagcagggcttcctattggcgtagtcattcaatgctgggcagatagacatgctacagctcgtttgagagatgattaa

SEQ ID NO: 556 - DNA, 1590 bp, Methanobrevibacter ruminantium
  source 1..1590: mol_type = genomic DNA
atgatacttattataaccggacacttggcctatcccttggtaaaggagatggcggataaatcaaaaaaggaaactgtagttcatatagcagagactcaagtggctgcttttttaactcctaatcaaattataaaggaaatccacgagtattttgaagacagattagatgatattgatttgatattggttccaggtttaataagaaaagacacattcctgattgctgaggaatttggaattccttgttataaggcatctacagatgcagcagaccttgctatggtcttggaccttgtggatgagctggaactgtcccagtcaacacctgctgataagcttatcatagaagagaagaagaagcaggccttgaagttcattgaagactttgaaaaagacatggaaaagagggaggaactacttaaaaaagagaacaatattcttgtcaggaaccttcctgttggtgaggatttcccaatgagggtattgtctgagatagcaagtgcccctatattgtcaaaagaggatttgattaaaaaggccgaattctttgtcgcttcaggctctgacatgatagacatcggtatgattgcaggtgaggacaggtctgatgagattcccgatttgattgatacattgaggccaattgtgggagacaggcctttaagtatagatacattgaatcctaaggagattgaagctgctgtaaaccatgggattgacatgatcttgagtttagacaatggtaattaccatgagattttgcctttgctcaaggaaaagaatgttcctgcagttattttgcctacaaacttctctgaaggctatgtgccacacagtcccgcggatagggtggcatctatgcaaaagcttgtggaagcttgtgatggacttgaagttgtctgtgaccttatattggacccagtcaacagtgcaagtcttgtggattcaataatagcattccatgatttccatgaggtggataagaagccgatgttctttggaataggaaatgtgattgagcttatggatacagattctgtaggggccaatgcagttcttgcaggtattgctatggaacttggagcaagcattctattcactccagaggagagcggaaagactcatggaagcgtaagagaattggcaattgcatctaagatgatgtttttagctaaaaacaggcaatccattcctaaggatttgggagttgaccttcttgtattcaaggacaagaagaaaaggtttgacttgaagcaggatgacaacgttcctatagtaaagcaggatcgaccgatcaagtttgtacgggataaggcaggaagctttaagataagggttgaacatggaattagcgtaaaggattcctatattgtggcaactcacttcaagaagacaaagccaaccataagctttgaaggaaaaacagcaagtgaaatctatgaagagatcattgaaaaagggcttgtgaccagattggaccatgcggcatatcttggtaaggaacttgaaaaggcagaaatagctatgcttaccggaaaagagtatgttcaagactttgacttgtttaaggatcctgaagagtttatttaa

SEQ ID NO: 557 - DNA, 357 bp, Methanobrevibacter ruminantium
  source 1..357: mol_type = genomic DNA
atgaatataaatggtgatttgatgaataaaaaaattactgtagacatattaatgttcatagcaataatagtggaatttctaagcctgcctattctaattcatgaaatagttggagtgggattattgtttttaattgcattacacttaaaatataacaaaaggtattttaaaacaataggcaaaggaaaatataaccttaaaagaactctaaatcttatcataaacataggattgcttgcttccttattgataaccataatttcaggaatcttctctagccaaaagtcattaaaaggcatgaagataggaaatcacaaaatttcacatattcataaatcatcttcatatttagtctaa

SEQ ID NO: 558 - DNA, 1161 bp, Methanobrevibacter ruminantium
  source 1..1161: mol_type = genomic DNA
atgaacgccaatccaaaaatacttctttacattctaatgatttcagcccttggaataaacactccattaagcattgtcggaatcatctcacaaatagcagagtatttcaatacatcaatagccatttcaggactctatgtaagctcatttacatttaccatagccatatgcggattgttcatacctgttttattttcaaaatacaatcgaaaaagaacctttgtaagcattttaacagtgtttgcaatatcaaacattgcaataatctttacaaaaagcatttacattgcctctttctttagaatattatcagccatattttatccggcattcatatcaatagcccttacagtttgcgaagaaatagccccaaaaggagaagaacaagattatattacaaaaattctgcttggaatatcaatcggaagcattgtaggccttcctataacaacaggccttggaacaatattcaattatcaagttgcaatgtcatggatctttgcaatcaatctattatccttaatattgataatcatattcttcccaaaaatcaaaggcaaggctaaaagttatgaaatgccattttccagtcttaaatcaaaggaattccttcttgctacaattggaataatgatgatgccaataggagcaagcatagtatataattaccagccatacttcctgcaggtagtcagccatgtctacacatataaactaagcatattcctattcatttatggactgttctcaatatttggaacttggcttggaggaaagttaatagctaaaagagacaaagcaaccattctcattttccaattaatatgtggaggagtgtttgtactcctttatctatttgcaaattatctgattccagtcctaatattgattctaatatttggaatcttagacggaatgggctacaatctcatccaatacattgaaagttcagtaatcccagacagcccagaacttgcaaacggagtgtttttaagcattttaaatggaggaatagctcttggaatagccataggaggattcttggtagacggatttggaataatgtccatctttattttcggagcactgttcttgctgcttgcattcatcatcctttattacattattggaataatgaaaatgcctctgaaatactcttaa

SEQ ID NO: 559 - DNA, 873 bp, Methanobrevibacter ruminantium
  source 1..873: mol_type = genomic DNA
atgacagatgaagaattaaccattgaagaaatagagaaaaaacttgaaagtactggatatatctcaaataaggagatcagcacttctgtatttttatctttatctttaaataagcctatattgattgaaggacctcctggagttggaaagaccgagcttgcaaaggctttggctcaatctttagaaagagacttcttcaggattcagtgctatgaaggaattacctttgagcagatcgttggagaatggaactatcaaaagcaattgctccatcttgaagcattcaagggaagcaagaaaggggaagattcaatcttcgaagaggatttctttataagaaggccccttctaacctctttcatgaatgagaagccatcacttcttctaattgacgagatcgataaggcagatgaagaggttgagagctttctgcttcaggctttaggtgaaaagcagattactgtaaatgacttaggtacctttgaccttcagaatgacttggttgtgatgctcacttcaaatgcccaaaggaatctccttgaggagactaaggacagatgtcttttcttatatatctcttatccttcagttgaacgtgaaatggctattgtaaaagccagattgccaaatgcagaagatggcttggttaaaaaggttgttaatatggttcatagaatcagaacttttaacctaaataagaaaccctctgtaagagcttcaatcgattgggtaaactctgtaatgcatttggataaggattataagaatgtggatgccgcactggaggacagtgttggggtagccattaagacagagcctgacaaggcaaaggtcgttaaagagatatttagaaatgaatacatgaatgactaa

SEQ ID NO: 560 - DNA, 1161 bp, Methanobrevibacter ruminantium
  source 1..1161: mol_type = genomic DNA
atgacagaaagaatcgtaagattatcaaatgacttgagaaaaaagggaatgcctgtaagcatcaggtccactcagactgcaatagatgcatatgctcttcttggggaagatgatttgcctactttaaaggatgcattccgctcaatttatgtcaaaagcaaatatgacattcctaaattcaatgagtcatttgacggtttcttcactaaaaagcaggttaaaaacctaaccgatgagcttaataaatccagcaggccaaacagcatgaaaggaaagctttcccagcatgaatggaaaatcaccaaacaaaagggtaaaggaggaaagcagattcagatgggtgctgagcaggctatggaatactttgcaggaagacctgttcttgaagacagggacaaggaccttgcaagggacaatgacattctaaacagtgacctatcaaagctgaacaagtacgatgagcgtgtatttgaattatgtgtagagcttggaagaaagattgcaaacaagcagtcaagaagaaagagactggctcgttccaataagattgatatgagaaggaccatgaggcagaacatgaagtatggaggggtcccgattgaccttgtccatgtcaagaagaagcctcatagaaagcagcatctcttccttaatgatgtaagcggttcctgcgaatggatcagcagctggtttttcatgctgatgtttgcatgccaaaagacatttaaagactcaagaatgtttgaatttgataacaggacaatagaaactactgaatttcttaaagaaaagtatatggttaatgcttttgcagaaatcagattgctacgtatgagaaatatgatggttagaggaacttccaatatgtacactgcattccagtcatttatgaaacaggctgacattagcaataagtcttatattattctcctttcagattgcagagattgggctggccctaaggttgatggggttcctgcaagtgtagagcttgtttcccaaatgtctagcatggctaaaaagcttgttatcctaaaccctgaggacaagaagaagtgggatgttgtagacagctgcgtttctttatacaggggagcaggtgcacaggtttatgaagttagcactttaaatcagttggctgagtttgttgcagatatgtaa

SEQ ID NO: 561 - DNA, 918 bp, Methanobrevibacter ruminantium
  source 1..918: mol_type = genomic DNA
atgcaatcttgtactaaatgtggaaatccaaagattattataaaaaaaccggcttctggacaggccttatgtaaggactgtttcatagaaagcattgagaaaaaagttcgccaaaccataaagcgtgaaaactttattgataggggagataaggttttagtagcattatccggaggaaaggatagtgtagtaacccttgatattcttaattcctatcgtgaaaggcatatcatagatttatgtgccgtaaccattgacgaaggaattgcaggataccgtgaagatggagttgaaattgccaaggcacatgcagagagacttggaattccacataaggtagtgtcatttaaggaaagttttggaattgatttggatgaaatcatggccaaagaaaaccacagaggatcatgtacctattgcggtgtattcaggcgatggataatcaatagggctgcaagggactttggagcaactaaaatagcaacaggccataatctggatgatgagactcaagctatcttaatgaattatcttgaggggaatactgaaaaccttgctaagattggtcctaagacagaatctaatgatgaattgtttacagttaagataaagccacttagggaaattccagaaaaggaaataggtctttatgctattgcaaaaggattggatattcaccttgcaggctgtccatatgcagaggagtcattcagaatggaaatttccaatattctaaaagacctaacaaaggatcatcctaccataatgtattcaacccttcggggatttgataagatgagaccagccattaaggaagagtttaaatccaattttgtttacaaaagatgtgaacgttgtggagagccttcttccaatagattatgcagggcctgtaccttcttggaagaattggattaa

SEQ ID NO: 562 - DNA, 201 bp, Methanobrevibacter ruminantium
  source 1..201: mol_type = genomic DNA
atgagttttaagttaaaaatcaaggataatgttgaagagagagaaatagatggagagttaacaattaaaaaattattggatgatttggatttatctagtgagactatggtaactaaaaagaatggtgaaatagttattgaagaggaaacaattgaagatggtgatgaaatcgagtttattcaaatcatttacggaggataa

SEQ ID NO: 563 - DNA, 720 bp, Methanobrevibacter ruminantium
  source 1..720: mol_type = genomic DNA
ttgtcttcaaatgctacaggaacaaggattcatcagtacatcaaaaaggaaactggctgttatgatccatatttttatcaaaagaaagagggaaatgaaattgcattgtctctaatgccaatggttagggaaatattaaaggaagataatgacttggaaacctatgttaagatagccattgtagggaatattcttgatttcggcacttttgatttggatacagactttgaatcattgatttttgaaggattgaagaaagaattggtcataaataaaatagatgaatttgaagaagccttaaagaaatatgataatgttctttatttggtggataatacaggagaaatagtctttgataagcttcttattgaaaagataaaggaatatgatgtggatattacagtggcagtaaaggaaaggcctatattgaatgatgcctgcatggaagaagcattagaggctggacttgatgagattgccgatttaatcactacaggctctgactctgtaggcgttgtcgaatccatgatatcagatgagtttaaggaaattctattggattctccttttgtaatctcaaaaggaatgggaaattatgagggattgactgaaatggatcttgacggacaggatgtctttgtattgttctgcactaaatgcaatgctatctcaaaagatttaggacttcctgaaggatctcatatcctctctaaattataa

SEQ ID NO: 564 - DNA, 825 bp, Methanobrevibacter ruminantium
  source 1..825: mol_type = genomic DNA
atgaaattcggatttattggttttggtgaagtctcatataccttatcaaaattgcttttagcattggattttgagattttaagttctatcgaaggacgttcccaaaaaactatagacttaattaattctttagatttaacccttttagatagttttaaagatgttgcaaaagagtctgatgtattgatttctgcaaacagtccagatattgctttagatattgcaaaaaactatggcaatttaacaaatggatttttccttgatttcaataatatttcaccaaaaactgtttttgaaattgaagatattttatccgatgacaagtttattgattctgcaatcattggcagggtaaattcggatgaattgaacatatatctatctggaagcaaggcacaattccttttagataaaataaaaaaagaaattggttctaaaggtattgatattaataaaatggactttaaaattaatgtaaaacttatcagtgataaaattggtgatgtttctaaattaaagatgcttaggtcttcatatacaaaaggagtgtctgctcttttagtggaaagctttgaattggcagaaaagttagatttggaagaggaattatgggagattctttcactaactgaaaatagagattttgaaagatcttccaagtcaagaatcgatagttcaaaaaaagcttctaaaagaagatatgaagaattagtagaagttttatactttttagataatgtagataatgtagatgagtctaaaatcatggctcgagccacaaaagacaagtttgaatatttgaaaaatagggaaaataaagaataa

SEQ ID NO: 565 - DNA, 1299 bp, Methanobrevibacter ruminantium
  source 1..1299: mol_type = genomic DNA
atgatagctataagtgcagattttgatccagtccataagggacatgaacaactaataaaaaaaggaaaggaaatagctgaagagaagaattcaaagctagtcatttaccttaataaaggatatagtgcaaatcatgccccattttttactccatttgatgcaagatgcagaatggcaaaggcattaggggcagatgaggtcgtaggggttgaaggactgcaccacagactcattttatcttatagtgtgccgattaggctagctcaaatgcatgaggatggagttaccgattatataactgcagcagacattagcttagaagagattaaaaactatgcagagcgttttatcaatgaaggaagctttcttggaattccacaggactttccaagccgcaatgtaatacgttggtatgcaatcaatgagtttctatcaaagaaattcaacagaaagatagattttcatcttattccagaagtgagctctccaaaaaagatttcaggaagatttatcagaaaagagatactcaataacaatctgaccatttcaaaggaaataagggaattgcttcctaaaacaagtatagaaatactggaagaggagatagaaaagggaaatgttcctggaaaaaggaacatgaaagtgcttaagcataagatgaacacttattcaaggtcaaatctgacaaatattgcatacttgaacggaaaggtaatcaataggatagtggaagggagattctataaggaagatgacgaatccatctgggcaagcttcagaagggcagattacggtccagtcatgacccgtcttgctgcaagctgcatagaggaggaagtcactaaagatgaagtcctaaagctgatgagacattatgaatcaaaaggagtaatccctccggaacaaaatgtggataaaatcattgaaagggcttggtatgttgctttggaagttgataagggagttccagccaaagaagcaaatgagaagtttagaaagaaagaaaacttgaaattgaatcctatgctaagccttgaagcaggattgaatcttacaaaattcgaagcaaaaaagattcatgaaggaattgaagcaaagatctttgtggataaggacaataagatatcctgtgagattaaggataagaagataaaagtaaaaaccgctttaaagttgccatcaatggaagtgacttatcttagatacatattggactcaaggtatattccagtaagcggagagcttattaaaaataagagaaatgattttagagttaaaataactattcatgattattaa

SEQ ID NO: 566 - DNA, 474 bp, Methanobrevibacter ruminantium
  source 1..474: mol_type = genomic DNA
atgagcataattgcaatttttctaggaataatagtcattgcattccctcttttaggaattattgcagcatctgatattcttggactatcagtcttattgctttcaattttcttgctcttaaacggaatatctgaagtggaatataacactacaaaagggcttttaaataccattattggactgataatgttggttgtaagcttaggattgatattcaacccaagcatattttcattcttaaccgctataaccatatatctagcaggaattttcttgataatcattggattggttgtgattgttggaaacagggaaaataagtataaattctggatgggaattattggaattatcttaggtgtaatctatataattcttggaacttatatccacaattcatttgttctcggttcattgattggaatatggctagtggctactggtatattaaacttattaagtgacggttattaa

SEQ ID NO: 567 - DNA, 1089 bp, Methanobrevibacter ruminantium
  source 1..1089: mol_type = genomic DNA
atggaaattagagaattaacaaaggaaatcagagacagatctatagaatatgcaaagccaaaggacttggataacttatctgccagctggtatcaagaggacctattatattcaggaaagggaaagacaatattccttattctacctactcccggatgctcttgggctcttggaccaagcggaggatgcacaatgtgcagctacatctcagactgctatctaaagccaatagaaacttccaaaataatcgagctctttgaaatggaactgggcaaatgggattttgctgaagactataaaaatggagagaagattgcaataaagctatttgcatctggaagctttttaaacccagaagaacttccaaaggaagctagaaattacatccttcaaagattggcagacctggatgaaataagcgagatagtcgtagagtccagacccgaatatgtaaaaaaagagataatcgatgaaatatttgaaataatcggcgacaagctatttgaaataagcataggccttgaaacttcaaatgaagaaaccagattaaacaagattaataaaggatttaacaataaaagctttgaaagggcaattgacaccattaagcagtcaaaagaaagctatgacataaagtcaaaagcatatatctttgttaagcctattctcttatctgaaagtgaagccatcgaagaagcaattgaaactgcaagctactgcgaaagcattggagttgatagggtttcatgctgtcctgcaacaatccatagaggaacacttattgaaagactatggagaagaggctcatacaatcctccttggatctggtcaacagttgaagtgataaatagaatcagagaaaatgtgaatattccggcacttatggacacctctggattcggctcaagaagaggcccatacaattgcaagaagtgcaataaagagctaaaacataagataattgattcaaacttcgaccaaagccaaatagaacatgattgcaattgcaagagtgaatggattgctgaagtcaagttctctaatttaaacaggtcaaaaactcaaaccaaacatttgcctttatattaa

SEQ ID NO: 568 - DNA, 957 bp, Methanobrevibacter ruminantium
  source 1..957: mol_type = genomic DNA
atgaaatttggtatagaattcgtacctcaaataccattagatgaactcgtaagattagtaaaaatagcagaagacgtcggttttgaatacgcatggatcactgaccactacaacaacaaaaacgtatacgaaaccttagcattaattgcagcaaacactgaaaccattaaaatgggtcctggtgtaaccaacccatacgtaagaagtcctgcaatttccgcttccgcaattgctactattgacgaaatctctaacggtagagcaactttcggtattggtcctggtgacaaagcaacctttgacgcattaggtattgcatgggaaaaacctgtatccacaattaaagcagcaatcgcagacattaccaccttattagacggtggaaaaaccgaagctggagcagctttaggtggagctaaaaaagtacaagacgcaatccctatttacatgggtgcacaaggtccaaaaatgttagaaactgctggtgaaatcgctgacggtgtattaattaacgcttccaaccctaaagattatgaagctgctatgcctatgattaaaaaaggaattggcgaccaagataaagatttcgatgtagctgcatacactgctacttccattggtactgactctgaagctgctaaaaacgcagctaaaatcgtagttgcatttattgcagcaggttcaccacctccagtaattgcaagacacggattaccagaaggattcaacgaacaaatgggtgaattcttagcacaaggtaacttcggtggagctattggtgcagtaactcctgaagctcttgacgctttctccgtttgtggtactcctgatgagttcatacctaagattgaagcattagctgacatgggtgtaactcaatacgtagcaggatctcctgtaggtaaaaacgtagaagaatctattaaattattaggagacgtaattgctagcttctaa

SEQ ID NO: 569 - DNA, 210 bp, Methanobrevibacter ruminantium
  source 1..210: mol_type = genomic DNA
atggaaaccaataggctggaagctttttatgatgcgataattgcaattattgtaacagttttggttttggaattgccacagcctgaaaccgctaccattgcaggaattttagctttgaaagtttcatatttcacttatcttgtcagtttccttgtttgccaatctctggcaatatcaccacttgatatatgctcatgtgaaaaaaattga

SEQ ID NO: 570 - DNA, 315 bp, Methanobrevibacter ruminantium
  source 1..315: mol_type = genomic DNA
atgtttgtaatatccttgattccttatttgacaatttttgttgctaataatccgaattctcttttaagcgaatccttatatggtttggattttattttggtggatattattctatttattatgagccggtatctgataaaaataaatgagaatagcgaatatttgtctgaagttttggatttgaaaaatgcaataattattccattcattttcctaattataggattcattataggttttttaggctatcctattgcaatcagcattgtctgtttgattacaatcgtaaggtcaatattatattcaattaaatag

SEQ ID NO: 571 - DNA, 483 bp, Methanobrevibacter ruminantium
  source 1..483: mol_type = genomic DNA
atgtttattgaaaaaagatgcacaggctgtcgtgaaggcagtgcctgttatctgacctgcacaatagcaccatgcagcattgaacatggaaatatagactactgcttcgaatgtgaggaatatccctgtgacaaatatgatggaattgaattatacgattcactaatcacacacaggaatcagaaaaaggatttgcaaaaagcaaaaactataggaatcgaaaactatcacaaagaacagcttgaaaaaaaggaaatcataaaccatattttaaacaggtataatattgccaacagacatatcttcttctgcctggcggtaaatctgcttgaagttgatgacttaaaacagatattaaaagactgcgatgaatcaacaaaagatatggatttaaaggaaagatcagattatataaaacatgaattatatgaattcgccaaaaaaagaaatatcatactcaaattaaatacaggaagatattga

SEQ ID NO: 572 - DNA, 252 bp, Methanobrevibacter ruminantium
  source 1..252: mol_type = genomic DNA
atgaattatgtagaagaagcagtacaattatttgaagatggttatatgtgttcacaagctgtcttagaggtattttgtgaagagtttggactttcaagagaacaggcatttaaaatcagcatatcatttggaggcggtatgcgtaaaggagaagtttgtggagcttgcactggtgctataatggcattaggtttgaaatatggtgatttcgaaaggatggcacaaataaggagaaataaaaggtcattatga

SEQ ID NO: 573 - DNA, 456 bp, Methanobrevibacter ruminantium
  source 1..456: mol_type = genomic DNA
atggatgatttgcctgaaatgatttcaatctggaatgaaattgtcgaggagggcaatgcgtttccacaagaagaagtactgacattaaagacaggtttggattttttcaacagtcaaagtcatgttggagttgcatttgacggtgaaattctcggactgtatattctccatccaaataatgtgggaagatgcagccatattgccaatgccagctatgtagtatcctcaaaagccagaggaaaatatattggtcaaaaactggttttggattcgattgaaaaagcaaaagaacttgattttctaattcttcagttcaatgctgttgttgaagataatttatctgcaagacaattgtatgaaaagttaggattcaaacagcttggtgtcattccaaaaggattcaggttagataatgatgaattcgctaatatatgtccatattatattgaattataa

SEQ ID NO: 574 - DNA, 660 bp, Methanobrevibacter ruminantium
  source 1..660: mol_type = genomic DNA
atgaattatcaagaaatatcaaatatcattaaagaaagcctaaaccttaaaaccagcccagttagcgtgaaattatttgaaaaagaaaaggatgcagaagaaatttttgaaaaaaccaataaaacaatacattgtcaggcaataataacagcaagtaaaggaaaatcattttatggaaccatagatgaaattggatgtccgattggagcgggaattttgggtctaaaggaactacctgaaaaaatacttaacggatcacaattcgataaaatgaatgtaacctcatctcaggaaagcgggaaagcattaattgattcagttgctaaaaacaatagaatagaagccattgcatacatgcctttggaggattcaaaaatagaacctgacgttgttgtggtaattgccaaaccaagacagattttcgatttgataagagccaatacttatcaggaaggaaaaagaatggacaacagtgtgggaggaacacaatcactatgcggagacattgtagtaaattcaattcaaacaaatgaaccccatatctcatttggctgtataggctcacacatggcaacagaactctcagaagaccaagtaataatcggaataccaatatccaaacttgaagaaatagctaattctttaaatataattaactaa

SEQ ID NO: 575 - DNA, 750 bp, Methanobrevibacter ruminantium
  source 1..750: mol_type = genomic DNA
atgaaatttaaattcaatacaccattaactgaaggaaagataatcaaaagaaacagccagttcaccttggatgttgaaatcaacgacaacattgaaaaagtgcactgtcccacaaccggacggattggaaatattgatttaaaaaatgttgcaggattactttccaaaagcgacaatcccaaaagaaaaacaaaatataccttagaggcaatatccatcagcaatctcaacagaaaagataaaaaatggataggaataaatcaaatagcttcaaacaaatatattgagctgtttttaaaaaatcatcttctcgacgggatgcttccggaatatagtgagattaaaagggaagttagtcttggaaaatccaaattggactttttagttggaagcacatatcttgaagttaagactccacttcaaacattacaaatagaatacgatacagatattaaaacaaaaaaagtttcatcattctcatcaactgacagattcataaagcatatcaatgaacttgcagacagtcttgaaagtaatgaaaaggcaatacttctaaatacatttcaatatgacaatccaggatatgaaatcttaaatccaagtacaaattatattgaagtcagcgaaaatgtggacagatgcattgaaaaaggattggagatatggcaggtaaatatgaaaatagaccatgaaggtgtggaattactcaaatactggaatacaacatcaaactttaggaagataaaatga

SEQ ID NO: 576 - DNA, 510 bp, Methanobrevibacter ruminantium
  source 1..510: mol_type = genomic DNA
atgaaaagcaaggataaaattgttaaaagtctaattgaactaatggaaactcatgaatttgaagaaataactgtaaaagatatatccgaactggctgaagtcaacaggtcaacatattatcgcaattttaaatcaaaagaagacatcataaaatacaagttagaatcgataatggacgaatacctgaaagaatttgaaagtaaaacagataaaacaaaagagacttatatccgaacaattcttgaaacatttctcaaacatgaggaatttttaaaaatcatacataagcaaaatcaaagctacatactgcaaaaagtactcgccaattactttggcgacgtattgaaagacacctctaaaaaggaaagatatcaagtctattaccatatcggaggaatttacaactttacaatatgctggattgaaaatgacatgaaagaccgaccggaatatcttgcaaaaataggtgcggagataacatcaaatattgaaccgtatttgcttaaataa

SEQ ID NO: 577 - DNA, 1059 bp, Methanobrevibacter ruminantium
  source 1..1059: mol_type = genomic DNA
atgaagcatagattaaatttagataataaagacccaaattatattttgttgaaagaaatatttaaaattatggattctagaaaatccaaaagtatattagcatcctatggatttaaaaacttaaatagaacaatatttacttttaaaattatatttataagtatgttctttggaattgacattccattcattttaaacgagcttaaatccaaaaaagaacttcgcaaatactttaatatttctgaagttttgactgcagatcaagtttataaaattttttcagaaataaactctgaaaaacttataaaatgtttaaacagaatcttaaactcaaggaatatggttaaaagaagaggaaaaaagacttttattgttgatgcgaccccagtggacgtagatattaatttccacagaaataaaaagactaaagaacatctggaaaaaattaatctcaaatggagttattcatcctctaaaggttattatattggatttaaagcaactgttgtattagattatgattctatgaatcctgtttgtattttagtccactctggagctccaaacgatgcaaaacttttcgaagaaattttagaaaaccttcaaaaaagacgaataatcagaaaaggagacacattaatctttgataaaggatattacagctataaaaactaccaaatcggaatcagcaaatacaaaatcattcctttcatttttccaaaagaaaaattcagcagaacccgattggatgacattttaacttatccactagccgtatttaacaaaacaaagagaataatgaaagaaaaaagattatacaacagtttaaaaatggaattaatgaaaaaaatagattcatgggaaaaatttaaaccaataaggggcaaaatagaagattttttcaaattattaaaacaaggcttgaatatgagagaaatccacaaatatactccaaaatcagtagaaaaaaccgtttatctaaatgtatttttaggagcactgattatatcacaaggattttactcaaaaacggccatacaacaattatctgaaaactaa

SEQ ID NO: 578 - DNA, 990 bp, Methanobrevibacter ruminantium
  source 1..990: mol_type = genomic DNA
atgggatgcatggggttcggagatccggaaaatggaatgcacacatggacattgcctgaaaaggaatcaatagaaataattacaaatggcctacacaatggaattaacttctttgatactgctatcggttatcagaatggaacttccgagcaatatgtgggaaaagcaatccgggaaaacgcttctcgtgaggaagttgttgttgcaacaaagtttctgcctagatcacaggaagatattggaaataatgtctctggaagacagcatatccacaatatggtcgaaaaaagccttataaatcttggcttggattacattgacctgtatatctatcatatgtgggactacaacactcctttatatgatcttcttgaaggattaaatgaggtcattgaagaaggtaaagttaaatatattggaatatcaaactgttttgcctggcaacttgcaaaggccaatgcacttgcagaaatggagggttttgctaaattcgtatcaattcaaggccattacaatttaattttcagggaagaggaacgtgaaatgattccattatgccacacagacaatattgcattaacaccatacagcgcactggcttcaggaagattgtcaaggctccctggtgaagaatctaaaagattaaatgaagattactatgccaaattgaaatatcaaaattccgaacagcaagatttaaagattatagaaagagtcaatgaacttgctcaaaattatggtgtgtcaatgacagaagtgtctctggcatggctacttacaaaagttacagctcctattgtaggggccactaaaatgcatcatgttgaaggtgcagttagttccgttgatttgacattaacggaggaggatattagttatttggaggaaccctatattgctcatgatttggtaggagtaatggcagacaataaggtttcagccagtgataacgagaaagtctggattaaacacactaaaaacaagatttaa

SEQ ID NO: 579 - DNA, 534 bp, Methanobrevibacter ruminantium
  source 1..534: mol_type = genomic DNA
atgaaaattatagttttgaaaggaagtccaaatattaatggttcttctaatcttcttgcagataacttcattaaaggagcagaagaagcgggccatgttgttggagaaattgatgctgctcatgcagacattgcaccatgttctggttgtgttagctgtggctatgaaggtccatgcataattagtgatgatatggatatttttagagaaaaaatccttgaagcggatatgctggtgtttgtaactccattatactattatggaatgtcagcgcagcttaaaattctaattgacagattctgttcagcaaacagttccattcagtcaagtcatttcaaatctgcacttataaccgttgcatataattcatccaattggacatttgatgcactggaagcacattatgatactctagttaaatatcttaatttagatgatcaaggcagaattttaggttatggttgtggcactccctcaatgacaaaatactctgattatcctaaaaaggcttatgaatttggaaaaagtttataa

SEQ ID NO: 580 - DNA, 1401 bp, Methanobrevibacter ruminantium
  source 1..1401: mol_type = genomic DNA
atgccaaatttcttctcaggaggagatcttatatcaaataataaaccgcaagaaacgtttaggggaaaaactgacagggctattaagaaacgacccccatggaaggaatacaacctgcatatagtttgttttgttctggttgccatttcaatggccattggagttaaagagattagaatcactgataccataagtgttttattattgcctttaatatatgccctaatcatgggtttggctctttttttagcaaaacctataaaatttataggtaaaaagcaatcaaaggtagctgaaggagcaatggttttatttataggagttttaattgctaaattagctatttcgagcggacaatccattgatattatttttaatgtcggcccctccttgattttacaacttttgggggatttgggcactcttatagcattgcccgttgctttgattttaggatttagaagagaagtaatcggtatggcaagttccatttgccgcgaacctaacttgggagtcattatcgacaagtatggtttcaaatcccctgagacaaggggagttttagccatttttgttataggatccattatcggcactccttttatcagcttcctatcaagcatatgcatttcgctcataccttaccatccatatgcctttgcaatggcttcaggcataggaagcgcaagcatgaatgctgcagcattggttccattggtgcatatgtaccctgccatggctacccaattggaggcctttgcaggatgcagtaacattctttcattttgtttaggcatttacatgtgcatattcatttccctgcctcttgcagaaaaattgtataaatggttatctccaatcataggtaaaggtgaggggagaaccattgatgacgaatatgctattgaaggagtaaaagatgataaatatgctacttctgaggatttgagttctggtaagattgaaagatgggtcactttcctcgtacttttctcaatcatcggcacagttggaaatttcataggttatcatacccctttgcttgatgtgttcatcggaatgctaatcatttcaattattacccttatcggaatgtgccttgagaggataattccatgggatatcccatcaatcatttatataagtttacttggtatttttttagccattcctggagttccaacttcagacattataataacttatgtctctcaaattgagttaactacaatctgcactgcatttttagcatatgtcggtattgcaatcggtaacgattgggaggaatttaaaaagattggttggaaaggaatcattatagcaataatcgtaatttccggaacttacctcggttctgcaagtattgcaaatctggtcttatttgtaacaggcatgatttaa

SEQ ID NO: 581 - DNA, 894 bp, Methanobrevibacter ruminantium
  source 1..894: mol_type = genomic DNA
atggcgcggagcgataaaactttggaagacattttgaatattattttttatgataaaccgtcaactcaagatgaaattgccgaaaaattaaagattagtcgaagatatgttactcaattgcttaaaccattaattgaagaagacattgtcaaaagggcttatgtcatcgacttgaataaatatgatgaaatttatggctcttcagaccctatcttcaatctcaaacagcattccgcattttttttaattgaaaacatgctaagcagcatgagcgagcatgttaaagaacaggtccaaatgtctttcgatgccattttaactaatgataaggacttggcagaacaagctttaaaactggattttaccacaaataatatgtatgaaaaagttcgcgcatctgttgaaactgtcgttgatgttgatccccattccaaactttccaagattttattgttcagcgaagcggcatacaattatgaacgcattggagattattcaggccatattgccaaatttgtcattaatgagaagactgccgtagacgatgaacttttagatatattaaaaaaaatgcataaatatgcacaaaaatctatttcatatgcaactgatgcttttattaatgggaatattgactcacgtggaaatttgatggatacagaagaaaaaattcatgaaactcaacaaaaagccatgaatctcattgccaaccaaatggttgaaacttcttttgaggatattgaaatgtccaattattatatttacatatcccgtgtagtgaaatcattcgaaagaatgggcgatatctcagtggaaattatggatttggctgctgaattccataaggatattccaaggccaacaactccacgttcatttagagaaaaaatttaa

SEQ ID NO: 582 - DNA, 1935 bp, Methanobrevibacter ruminantium
  source 1..1935: mol_type = genomic DNA
atggaaggaagcgaattacagaacataaaaggaattggagataagctgtcccaaaagattttgctaaaccttggaggagaagaggaacttaaccgggtcataaatgagcttgatcttgaaagacttatccaaattgaaggaataagccaaagaaaggcgattgaaataatgaaccaattattgggaaatcctgcacagaagtttttaaaaagcgaacgtgcaattcagctatatgaagaaatcattgaaaaaatcctcaaatattcaaatacaaactactctaaaaacagaatcttgcttttagctccaataaaggatgaattcattattgccgaaaggctttcatttgtcatgagcgctaaggaaagagtcagcaaactgcctcttgatgagctgaacaagctgatgagaaatctccatgagccaaagaatgcaaaggcaaactacgatgccagcaaggcaatacttgttgaaagcgctgaggatagcgattatctaatggaccttggactgaacaaatactatacaatcctaactgcctccgattcaccattcttcaaggaggaaatcagcggatatgagcttgtctattacatctactctgaagggatactcgactttggagacatgcctaacctcatcatgataagcaaggaagctgaagactaccagcttgtgcctgagattattttagattacttcaaggaaaacagggaactctttgagaatgtttgtaaaatccgaaagatcctaggtgaaagcactgtcttggaggatgttggtccggtcttagaggaacttgacaattacaagacccaagagattgacttggatggaatcgttcaggaagaaaagacctatattgatgaggaacttaaaactaggatacacaatgttgaccttgaaggagatgaagtccttgacttattaaataatgccttgccccctaagatagagaaaatatttgacgaaatcttgtctaaatcaaaagagaacataaaggcaaaaagtggaattgactttgatccattcatcaaaaaatatcctattgaaattgatgatatggagatggagagaatcaagatggagattctctcaagcagcgagaacaactattttgacatgaaaatcactgctgccgaacatttggctctcattaaggagcaggccgaaagggaggttaaggaaacaattgaatttgactttgaatatgccctaggaagctttgcataccattataagcttaatgctcctgaattttcaaacgaatatgctcttgaaggagcccttcatttggaattatgccttaaggagacagaggaagataatgagaatggagagattcaaaggatagattataaattgaatgagcaggagaatgtggcgcttttaactggagcaaacagtggtggaaagacaacacttcttgagacaatcagccagatagcgattcttgcacagatgggccttccagttccggcaaatatggctaagataaaattattggatgagatttatcacttctctaaaaagagatcattggatgccggagcatttgaatcattccttaatgtgtttatgccaattgtgacaagcgactgtgaaaaattggttcttcttgatgaacttgagggaattacagaattggaagccgctgtaaagatcatttcaagctttattgagatgataaaggacagcaattcctttgcaatcattgtaacccatatggctaatgagcttatgaagtatacagacattagggtggatggtattgaggcaactggattggatgagaattataatctgattgtggataggacccctaagatgaattatttggctaagagtacacctgagctcattataaaaagaatgtatgagaactctagtcctgaactgaaaaaggtctatggtaagatcttggagaaattctga

SEQ ID NO: 583 - DNA, 3054 bp, Methanobrevibacter ruminantium
  source 1..3054: mol_type = genomic DNA
atgaaattgcctgaattattagcccctgttggaagtgctgaacacttaaagactgccatcttatctggcgcaaactcaatatacctctctggagagaactatggtgctagaaagtatgctgaaaacttctcccttcccgaaataagagaagcgatcaaatatgcccatttgcataatgtcaaggcctatgtaacagtaaacaccctaatcaaggaaggtgaactgaagaaagtaagcgaatatttgctccaattatacaaaatgggagttgatgcagtacttgttcaagacatcggactaataaatataataaacaaacatattccaaaactcaatatacatgcttccacccaaatgaacctccacaatatagagggcatcaaatgggcctacgatcacaatataaaaagaatagtccttccaagggaaattgagatgagagagcttaaggaaatagtggaatatgcccattccttaggaattgaaatagagatatttgcacatggagcgctatgctattcatattcaggccattgcctcctatcctctcttcaaggaggaagaagcggaaaccgcggaagatgcgcacagccctgtagggagcaatatgaactgtccataaacaaaagcaaaagaatcagtccaaagaacgaaggaaactatcttttatccccaagggacctgtcattatatgaaaaccttgatgaaatcgtaaatttaggcattgatagcctaaagatagaagggcgaatgagaagcacagactatgtggcaactgtagttaagaactacagaaaaagacttaacagattaagatacgacaagacctcaaagtcattgaatagaaacataaatgaatcaatcaaaaaaaccaaaaagggaaagaaaggaagaaaatcagacttaaaaaagatagaggataaggaaaagatagaaagccttaagaagattcaaaaggaagaaaacagaaattcagaggaagaattaggactggtcttcaatagggagtttacggcaggtcatcttattccaaaaaacaatcctatgatcatgaacagaaagaaacctggccatcagggattatatattggaaatattcacagatacaatcctcaaacagaagagattcatatcctattaaatgacaatttaattcacattcccgaaaaaggagatggaatattaatagaaagcagaatcaatagagaaaactctgatgaaagaaacaataaatctaataaaaacaataaaaataaacaaaatgaatccaaatcaaataagaaagataaaaataaaaagaaaataaaaaggatggaaaatgatgaaaactatcattcaatcattcagacttatggatttgacatatcctcaaagcctgtcctaaaagattccaaagacaagcattggagaaaaagggaaaaggacaaggacatagaaggcaaactacttgttataaaaagagttagggagaacaaaagaatcccatttcctcttgagaagggctcaaaggtataccttacaaagagaaactccctgataaatgaagtcaagaatctaaaaagcgacaagtccaagcatatgataaagaaatccaatctggaactctactttagaatagacagcgacaattaccctcacctaaaaggaaaccttaaattggacaatggaaaggtaatcacccttaaaataagaggggaaatgccatgggaagaggcaatcaaaaagcctattacaaatgagaccatcaaaaagcaattgatgaagataggagacctcccttattatatcgaaaagattacagtaaacaacaataaaagcctattcacaccaataagcggaataaatgagcttagaagagaattctttgacaagcttgaagaggaagtaattaattcatacattcctactgatgaagatataaaaattgcagaagaaaacattaaggagttgtctaaagaactggatagaaagattgatttaaaggccaaagttaaatcagaacaagaaaacaatgatttaaaatccaatgccaaattggaaaataagaataagaattcaaaaaatctatccatctacataaatagcctagaaagcttaaaggaaataaataaaatcaatgatctttcaaatactctattcaatagaatctatttagaaataccgccaaatagaagactggatgaaattacaaaggatagaatagaaaactacaacccaaatgactcaaaagaacttaacataagctactgtgttaacttcctaaagtctgcaatcaacttggcccaagaccaagactatgaactcatatggaaattgccagacattgcacataagcaatccaaggaatcaatagtaaagatattaggcatactaaataaaatgaatttgcacattaatattatgactagtttaattggattagacgattcattaaaagataagtttaagctagaactttatggaaattatccgttaaatgtatataatgcatatagtgttatggaattaaaaaattataagacattatgcatatcacccgagttatataagaagaatattgaaaaattaatggaagactattatacaaacaaaaacaatgagggattatctgaaatggaaatcttggttcatggaaagattgaagccatgaccacaagaaaggaacttatttccaaaaaacaattgaagctaatcgacaaatataataagaagatgagaagggataaaatggacatctcttcaaatgagttttacctaaaaaacagaaaggatcaatattacccaataagaacaagcataaatgaggataatctgattattctaaactcagaggagttttgcctgattgatgagattgattacttgaagtcaattggaatcaaaaactattccattgactgcagatggaagggcattgattatattagggatattggaatggtttatagggattccctagataatgatgattatgacctaggtgagtttaaagaaattatcaataaacattcagagcaattgactaaagcaaattttgatataggattaaaataa

SEQ ID NO: 584 - DNA, 2586 bp, Methanobrevibacter ruminantium
  source 1..2586: mol_type = genomic DNA
atgacattacctgaattattagcgcctgcaggagactatgacattttagttactgctgtaaatgcaggagcagatgcagtttatatatctggcgaacgctttggagcaagggcctttgccaaaaacttcacacttgaagaaattgagaaaagtgtagaatatgctcacttaaatggagtaaagatacatgtaacagtaaacaccctcataaacaactttgaggttgttgatgttgtccaatacctcttcaaactctacaagcttggggtagacgcagttattgtacaggatgtgggaattatagagctaatcaaaaccctaatccctggtcttgaagttcacgcatctactcaaatgacccttagcgactatgactgcattctttgggctgttgagaatggaatatcaagaattgtctttccacgtgagataagcgtggataagataagggaaatcagcgaaaagctaaaatcctcaaacttaaatatggaacttgaagtattcggccatggagcactttgctactgcttcagcggaaactgctacatctcatcttataacagcggacgaagtggaaacaggggagcctgcgcacagccttgccgtaagcaatacaagttaaaatacaaaaactacaatgtaggaaacggattccttctttcaacccatgacttggcagtctataaaggtttggataaaatagaagaagccggagtattctccctaaaattagaaggaagaatgaagtctgcagattatgtagggacaatcgttaatgcatacagacatataatcgatggagatgagggggactatgaaaaagaccttcatttagtcttcaatagagaatttacagatggatatatcctaaaccaaagtccaggccaagtcctaggaagggaaagctcaggccacgagggagtctatatcggaaagatcatcgaaaagaaaggagagcagattaagatttccaaagaaaacaaggacttttcaataaaccttgacatcggtgacggaataggattcaaatataaggacaaaatcaagggaatctatattgacaacattaaagaacagactgacgattatataatcctaaataccacaagaaatgtccgtgaaggagataaggtactcttaagctattcaaagtcaacccacgataaattaaagaaattccataatgaaacaataaagcagcacatcccattgtccctagacatatactggaatgaggatttaagcctaaatgtcacaggaagattccagatagaggaaaagggaataaacaacaaaaacataatagagcgctttaactttaactatatttccgaaaccaagtttgaaaaggcattgaatagaccaataagcaaagaggatatagaaaagcaaatgctaaagactggagacagctcattttatataaaggaaatgaacattcatggcatgcctgaaaacactttcatacctattggaaaattaaacaaaatcagaagaaggcttcttgaaaaagccacaaatctactgcttgattattataagccaagcaaaaaagaagtgagggctacaaataaaaaggtaaatcaatttataaaggaatataaaacatatagtgacattgatctaagaaaggaaaaactgaacctatcaatatttgttgacagccttgagcttttggagatgacaaggaaacttcctattcataaatattattttgacccatcattctcattcaacagcccagaagagtattttgaaaagattaaggacctattgaaggaagcttattcaatagttggcaattccaataatccaaataataaatcaaaatcaaatgaagatgaaagattagttctagtcttgtcttcctttatttcagatgaagagatagaaaaactaagcaaaatcattgatgagctaaaagaagaaggaataagcatccctataatgtatgacactcccggaataggaaaaagcttcaatacagacatctatggaaaccacaacctaaacatctggaacagctacaatgtcaaaaacctctctgaatctggatttaaaagccttatcctatcatcagaactctcccataaggaaataaaggaacttgtatcaaaataccaatacattaaaggagacaaagaaaccgacctaaacataattattcaaggaaaccttgaagtcatgagcagcaaagacgacttttccaatttaaatgatggaaaagacttcataataaactctgcagatgactatgcaatccttgaggataagaaaagaaagaaattcaaatataaggttgtatttgactataataagcatagccatttcatcaataaggactgcctatgcctgatagaggaagtggagcttataaaggatacaggagttgattctgtaataatcgatacaagattctcatcagccaaatacagctctacaataatctctttatacctgcaggcattaaaagaggacaatacttatgacttaagcctgctaaaggatcaaattcgaaacataaccctatccagactaaatcaaggaaactttataaatggaaggttacatgaaaaagactgttaa

SEQ ID NO: 585 - DNA, 591 bp, Methanobrevibacter ruminantium
  source 1..591: mol_type = genomic DNA
atgtatatcgtattagaaggaatagatggtgctggaaaatcaactcaaataaactatttaaaaggatggctggaagataacggctttaaagttgaaacaattgttgaacctaccgatttggaagttggaaatcttattcgtcaattgttgactaggtctgatgctacaagtgacactatgcaaaagactttaggccttctttttgcagctgacagacttgttcttatggataaaatcgaaaagcttgaaagtgaaaggactgttgtaataagcgataggtctttttattcaagtctggtatatcaaaagccacaggattggattcgtgagataaataagtttgcaaaaatccctgatttggttttgctccttgatttggatgttaaaaagtcagttgaaagatgcgatggaactgatgaattcgaaaatgaggagtttttaactggagttaaagagaattatctggcattatctagagagaatgataattttaaaatcattgatgcgaataatggtccaaataaagttgcatctgatataaaaaaagctgttgctcctttatttgatatctgtgtagattgcattaggtag

SEQ ID NO: 586 - DNA, 207 bp, Methanobrevibacter ruminantium
  source 1..207: mol_type = genomic DNA
atggaagaagaaccaatttacgaaatgaaacttacaaacggaattggagaacagatgcttgctcatgtttttgaaaagttcgatgtggaactaaagcaaactgagttcggacctaaactccaaggaactaaagaggaattggaaaaagctcaagaatacattgttgaaatgatgaaaaaaagattagaagaattagataggcaataa

SEQ ID NO: 587 - DNA, 966 bp, Methanobrevibacter ruminantium
  source 1..966: mol_type = genomic DNA
atgaacatagaagaaaaaatagaattaatccaagaaggaacacttgaaatcatagaactggaagaattaaagcaaaagcttgaaaaagaaaccccaattgcttatactggatatgaaccttctggaaaaattcatttaggtcatgcagttaccataatgaagcttaagcaattgcaaaagttaggatttaagataaagatccttcttgcagactaccatgctttcttgaatggaaaaggaactgtagaagagattgcagaaactgcagaatacaataaaaggtgttttcaaggtttaggattagctgatgatacagaatacatcttaggttcatctttccaaaccggaagcgaatatactaatgatgtttaccaattagccaccataacaaccttaaaaagagcaaaaagaagtatggatcaagtaagcagacacgatgacaatccaaaagttgcaagcgtagtctatcctctcatgcaaactgctgatatgtctgcattaaatgtagatattgccttaggaggaatggagcaaagaaaaatccaaatgttagcaagggaaaacctgcctagaatcggaaaggaagctcctgtatgtattcacactcctttgattcatggtctcgacggcgatgacaagatgtcctcaagcaaaggaaactatatcgctgtggatgatgacgaaaagacaatcaaggaaaaaataagaaaaagctactgtccgcaaggtgaaatcgaaggaaacccaatgattgaaattgcagacttctttgtattctcccaacaagacacattcgtcatagaaagacctgaaaaattcggaggaaaccttgaattaacaaaagatgaactgcatacaatgtacagcgaaggcaaacttcatccaatggacttaaaaaatggaatcactaaattcctcattgatttcttaaagccagttagagaatttatggaatctggcgaataa

SEQ ID NO: 588 - DNA, 1041 bp, Methanobrevibacter ruminantium
  source 1..1041: mol_type = genomic DNA
atgttttgtccagaatgtggtgccactgatgttgaaatggtagatggaatctgcaagaattgctatttgaagaaatttcaattgatggaaattccagaaaacattaccgtaaccatctgtaaacactgtaatgctaaattagaggaaggaaaatggaaagacgaatatattccagaggatgagattatatatcgtaccttagaaaacaatattaaacttaatgatttagcagaaaatgaagagattgaactggaaatagaccaaatgcgaggaacaattgcagaatgttacattgaagcagtggcgacagttcttggagaggaaattgtagaaacccatacgccaaatgttaaaatcaaatattccgtttgtccagactgcagcaaaagaaatgcaggatactatgaagcagtaattcaacttcgtgcagacaatagggaacttaaggaagatgaaataatcaaagctgaagaaataatcggcagaacactggacaagcagtttaaaaaagacaaattggcatatattccacaagtggctaagcttaaggaaggaaatgactattatatcggttccttaaagtcagctaaaaaggttgtggaacatcttaaagaggagcttggaggaaaagtcaaggaatctccaaggctaatcagcgaagacaagtctacaggaaaaggattatacagaatctggatatcattaaggcttcctaagtttgaaaaagagaatataatcaagtataatgataaaatctatagggtggaagccattgatggaaatagaattctcctggccaatttggaaaatcaggactccttggcattgaaatggagagagtatgattcaattgaaaagatggaaaacctaaatggaattcaaaaggcaatcataactgcaaaatctccaaagagcattcaaatcctagatccagatgacttcagcccattggaccttgatatgaatgaaaaattagaaggctttaatatcggggatgaaattgatatattaaaaatagagggcagaatatttattatttaa

SEQ ID NO: 589 - DNA, 408 bp, Methanobrevibacter ruminantium
  source 1..408: mol_type = genomic DNA
atggacgattatgaaaatttattaaacagagcgattgatcaattacctcctgaagtatttgaaaccaaaaggtttgaaccagttaaagcttactctgttattcaaggtaatagaacattcattcaaaatttcaaagatgttgcagactcattaaatagagaccctcagcatatattaaaatacctgcttagggaattaggtacagcaggaaacctggaaggagtaagagcaatccttcaaggtaagttcaatcactttttaatcaacgaaagaattgacgaatatattgaaaaatacgttatctgtcatgaatgtaacaggccagatactaaaatcataagagaagatagaatatttattttaaaatgtgctgcatgtggtgcaaaagctccgcttaaaccattataa

SEQ ID NO: 590 - DNA, 1998 bp, Methanobrevibacter ruminantium
  source 1..1998: mol_type = genomic DNA
atgagtcccactaacaaaaccaaagcatcacttgcaagatttgaagaattcttctctacaatttacaaggacgatgtatttgaagttctagaaaaatatcctgatgaaaggtcattgacagtcgattataacgatttagaaatgtttgatccagatttggcggatttattaatcgataagcctgatgaagtcattacaacttcacaaaaggctatcaagaatatcgatccattgatgaaagacgctaatttaaatatcagattcgaaaatcttacaaacaacgttccattaagcgatctcttaagtaaatacattggaaagtttgtttcagcagatggaatcgtaagaaaaaccgatgagattcgcccaagaattgaaaaaggtgttttcgaatgcagaggctgcatgagacaacaagaagttgaacagacatcctcaagccgcataatggaaccttccatgtgtacagaatgtggaggaaggtcattcagactgcttcaagaggaatccaaatacatagacactcaaagcgccagaatgcaagagcctttggaaaacctttcaggaggaacagagcctaagcaaatgcttatggtattggaagatgacttggtggatgaattgagtccaggagacaaggtcaggattacagggactttaaaaacattcagagaagaaaaaagcggaaaattcaaaaattacatttatgtaaatcatattgagcctttagaacaggaatttgaggaattgcaccttagcgaagaggatgaggctaaaatccttgaattatcccaagaccctaacatacatgataaaatcattaactccactgcaccttcaatcagaggatacagagaggtcaaggaagcgattgcattgcagctctttggaggatctgtaaagcaccttgaagacaagacacgtttaaggggagatatccacatcctcattgtcggagaccctggtatcggtaagtcacagatacttaagtacgtatcaaaattggcaccaagaagtgtatatacaagtggtaaaggcacttcaggtgcaggtttgactgcagcggcagtaagagatgagcttggcggctggtctcttgaagcaggtgcattggtgcttggggaccaaggtaacgtatgtgtcgacgaattggacaagatgcgttccgaagaccgttcagcccttcacgaggcattggaacaacagacagtaagtattgcaaaggctggaatcatggctacattgaatacaagatgttcagttcttgcagctgcaaaccctaaattcggtagattcgaccgatataaaaccttagcagaccaaattgacttgccttcaccgattctttctcgtttcgaccttacctttgtaattgaagataagccaaacattgaaaacgatagaaaactggcacaacacattctaaagatacaccagtctgaaagcgtaaactatgagatagagcctgatctccttagaaaatatatcgcatatgcccgtaaaaacataaatccagtcctaaccgacgaggcaaacaaggtattggaagacttttatgtatctgtaagaagtgcaggggtggaggaagacactccagttccaattacagcaagacaacttgaagcaatcatccgtctagctgaagcaagcgcaaagctccaattaaaggacaaggtagaggcagtggatgctcaaagagcaatcacattgcaaaggaaaacattagagcaaattggattagaccctgaaacaggacagttagatatttcaagagtggaaggaggaacaacaacctcagatagggaaagaatgcaaaagatagaagaggaaatcaagcttcttgaacaggaattcgaacgagctcctatagacactcttaaggaaaacatgaaagagaaatatgatatgagtcctgaaaaggttgaaactcttgttaaaaaacttaaaggaaaaggcatcatatttgaaccaagaaatggtttctttaatactgcttaa

SEQ ID NO: 591 - DNA, 393 bp, Methanobrevibacter ruminantium
  source 1..393: mol_type = genomic DNA
atgttaatatcagtcttgggagtgattgtaattatcattatggtagttgcagctgcttatgttggatttagcgttgtttcatctagtttgactggtggaatttcctctggtactcaatatgatgagttagcaaccttaaaatccaattgctctagtttagaagcccaattcaatataaccggaactaagatttatgcaatgcaaaacattaccttagaaagagagtttgtaaatgctcaagtggagttaattaaggttcaaaatgatttggatagtgttgaaagtgcattggcatccggtcagcctgcttcagaagttgataaaagaatacaacaatcaaaagaagatttaaaaatagctcagcaggcttataatagtttatctgttaaataa

SEQ ID NO: 592 - DNA, 642 bp, Methanobrevibacter ruminantium
  source 1..642: mol_type = genomic DNA
atgggaagtagatggcaagtggaaaagaagaaagatccctattatagaagagctaaaagtgaagaatatcgttcaagagcatcatataaacttaaacaacttgataaaaagtataaaataatcaaagaaggaaacactgtagtggatttaggtgcagctccaggaggatggtctcaagtggccttggaaaaggttggggaagagggaatcgttgttggagtggatttgaacagaatcaagccattccctgaaaagaacttctatggaattagaggggacttcaccaaagagatagttcaagataagattatggaacttacaaacggcaaagcaaaagtccttatttcagatgcagcaccttcattaactggaattaagacaatagaccatttaaattcagttgatttagtggaaaccgttataaaaatagcagacaatatccttgaaaccgaaggaaatatggtaatcaaagcattccaaggccctgaatacaagcgcttattggatgaaatcaagcaggactttagaaaagtcaaatccacaaagccaccatcatcaagacacagaagcaaagagatgtatattgttggattaggctatagaaaaggtcctggaagtagaaaaagtagaaataaagagtaa

SEQ ID NO: 593 - DNA, 540 bp, Methanobrevibacter ruminantium
  source 1..540: mol_type = genomic DNA
atgttaattggattaatatcagacacccatattccagatagaagaatgaaacttccccaaaaagtattggatgcatttgaagatgttgaaatgattcttcatgcaggagacatcaccagccaaagcgttattgatgatttggaggcaattgcaccggtccatgcagttgaaggaaatatggacagggttgtaggggaaatgaatcttcctccatctaaaatagttgaagctgaaggccataaaataggaatagtccatggagaagtctatccaagaggagacacccaacagctctattacactgcattggaattaggtgtagacatccttgtaagcggccattcccatgttgcacagcttgaaaagattaaaaatgtgattctggttaatccgggaagccctacaaatccaagattgtcagacccttcagtggcaattatggaaataaatggaaatgatattaattttgaattcgttaaagtgggaaatcctgtttgttctgctttaaatttctttaaagacaaagcaaataaagaataa

SEQ ID NO: 594 - DNA, 1092 bp, Methanobrevibacter ruminantium
  source 1..1092: mol_type = genomic DNA
atgggaaaagttagtaaagaaaaaatattggagattttagatggctatgataaggaaaacattaccatagctactctcggtagtcacacttccttgcatattcttaacggtgctaaagaagaaggctttagaactgctattgtatgtgaaaaaggtagggaagtaccttatgaacgttttgaagttgcagatgaattcattatggtcgatgaatttaaagacatagtgaatgaagatgtacagcaaaagctaagagatatgaatgcaatcgttattcctcatggttcctttgttgcatatgcgggtttggacaatgttgaagacaaattcaatgttcctatgtttggaaaccgtgatattttaagatgggaagctgaaagagaccttgaaagaaaactattggtcaatggtaaaattagaatcccaatgaaatatgatgacccttcaaaaatcgaccgtgcagtaatggttaaattccctggggcaagaggtggaagaggatactttgtagcttcatctcctgaagaatttgatgctaaaatcgatgcaatgaaagaacgtggatggattgaagatgaagatgtggcacaagctcacattgaagagtatgtttcaggctgtaactactgtattcactacttctactctgctttgaatgacgaagtggaattgatgggtatggacagcagatatgaatccagcattgacggatttgtaagaatgcctgctaagggtcaattaagcattgatatcagcccttcatatgttgtaaccggtaaccaccctgttgtaatgagggaatccttgcttccacaagcatttgaaatcggtgacaaattggtcaaaagtgcagcagagcttgtaaaaccaggtttgaacggtccattctgtatacaaactcttgtaaacgataaccttgaagttgttgtatttgaaacaagtgcaagaactgacggtggtactaatacctttatggaaggttcttcctacagttaccttaagtatggtgaaggtatgagtatgggaagaagagttgcacgtgagattaaaaacgctttagaaaacggtggttttgagaaaattattacataa

SEQ ID NO: 595 - DNA, 513 bp, Methanobrevibacter ruminantium
  source 1..513: mol_type = genomic DNA
atggtagatgcagaaaaagcaaaacaacctaaggagagaaagaataaaaacagtaaccttccagatattgattttaaagcattaatttttggtgcagcagcatatgcatttttcccgcttgttgcataccaatacaatctagacattttaatggtatttgcagcaataggtccattatacataggatatactgcaaaaactgaacttaaatcaatcattttaggaattgtaggtgcaactccactattatatttagctttttcaggcatgttaggatcatacggatcaggtgaaatggcagatataatcatgactgtcggaattctcggacttggcgcattgatgggatactttggaggatacctctacagagataggcaaagaaataaagcaaaagcagggggtattgtagtcgaagacactcctaaaaaagaaaaacaatttgaagacactggaagtgtcaaaaagaatgttgctaacttattccttccaaaaagcagaaggaaaaaataa

SEQ ID NO: 596 - DNA, 375 bp, Methanobrevibacter ruminantium
  source 1..375: mol_type = genomic DNA
atggcaaaaatgaatgctgtgatattaggatttatattgacacttgttgtttacctattctttggacgctatgaattctggggtcttttaattgtaggattcattgtaggatatatagctcacgaaggaatattaggcggaatgtggaatgcagcccttgcaggagcattcggaacaatcatatcagcaatcctattcataatacttgtcacaattggaggaactgcaatgatgggattcctcggaggacttgctggatttacagtttcaggaattacaagcttgattgatattgtatttacaataatcaaatatatgattgttatgggaataactggtgctgtaggtggagccttaagcggagaaaaagaataa

SEQ ID NO: 597 - DNA, 969 bp, Methanobrevibacter ruminantium
  source 1..969: mol_type = genomic DNA
atgatggatttaatttacatattaataataattatcattgcaataatcgcatacaaaagcataaagatcataagaccttatgaaaaaggggttgtagaaagattaggaaagtacaaccgaactgtagaaagaggtctgaacattgttattccatttatagagacaatcagaaaggttgacttaagggaacaggtcgtagatgttcctcctcaagaggtaattacaaaggacaacaccgttgtagttgtagattgcgttatcttttgcgaggtcatagatgccttcaatgcagtatacaatgttgttaacttctatcaggcaattaccaagcttgcacaaaccaatctaagaaatatcatcggtgacttggaattggaccaaaccctgacttcaagagagatgatcaatacagaattgcgtgaaacccttgatgttgcaactgacaaatggggaacaaaagttgtccgtgtagaaattcaaagaatagaacctccaaaggacatcgttgaagcaatgagtaaacaaatgaaagccgaaaggatgaaaagagctacaattctagagtctgaaggttataaggaatctgaaatcaaaaaggcagaaggggacaagcaatccaagattcttgcagcccaagcggaagctgaagccataaagcaagttgcagatgcaaacaaatatcaggaaattgccattgctgaaggtaaggcaagggcaaccgaaatcacctataatgcaatccatgcaggtaatcctactaatgacctgattgcaatcaagtatctggaggctcttgaaaacattgctgatggaagagcaactaaaatattcttgcctactgaagtttcaggaatcttaggctcagttggaggaattgcagaattgtttaaggacgatcctgaagcattggaaaaatttgaaagtataaaagttctagaaaatgctaaagaaacagcagataatgaatag

SEQ ID NO: 598 - DNA, 420 bp, Methanobrevibacter ruminantium
  source 1..420: mol_type = genomic DNA
ttgtatttagaattttggataattttagccattatcctcataattggagaactgctgacaggtggattctacctattatccataggacttggatcgctagctgctgcaatatttaactatttccaatttagcattacaatccaaattgtggcatttattttagttacagtcatttttatcattctttctaggcctctctttaatcggcttaatagaaacacaattgataaaaaatcaaacacagagcgattgattggattgaatggagaagctatggaagatattgggcaaaaaaatattggagcaataagcataaaaggagaagtctggaaagccatttcagatgaggagatatctaaaggggaagaagtaaaaataataggtatagatggagttaagttaaaggttgaaaaactctaa

SEQ ID NO: 599 - DNA, 2598 bp, Methanobrevibacter ruminantium
  source 1..2598: mol_type = genomic DNA
atgattaaaaaacaaactaaaacatattcaaagaagcagatttacaagaatcttcatccgtttgtacgagaatggtttgaaaatagcttcgaagactttacaccagcacaaaaacaatcaattccagaaatacaaaagggaaaaaacatacttgtctcatcaccaacaggttccggtaagacactaaccgcctttctatcagtaattaacgagcttacaacccttgcagacaaaggagagcttgaagataaggtatactgcatttacatatctccccttaaggcattggacaatgacattgagcgcaatctagacactccgcttaaagagatagaaaaaatagctggaaagccattaaacataagaaaatctgtaagaacaggagacaccacacaatatcaaagaaacaagatgttaaaataccctccgcatatccttatcacaacccctgaaacattatccatccttcttgtggcccctaagtttagggaaaagctttcccatgtgaaatatgtgataatcgatgagatccactcacttgctgaaaacaaaaggggagttcaccttagcctatcccttgaaaggctacaggccttaatcggagggtttgtaagaatagggctctctgcaacggtatctccattggaggaagtggcaagatttcttgttggatacgaatatggaacagaaagggactgtttgctagtggacatcaattatctaaaggaactggacatagaggtcatatcccctgtggatgacattgtaatagctgatagcgaagacactcgccttgctacctatgccctattggatgatttgattatggagcataagactagcctgatttttacaaatacccgtagcgccaccgaaaggtatgtatataatcttaaaaagctctatggagagcacttcaacagcaataacattatggctcaccattcttccttatcaaaggaactgagactggaaactgaagaaaagctaaagaaaggagagcttaaggcagttgtatcctcaacatcccttgagcttggaatagatatcggatacattgaccttgtaatcctgataaactctccaaaatcagtttcaagggcacttcagaggattggaagaagcggacacaggctgcatgagaaatcaaagggaaggataatcgttacagacagagatgagcttgtcgaatgcagtgtgcttttaaagaatgcaaaggaaggaaagatagataatataaagattcctaaaaactgtttagatgtcctatcacagcatatctatggaatgggaatagaaaacccatgggacattgactatgcctttgatatcatccgaaaaagctactgctataaagatctctcaagagacgactatgaagacgtattaagctatcttgccggagaatatgtagagcttgaagagagatatgtctatgccaaaatctggataaactatgaggagaacacctttggaaaaaggggaaagcttgcaagaatgctctattcaacaaacattggaacaatccctgatcattcggcagttattgtaaaatgcgacggagaggtcataggaaaggttgaagaggactttatggaaaagcttaagaaaggagacagctttgtattgggaggtcgaacatataagttcaaatatggaaagggaatgacaataaatgtatcccctgcatctggacctccatcaattccatcttggtattcagagcaattgccacttgcatttgaccttgcagtggacattcaaagattcagatatatccttgacagcaagttccagtatggcagaagcaaggaagagataatggagtttctccacgactatctctatgtggatgattttgcagcaaattccatctatgaatacttcaatgagcagtatctctatgcgcagataccacataagcaaaagctccttgtagagtactacacaggatttggagggcgcaaattcgtcatattccatagcctattcggacgaaagacaaatgatgcaatagctagggcagttgcatttctagcctcagacttcaataagcgaaacataacaatatccattacagacaatggattttatttaagttcagatggaaagatgggggccttagaggcattgaacagattaaatcctcaaaactttgaaaacattctaatcaaatcacttgacaagactgaaaccctagcaagcaggttcaggcattgcgcaggacgctccctcatgaccctaaggagatataaaggccatgagaagtctgtagggcgccagcaagtcagaggaaaaatactgctaaagcacattcaagagatggacaataacttcccaattcttaaggagtcccgaagggaagctacagaggactatatggacatcaagaatgcaaagagagtcatctcatggattgacagcggagagatggaaataaaaacaataaatacaatcatccccaccccatttgcattcaatctggtttcccaaggatatttggaagttctccaccaggacgataaggcagagtttacaaaaaggatgcatagggcagttctagataagatcaaggaagagatggacaatcagttttaa

SEQ ID NO: 600 - DNA, 852 bp, Methanobrevibacter ruminantium
  source 1..852: mol_type = genomic DNA
atggttgaaaaattatcaattgatgaagctattgaagcattgaaagatgaagatgtggctaataggaaattagccatcaaaagcttagagcataagagcgacgataagattatcgaacctttgattgaagccactaaggatgaaaatgctcaagttagatttggagctgctgaaatattaggggatattggagattcagcagttgataaattattggatgaatttaataaggaatccggttcaaataaacgttttttagctgttgcacttcaaaaaactggcagcgaaaaggcagttgatgcatttgctgatgcattgaatgatgaagactttggagttcgaaaagtagctgtaagggcgcttggagaacttagggctgaagataagattgatgccattgccgaatgcataaatgatgaggatggtggagtaaggactgctgctatctttgctttaggagatattggaactgataagtccattcaaatcattaaggatgcaagacgtaaggaaaaggacaaggactttaagaagtattgcaataaagcaataaagcaagctgaaaaagttcaaaagtctggaggcaaagtcaagtcttccaaaggtcagccaatgagcacaattaaggaaatggaaaagcaagatccagaagctgccattaaggcttatgaagttcatgtaaaaagcggcagcactaaggacactccttataagcgtctcgctatattgtataggaagataaatgattatgataatgagactagggttttaaaattagctattgaagttttatctaaagaaaatcctagcaaggttggatggtttgagaaaagattggaaaaaatgacctaa

SEQ ID NO: 601 - DNA, 807 bp, Methanobrevibacter ruminantium
  source 1..807: mol_type = genomic DNA
atggatattttcaattatatatttcaaattatcgtttcggttttgatttttgcagcaatctttgctgttggaatattgctaagggataaaatagtccataagctaaatttctttgtaaatcctcagaattatttgcctgaagaggaaatacaaacattgaagcaggtttattatttgattttaattctaattttagttgtgtgtattctaaacttcttctttgacaataatatcatattgccaaacagtccggaattctatgtattcaattcctttttagatattatagtttcagtatatatagcaataatcatttatgacggctctaaaaaaagcaaaatattattgatattcctaattcctattccatcaattgcattcctattatttggcgaatctttaattgaatattgggattttgtacgtattcctgcattattatatattatgaagatattttatgataagttccatatttatactgataagtataatttggaaaaatcaatacttcttctcttttcaatagtgttcattagttttattataacattggttgctgaaaacgaagatccattaaacgcattggttatggtctccaatgcatttacaagcaagggatatacaattttaggtgaaagcactataggaaaaatagatagcatatttctagtttggggaggttatattatatctggagctgctacagctactttgactgctgcaattttaattaaacactttaatgctaaaatagagaaatttgatgaaaaatttgaagaattagaaaagttaatttccgaataa

SEQ ID NO: 602 - DNA, 846 bp, Methanobrevibacter ruminantium
  source 1..846: mol_type = genomic DNA
atgaataaaatcaaaatagctctttgtcagatgaatgtagtagacaataaggacgagaatatcaaaaaggcaattgaaatgataaaagagtctaaaaaacaaggagcagaccttgcaatattgcctgaaatgtttaactgcccatatgaaaacgaaaagttcattaaatatggagagaccctagaagatagcagaacattgaaatcaatatctgaaactgcaaatgaagaaaatatctatgttctagcaggatctgtacctgaacttgtcttaaatgattcttctaatgaaaataacttatacaacacatcagttttctttgacaatgaaggaaagatattgggaaaacatagaaaggtccacctatttgacatagatataaaggataaaatctattttaaggaatcagacactttaagtgcaggagatgactttacaatcattaaaacaccttttgcaagaatcggaattggaatatgctatgacataagatttgtagagctttcaagaattttagctttaaacggagcagagatattaattttcccaggggcattcaatctgacaaccggccctgcacattgggaacttctatttaggtcaagggcattggacaatcaggtttatgcaataggagtggcccccgctttggataaggaggcaagctataattcctatgggcattcaattattgtaagtccttggggagaagtaattgaagaattagactatgatgaagagttaaaaatagttgaattggatcttgatttgattaagcaagttcgagaagagatacctgtactaaaaaatagaagaaccgacttgtatgacatcaatgaaaaataa

SEQ ID NO: 603 - DNA, 1179 bp, Methanobrevibacter ruminantium
  source 1..1179: mol_type = genomic DNA
gtgaaatattgtcaagagtgtggaaatgcaagctatgatagtgcaccagtatgtggaaactgtggtgctaagctaggtccaaagtcagaggcaaattctacacccccaagtcgtgataaaaaagctaaatcaacatcaacttctagtgaaagttccatattttcaagcaaatccgacggatttagttccaaaataggcaaaaaaattggcagtttccaagtgagcagcactaacactgctgttgaaaataaacaggaaagagaagaagctttcttaaaacaaacttcaaaaccaagtttctctaaaactgcaacagaaggatttaagcaaaaggataaaggaataaaaaatcctgctacaaaatataatatgcctaaaaaagaagaaactgttgatgctaaagctaaggaagctcctaaaagggaagctcctaaaaaagaaattaaaagggaatcccctaagaaagaagttaaaaaagaagctcctaaaaaagaaattaaaccaaatattgttaaaaaatcagatgaaggttcatctggcggaataaaccttaaaaagattggaattatagcaataatcatactaatcattcttttaatcgcaggaatcggacttaatcaaatgcaaaaccagacaactgatgaggtgatgaactatacagacggcatcatcaatttcacctactctggtaactggtctgtatacaacaataccaatgcagattccaacatgaccgatcttgcattcaaaactaaagataaaactttaattggatttacaacaattcaaagcgatgaaatcacttatgaaaaaatcctatcagatgtaaatgacactgcccattccttaaatggagaaatccttgaatatcaagaggttaatgtgggaggcgtcccagctcaagagataatcataagcactcaagatcaaggctattccagatacctatgcatcttgcatgacggagtctactattgcttcgttgcaaacaatgcaaaatctgacaatcagaacttgacatctttgaatacaactgaaattcaaaatatgattaatagtattagttttaaggatgttgtagctggagacactgcaaaccttgatacaagctatcaggaaagcagttaccaagaggaaagctacgacaactataactatgaagacacaagcaattactaa

SEQ ID NO: 604 - DNA, 501 bp, Methanobrevibacter ruminantium
  source 1..501: mol_type = genomic DNA
atggtaaagaaagaaaagattaaatgtgataatattaattatgcagtttataggattgatgattgggaaaacgattatgaaataaacattattggaactgcaagagagattccagtaacacagcctacccttgagcatatgctaaagcagatggatcatattcgccaatcagtatttgaaataggtggaaaaaaggttaatggaatgattggattgtctatgcagtttaatccaagctttgcttcaagagacattgatgagcttatcgaacaggagcaaaaggagtttgattcaatcatggctgaattgaatgcccttgaattgaaggacgctaaggatgtaatattcttggacacagatgagtatgtcatatataaattagagtatgatgggcatagcttaagcccaaagccttataatgactacgctaaacagcatcatttggatgaaattaaacgtttgaaggaattaagtggagaaaggtttgttttagagctttag

SEQ ID NO: 605 - DNA, 726 bp, Methanobrevibacter ruminantium
  source 1..726: mol_type = genomic DNA
atgtctaaaattcaacaattgcaggaaataataaattcatcagacaatattgttttctttggaggggctggtgtttcaacagaaagcggaattccagactttcgctctgaaagcggaatctttaaaagcctggaaaaatatggggatgttccggagaatctggtgtctcatacttactactcagaccacacagaggagttctttgagtattataaggacactcttgtatttgatggtgctaagccaaatccagctcatttgaagttggcagagcttgaagaaaaaggcaagttaagggcagttattacacagaatattgatggccttcatcaaaaggccggaagcaagaatgtcctggagcttcatggaagcattcatagaaattattgtcagatttgcaataaggagtattctcttgattttattttaaaaagcgaaggcattccaaggtgtgattgtggtggtgttgtaaagccagatgttgtcctttatgaagagcctttagacaataggattctagcttatgcaatcgattacattcaaaatgcagatacattgattattgggggaacttccttggttgtttatcctgcagcaggtcttataaattatttccatggtggcaatctggttttaattaataagagtgagactggctttgattatatggctaatttggttattaatgagccaattggagagacattgtctcaaatcagagtttaa

SEQ ID NO: 606 - DNA, 573 bp, Methanobrevibacter ruminantium
  source 1..573: mol_type = genomic DNA
atggattttatttcaactctactgattgcaatcgcacttgcaatggatgcctttagcgtttccctaacaaagggattcaccttaaagaacctcacaaaaagccaagctttatggtttggaatattctttggtggatttcaggctttaatgcctgttctcggatggctaggaggaatccaacttgaatggctcattacaacctttgcaccttgggttgcattcatacttcttcttttaatcggttcaaatatgattagagaaagtctctctggtgatgaagaggatgagaaggactctgataagttttcatttaaggaattgacattgcttgcaatagctacaagcattgatgcatttgcagttggaataacatatgcagtactaaaagtagatattctaattcctataataatgattggagttgtagcatttatctttacaataattggactttatttaggtaaaaaaataggaaattactttggagacaagtttgagatagtcggtggagtgatcttaattcttcttggtgtaaaaatactccttgaaggtcttggaattttagttttataa

SEQ ID NO: 607 - DNA, 783 bp, Methanobrevibacter ruminantium
  source 1..783: mol_type = genomic DNA
atgaaatataaaatcttagaaaatcccaattataaagaggcatatgagctaatcgaagaaggattagtgaaaaaagcaaccatgctcctatttgcatgctgtaaggtaagctatgaaggccgtgcattaagtgaacttgactatggagaaagaataatcatgattaagccagacggctgctttttgatacaccaagacaataaggtggatccggtcaattggcaacctccaaaatcaaaaacaaaagctttgataaaagatgaaaccctttacttagaaagccacaggcgaaagccacctgaactattggaagttgaagttaaaaagattcattatgcaagatataacctgattgaagattatgaagagcttgaaagggcaggctatgaaaaggatatgggagatatgatttgggacaatccacatatcatagaggaaggattccgcccgactgtaagggaatatgctacagagcatggtttcattgacattttaggaaaggatgccgacggaaaccttatggttttagagcttaaggcaagaaaggcagggatcactgcagtaaaacagataaggcgttatctcactgactttgaaaatagggaaaacaaggaaataagacatgaagaggaaaagcaaaaggtaagaggcttgcttgttgctccttcaataggtgatgatgcccttgagcttttagaggaagaaggtattgaatttgtctcagtagaaccacctcgtgagcttaaaaaagataaaaaagtaactttagatgcatttaaatag

SEQ ID NO: 608 - DNA, 1377 bp, Methanobrevibacter ruminantium
  source 1..1377: mol_type = genomic DNA
atggaaatgaatgaaaatgttgaaatgattacaggagaccctaaaaaggcaatcaataaacttgcttggcctttgatagcaagcatgctcttgatttttttaaataacattatagacagtatctgggttgcagggcttgggcctgaccctcttgctgcaatcggctatgtcacacctctctttatggtgcttgtaggatttggaaacggtatcggtgcaggtgcaacctcacttatctcccgttatatcggagctgaaaagagggatgatgcaaacaatgcagcgattcactctgccatattaagtgtggttgtttcattggttctcactgtcattgcccttttgatattagagtccttgcttaagctaatgggtgctgggtctgtattgaaatatgcaatggactatggtgtgattatatttcttttcactgcccctatattgatacctcctatatttggtggtgctttcagggctgaaggagacattaaacgggcaactgtgcctattgcacttgttgctgtaatcaatatgattctagatccgatattcatgtatgtatttggctggggaatttcaggtgctgcctttgcaacaggtcttgctccatgcttcggtctttgcatgatgctctattggatattcattaaaaaggacacttatctctcatataatagaaaggatttccataataatttgaatatgtataaggatattttagttgttggaatacctgcaagccttgagcagttaatcatggctgcacttgcagttacagtcaattatatgctcacccttgtttcaggttcagttgcagtggctgtatatactgcaggatggagaataatctcattaggactcttgccagctattggagttggaactgctgccattacagtcacaggtgttgcatatggtgcaaagaaatatgaaaacataaggactgcatgcagatattcagttaagctaggtctcatatcctctattatagtatgcatattgctctttatatttgcagatcagatagcatatatcttctcttattcagaagcaagtgcacatctcttgcctttaattgcaggattcatacaattgatgtgtctatttattttatatgttccattcggtgcaactgcaggtaacgttttccaaggacttggaaagggaaccacttcatttgtattgaccacattcagggagtttgtccttgtattggtctttgcatatcttttaggatttgtattccatatgggagagactggaatttattatggaatgcttataggtggatttattggttctgtaattgcatatggatatattgaatattatgttgatagattgattaagggaaaggttaaaggaagcgatatttaa

SEQ ID NO: 609 - DNA, 768 bp, Methanobrevibacter ruminantium
  source 1..768: mol_type = genomic DNA
atgcaaaaagtaattaattctcattgtcacatttatccagataagattgcagcaaaggctgttaaaggaatacgtgatttttatgaccttcatatgtctttaaatgggactgtagatgatttgattgaagacggtaaaaaagtaggggttgttcattatctcatccactcagttgcaacaactccaaagcaggtcgagtcaatcaatgaattcatttcatttgaagtaaacactcatcctggcttgtttacaggcttcggcacccctcatccagatagcgaagacattgaaagggacctagaccacataattgaacttggccttaagggcgtaaaggttcatccagacttccagcagtttgccttaaacgaggagcgtgcttttaggatgggtgaggcaatcaatgaaaggggattgcctattatgattcactgtggcgatttcaggtataattattctaatcccgaacagttaaggcctttccttgaagagtttccagaccttacagtgattggagctcattttgcaggatggagcatgtgggagaaggctacagaggaattggctggaactcctaatctgattgttgactgcagttcaagcttatattcattgactccagagactgcaaaggacttgattcatgcatatggtgcagataaggttctatgggctactgactttccgatgtgggagtctgtaagcgagatggaaatgtttaataagattgatcttagcgaggaagagagaaatacttattctttatga

SEQ ID NO: 610 - DNA, 999 bp, Methanobrevibacter ruminantium
  source 1..999: mol_type = genomic DNA
atgtttgatgtggaaagtattgaagtggagtattttactctcaaggaatttaaatttaaaaacggagaagtcctgaaggatgcaaaagtcgaatatatcacctttggaactcccaaatatgatgataatggaattataaataatgcagtaatctatttccatggaacaagtggcaattgtcattctgcaaagcgtttatgcgaatctatgggtagcggagatatattggacacagataagttcttctttatttcattaagcactttaggcagtccaaattcagcaagcccatcttcaactggccttatgaacaagtttccagaatatgacatagaagatatggtcaatttccaaaagcagtttgttgaggaaagattcggaatcacccatattaaggggcttattggaaactctatgggtggatttgaagtcctgacatggggatgtgtctatccagattctgttgactttataatttctcttgtaagcagctttaaggtagggggccacaattatatattaagcaaggtgattgacaatatattcacttcagatccggattataatgatggcgcatatgatttgcctatttccgattctttaaagagaagcttaaagctctcatcagatgcaatgtattcatttggattgtcacgggaggaatatcgaaataaccttacaaatgaggaattaaccgaattcatggcagaatttgcagaggaaagccttgaagaggatcctaatgatgtggtctatatgaataaggcttccattgattttgatataagtgaagatttaaagaatataaaggccaaggttttaattatagcaatcaatcaagatcagtatttccctcctaatttggatgcaattccaatgagcaagatgattgaaaacaataaattggtcatatttgattcctgtatgggtcatgttggctctggtgaattgtttaagatagaagatgacttaagggagtttttaactgaattctactag

SEQ ID NO: 611 - DNA, 405 bp, Methanobrevibacter ruminantium
  source 1..405: mol_type = genomic DNA
atggaaataacttataaggatactcatgactttaaggaagaggacctaaaagacttgttcttatcagtggaatggtcttcaggccattttccagacaagcttgtcatagccatgaaaaactttgagacagtttattctgcatgggatggcgataagttggtaggtcttgtttcagctatggatgatggaataatgactgcatatgttcattatgttctcataagacctgaatatcagggaaagggaattggaaaagagctattgaaaagaacaacagatcattataaggattatttgagaatagttgtggtttcatataatgaagagattgaattctatgaagcctgcggctttgaaaaggcagatgatgcaagccctatgtttataacagaattatggacttag

SEQ ID NO: 612 - DNA, 285 bp, Methanobrevibacter ruminantium
  source 1..285: mol_type = genomic DNA
atgtttagcgttaaagttgatgattatggtgaaactgaagatgatatgcattttgtaacttatatgatttcaggattaagtgaagctgaattggattatcttattgctaatcttgaaggagagcttgcccttgaggatggcaatctgtttttaaatatattctattcaaagcagttcttcccatttggttcagatgatgctcatttcaaattggacgactttattaaaagggaagaaatagaaatgacttatttcattgcaagctttttagaggatatgaaataa

SEQ ID NO: 613 - DNA, 942 bp, Methanobrevibacter ruminantium
  source 1..942: mol_type = genomic DNA
atgataagcaaagaaacatttgataaggacaaggcaaactttaaaggaacatatcgtcctttgctaaaggaaatagacaatcctacactgcttcaaatagatgaactacatggaattgcaggggcattaagcggaaaaaaccaaaacatacacaataatatcctgcttttgcttgccagcataggaaccataattacaatcatattcttcatctattttgaatgggacataagcgcctttatcataccttgcgtgcttttgatgtttatcctaataggaattcatttagtctcaaataagttgaactatcatgataaatatcttgaatacagggtcttagcagaatcattaaggcttcagtttttcctaagctatgcaggagcccaggaaaaggttatagatatcctcccttggtttatcgagcatggagttccattggttaaagaggtattgggaaccttggatttcactgaattgcctcaaaagagagaaataagggataactggattatacaccaaaagaaatatcatgaaggggctcttcaaaagtcaaaaaagaaaatgaggacacagaaaatagtcacatatgcatcaattacagtgacaatagccacctatataattgcattgatctttgaatatctcatacccgcttcaactttcaatttaaatggagatataattcatctaggcatcaaattagctatggctggaatgtctgcattcacactctttttaggaagctattacggaaagatgtccttaagcgaaaagatagatgaccatgaaaggatggttgaactatatggaattatagaagacagaataagaacagaaggagaaactgatgagatactttcatatgcagctagagagttcctgattgaaaacagtacttggtatgcgtatcaaagcaagaacaagccagatttggttgtttaa

SEQ ID NO: 614 - DNA, 918 bp, Methanobrevibacter ruminantium
  source 1..918: mol_type = genomic DNA
atgacaacagaattacagaacgaaattattcaattgaaagaagagaagaatgcaatcattcttgctcacaattatcagcctaaagagattcaggaaatagctgattttctaggagattctcttgaattatgcatgaaagcaaaagagattgatgacaaggacatcatagtcttctgtggcgtagactttatggcagaaactgcatatatgttaaatccagacaagaaggttttaataccagatattgaagcggaatgtcctatggcacatatgcttacaggagaacaagtaatagaagctaagaaaaaatatcctgacgctgcagtatgcctgtatgtaaacagtctcggagaggcaaaggcagaatccgatattctctgtacctctggaaatgttaaaaaggttgtagaaagcatagaagaggataccattctctttggaccagatacaaaccttggagagtttgtacaaccattcactgacaaaaagatcattccgattccaggtgacggtcactgctatgttcacaagctattccataaggaggatatagatgatgcaaggaaaaaatatcctaatgctgagataatcattcacccagaatccaataaggaagttcaggatatggcagattacgtcttaagcactggaggaatgctttcacacatcagagatagcgaaaagcaagaatttgtcattggaactgaagtggatctcattacaagacttgaagcagaattcccagataaaacatactatcctttgcttgaaggagctatctgcaagacaatgaagcttcacacacttgaaaagcttaaagactgtcttgttaatgaggagcctttaatcaccgttccagaagacattgcagaaaggtctatttctgcagttgaaagaatgcttgacgcttctaaataa

SEQ ID NO: 615 - DNA, 807 bp, Methanobrevibacter ruminantium
  source 1..807: mol_type = genomic DNA
atgacaacaacagaatggctttatcaaattctactaaatctgcttgatttaagcacaatcatatcaattattgtaataatcatagctgcagcaataatcataaagctaggagaaaaatcacttctaagaatagagaaaaagtatgaaatcaatcttactgcccattatctcctaaaagacatccttaaatatggaattattataattgcacttgctttgatattgaatctaattggaatagaccttcaaaacatcatattgagcttaggaattgtcagtatcgtcatcggttttgcatctaaggacatcgtatccaatttcatatctggaatatttgtaattggagataagaacgtccaagttggagaaaccatagagattgacgggagaaaaggagccatcacaaaggttgggtttagaaatacaacaatgattggtatggataactttaaggtaaccattccaaactctgttctttcaaccaaaacatataaaaacttcccaatgggagaggattataggcttaggcttgatgtgatattgcctcatggatttgatatcttcgaatacaagcaaaagatgacagaggctatggaaaaatatgaatatatcaataaagacaaagaaccagtcattttagctagagaaataaatgaagaaggctctaaagttgaaatcagcttttggataaatgattataaggatagagaccctggaaaagctgtaatcttagaagaaagcaataaactaatttatgactatctcatggatgaaaagaatgcaggcatcttaaggatagttaaataa

SEQ ID NO: 616 - DNA, 912 bp, Methanobrevibacter ruminantium
  source 1..912: mol_type = genomic DNA
atggaaatcatatttttaggaacatcctctgcagtgccttcaagggagagaaaccatgctgcaattgtcataagagaatttggagaagtatttctctttgattgtggagaaggaacccaaagacagttcattgaagcaaatgtaagtccaatgaaagtggataaaatattcatcacccatttccacggagaccacatacttggattaggaggactaattcaatcaatgggacttaggcaaagggaagaggatctagatatctatgggccaagaggacttaaaaaagtgatgaatgcaatcacccataccggatacttcaagattgacttcaatcttaacattcatgaaatcgacgaaggaattgttgtagaaacagaaaagtacagaatagaaaccacaaaaacaaaacatagcgtcccaaataatgcttattcaattattgaaaagaaaaaacctcgtttcataagggaaaaggccattgagcttggtgttccagtaggacctgcctttggaaagcttcacagaggagaagaagttgaaatagacggcaaaataatcaagccagaacaagtccttggtcctcctagaaaaggccttaaggtaacttattcaggagacacaagaccttcctttaagcttatcgaacttgcaagagacagcgacattttaatccacgaagcgacctttgaagaagaagaccggcttcatgcatacgaacatgatcattccacagcaagggacgctgcagacatagctagagaggcaaatgtagggaaattgattctaacacacataagcccaaggtatcaggaattcagcgtcttggaaagagaagccaaggaagcattcgataatgttgaagtggctgaagactttaaggtttttaatataaacagcaaagacaaggaataa

SEQ ID NO: 617 - DNA, 831 bp, Methanobrevibacter ruminantium
  source 1..831: mol_type = genomic DNA
atggatgatataattaaatttatgcttgaagaggatgaaggctttggcgatatcacttcaaatgcattgattcctcaagataaggttttttatgctaagctaatctcaaaggatgaaggaatccttgctgggattgagataattaaggaaatctttttggaatatggaatagatattctgtcctctaaaaatgatggggatgaaatcaaaaaaggagatattcttcttgaaattgaaggaaacgcaagaaaaattcttcttttagagagaactgcacttaaccttcttatgaggatgtctggcgtagccaccaaaacccatagggttgtaagcagtgtaaaagaagtcaatgataaggttagagttgcaggaactcgtaagactgctccagcacttcaaaagtatgataagatagctatttcaattgggggaggagaccctcacaggtacggtttggatgatatggttttaattaaggacaatcatattgcagtggtcggatctgttaaggatgctcttagattggctaaagagaatgtcagcttttctaaaaagattgaaatagaggttgaatctgccgatgatgcggtgattgcagcagagaatggtgcagacattatcatgtttgataatatgagtcccaaagaagctcaagatagtttagatgctcttattgataatgatttaaggaatggtgtccttattgaaatctcagggggaattactgaggataatatacttgattatgctcctttagatgttgatatcatatctttaggctctcttacccatcaagcaagcagcttgaactttagcttggatatggattga

SEQ ID NO: 618 - DNA, 258 bp, Methanobrevibacter ruminantium
  source 1..258: mol_type = genomic DNA
atggctgaacttgataacaacataaaggaaaaacttacagaagtgtttaaagaagaattaggcaaagacgattttgaattgaattatctgattacagacaacgaaatcacatttttctttggcatctctgaaggaaaggaactttctctcgatggaattgaaaagatttctagcataatcgatggaggttatgagggaaattccattgttaatcaggaatacaggtacaaattcaatttagacccttgttctgattag

SEQ ID NO: 619 - DNA, 2097 bp, Methanobrevibacter ruminantium
  source 1..2097: mol_type = genomic DNA
atggaaaatcgctatcaagaacatcaatcagatttcaaatatctcctaatcatcaatgatgatttggaatgtgaaataaaaataagaagagaaggcaatgccagtgaaaagaacctaaaagataatattttcacaattaaagaagcaagtgataaggaattagaagatatcggcaggatatatgacttattcgaccaatttgcaatagaaaatacaagatatgaaaaaatccaaatggacaaaaaggcattcataaaattcgccctaaacattaaacctatcctaagggacaataatgcagagcttatctcatcaaaagagattatagaaagcgatttgaaacttatcatggatactgatttaaaggaaaatgaattctctttaaaaaaactaaacagaatcaaatggatagtgagattaaacaaaggaagaattgccttaagagactttgacaagcaaacagaaaacaataaggaaatcctaataaccagaaattacttcttcatacttaataggaatgagttccttgatataaaattctacgcatcctcacttttaaaaaccactgaaaatagcgaaatactaaaattggcattatccgaagagatagatggctttaaatttgaagtgggggaaaacttaaagagacttataaatccttcaagggtttatgaggttccaaggacattaaagggtgaattgaggacctatcaaaagattggctattcatggcttgtgcaaaacataagatctggctttggatccatattggcagatgatatgggtttaggtaaaaccctccaagtcttaactgcaatcctatattttaaggaaaaaggattgcttgaagaaagaccaagcctgattgtcgttcccccaaccctgatttcaaattgggaacatgagattaggaaattcaccccagaactatcatattacatctatcacggcacaaacagaagatttccattggaagactatgacattgtactaagctcatatggagttattcggaatgatttagaccttttcttagataaggaatggtttttatacataattgatgaggcccaaaacattaagagcccacatacacagcagacaaaagcgattaaggaggttaatgcatacaataagatagcattgactggaactccaatcgaaaacagactcacagactattggtcaatatttgactttacaaataagggatacctctcaagcctcagtgactttaaggatagctatgtctttagaattgaaaggctggaagatgaaagatcccttgagaactttcttgcaataacaaaaccatttgtaatgagaagacttaagaccgatgagcaaatcaagggagaactgcctgataggattgtaaacgatatctatgcaagccttagcaaaaaacagataaagctatacaatgctgtcttagatggaatatttgaagagatagatgaactcaaaggaattgaaagaaggggaaccatcctaaagacaataacttccctaaagcaaacttgcaaccaccctgcacagtttttaggctcaggcaaaccaaaaatcaaagaatcaggtaagatggaactcttaatcacaattctggaaaatataatggatatggatgagaaggtcttgattttcacccagtacgttaagatgggagagataattcaagatcttgtttcaaaaaaacttaaaagagaggttcttttcctccacggctcacaaagcagaaacgaaaaggcagagataatagacagattccaggaagatgacaactataagatattgattgcaacccttaagacaggaggagtgggtttgaatctcactgcagcttcaaatgtgattcactatgacctatggtggaatcctgcagtggaaaaccaggccacagacagggtacataggataggacaggaaaaggatgttatggtttatagatttataacaaaaggaactcttgaggaagaaattgattcaatcattaagaccaaattggatttagctgaaaaggcaataagcgttgatgaaacattcattactgaaatgactactgaagagctgaaaagagcattatccttaagattataa

SEQ ID NO: 620 - DNA, 435 bp, Methanobrevibacter ruminantium
  source 1..435: mol_type = genomic DNA
atggctgaagatgaaaaaatcgaagaaatcgaagaaatcgaagacaaagaggaagaaaacttaccttttgctaaagcagaagtagttcgtttaatgaaagaaaacctcgatgatgacaagatgattagggaaagagttaaagttgaaatgaacaagttcttaggagacattcttaaacaagtatgtgaacaacttaacgattatccttacactaccattgagtatgaaatgcttaaggagtcaatctatccatacactaacattaaaaggattaaccaagaaaaagaaagaattttattacacttaaatgctattaaagcagactgtgatgcattagctatggatgttgaaaagactctcaaattaaaagatgttgcagatgaagatgcattcactcctttatctgaagcacaagatgaagaaatggatgaataa

SEQ ID NO: 621 - DNA, 516 bp, Methanobrevibacter ruminantium
  source 1..516: mol_type = genomic DNA
ttgaatgaagcattgactaaattgctagaccttatgcaggattataatgtcattctgcctaatgagttcgtttcaatggctagaggaatatccatgattgaatctgttgccaccacattagatcctaaaatagatgtcatggcttccatcgaaccgatagtcaaagaggtaatggaagaaagaatgaacattaaggaatctctttcaaacaaaaaaggcagtttggtttattataagaacatgcttaagacacttcctccacttttaacaaacagcgttcataagataaacaatggagatatgaagcttcgctttgaaattgacagaatcgaccatattgtaagcaagttttcattggttgttataattgcagcccttctgatgagctcttcaataactatgaccatcaatagagggccaatgttatttgacatgcctttaattgcagttttaggctatatagtgacttttattttaggagccatagccgttgcaaattacatatacagcagataa

SEQ ID NO: 622 - DNA, 666 bp, Methanobrevibacter ruminantium
  source 1..666: mol_type = genomic DNA
atgaagcatagattaaatttagataataaagacccaaattatattttgttgaaagaaatatttaaaattatggattctagaaaatccaaaagtatattagcatcctatggatttaaaaacttaaatagaacaatatttacttttaaaattatatttataagtatgttctttggaattgacattccattcattttaaacgagcttaaatccaaaaaagaacttcgcaaatactttaatatttctgaagttttgactgcagatcaagtttataaaattttttcagaaataaactctgaaaaacttataaaatgtttaaacagaatcttaaactcaaggaatatggttaaaagaagaggaaaaaaaacttttattgttgatgcgaccccagtggacgtagatattaatttccacagaaataaaaagactaaagaacatctggaaaaaattaatctcaaatggagttattcatcctctaaaggttattatattggatttaaagcaactgttgtattagattatgattctatgaatcctgtttgtattttagtccactctggagctccaaacgatgcaaaacttttcgaagaaattttagaaaaccttcaaaaaagacgaataatcagaaaaggagacacattaatctttgataaaggatattacagctaa

SEQ ID NO: 623 - DNA, 111 bp, Methanobrevibacter ruminantium
  source 1..111: mol_type = genomic DNA
ttggatgacattttaacttatccactagccgtatttaacaaaacaaagagaataatgaaagaaaaaagattatacaacagtttaaaaatggaattaatgaaaaaaaaatag

SEQ ID NO: 624 - DNA, 132 bp, Methanobrevibacter ruminantium
  source 1..132: mol_type = genomic DNA
atgagagaaatccacaaatatactccaaaatcagtagaaaaaaccgtttatctaaatgtatttttgggagcactgattatatcacaaggattttactcaaaaacgaccatacaacaattatctgaaaactaa

SEQ ID NO: 625 - DNA, 348 bp, Methanobrevibacter ruminantium
  source 1..348: mol_type = genomic DNA
atgatagaattaaataagaaatatgtttttcatgttccactttataaatacaaagatgaagaattaatccctattgatatggatgacattcttgatgaattaatagacgaattctatcaaaacggatatgacagtctatatatgacaaatatagaaacatattataaatatagattcttaacagagattttaataagcatctttgtatcaactgaacgcttagcaaaagaaaatcaggagtttccagacagaatatttaaaaaatggtttaaaaagaacaataaaatattggaacaggaagcttttgcttatgagtataataataaaatgtttattgaaaagctttaa

SEQ ID NO: 626 - DNA, 600 bp, Methanobrevibacter ruminantium
  source 1..600: mol_type = genomic DNA
atgactaaggatgatattataactggaaaacaagcaataatcaaaatggactgtccagtatgcggaggcaataaaacagctaattacatcactcaaactcacgagcttgcctattttggagagatagtggaatccacaatccaatgtgaaaaatgcggatttcgccatagcgacattataacaaccgaacagaaggatcctgcaaagcatagcctgataattacaaagaaatcattgaattcaagggtggtcagatcccaatctgccacagtttcactgccagaaatcggaataaaggtagaacctggcccaaaatccgaaggatacatctcaaatgtggaaggagttcttataagattcaagcaagccacagaaagtgcattaagaatgtttgatgatgaggagtcccaaaagaatgcaaatgcagttctagataagataaatcaagtccttgctggagaattggaaaccctcctacttattgaagatccctttggacagagcaaaatcatggacgttcgtgcaaagagcgagcctttaagcgatgaagagttaaagaacttgaaaacaggctttactgttattgatgatgaacaataa

SEQ ID NO: 627 - DNA, 948 bp, Methanobrevibacter ruminantium
  source 1..948: mol_type = genomic DNA
atgaaaccatatgtaattctcataggaagcgcttcagggataggaaaatccacagttgcagctgaacttgcaaaaacattaaacattaagcacttggtggaaaccgattttataagagaagtagttagaggaatcataggaaaggaatatgctccagcccttcactcatcatcctacaatgcatattccagccttagaaatcaggaaaattacaaaaaccaagcagagcttatcaatgcaggatttgaagagcatgcatcatttgtgcttccagcagtagaaagggtaatcgatagggcaataaaggaccatgatgacattatactagaaggggttcatttaatacccggctttattgacatagaacagtttacagacaaggcatcggtctttttcttcatattaagctccgatgaggaggaccacaagaaccgatttgtaaaaagagccatggaaataagaaggggaggaaagcagctagactactttaaggaaaacagaataatccacgaccatcttatagaacaggctcaaaagcataatgttccaatcataaaaagctatgagattgaatcaaccgtcaagaagatgctatcctacattaatgaaacctgtgaaacaatatatctgaaaaacacagttgatgaattggataaggtaggagaaatcatattagacagatacagcggaagcataaagaatatctcctatccgatcaagggatttaaagagcctctcataagaaagatagatgtaagcgagataagggaatatgataagtttataaagaacctgaataagttcccagagaaaaaggaagaacttaaagaactttatagtttaactgactatagagcatatcgcatttgtgcaataaataatgaaacaattgaaaaaattaaaaatgaccttgataaggaaggtttgctctttaaagaagatatgtaa

SEQ ID NO: 628 - DNA, 1053 bp, Methanobrevibacter ruminantium
  source 1..1053: mol_type = genomic DNA
ttgtattctataacttcagttgaggatcttcaagaactcaatccatatgtgattatcggatgtggcggaggcggagagaaattctccaatcttgaaggtattgaaacagttggttttctagacgataatcctgaaaagcaaggaaaactattctgtggtttagaagtagcatcaaatttatctgatttatttgaatcaactgatgcaaatacagttgctgtcatgttgcctattggcgctgaaggcgcagcattgaaatatgcagttgaagcattggcaaatggcaagaatgcagttgtttcatttagatcattatctttatgtgaaaatgagtctttattaaaattagcaagtcaaaatgatgtagttattaaggaaattagtccaagattggatgtagttcgtgaaatctgtggtacagcacctgaaaaatgctgtgaagtgcttcctaagatttcttatgaaccaaaagctaaagttgtctttgttggtggaacttcccaagagtgtggaaagaggacaactaccaagtctcttggtattgaagccgaaaagagaggcatgaaggctgctgtcatttccactgatgagatgggattggaaaagcctactgtatttaactttagggcaggaagcttgtcagctatggatattccttctgcaattctctcatccatgaaatatgtggaagaaagggacagtccggacatcatattcattgaaggtcaatccagcttgactgaagatggaaaccctcatccaagaggattgtctgcttgcatattgattggagcaaatcctgatgcagtcattgtcggacacaggccaaaccacccatatcgtgagccaagaggaatcgattatgaggttaaggctattgaagctgttgttcctacaacaaaagtcgttggattatctataaaccttagaaataaggatgaaggcatgactgtggaagactttgaaaaagagtatggattgcctgcagcagatatgtatgatggcggagcatctaagttattagatgctattttagattatttagatgaataa

SEQ ID NO: 629 - DNA, 285 bp, Methanobrevibacter ruminantium
  source 1..285: mol_type = genomic DNA
atgactaaaatggaaattgaattaaatgatgaacaacttgaaaaagtaaaaatactagaatcacatgacataagtgtcggtgatgctatagacatgctttttgaagccagagatagggttatatccatcatagatgatatagatgaaaaagatctagaagacgatactccaaatacagaagaagccaaagcagagcaaactcaattaactgtaaaaacatatgatatagcaattgaagattataaatcccacataagctgggctaatgacttctttaaactctaa

SEQ ID NO: 630 - DNA, 345 bp, Methanobrevibacter ruminantium
  source 1..345: mol_type = genomic DNA
atggttgttcaagaacatatctgcataaatgaagagaaaatccaagagcatagtctccaattaaaatctcttgaatcagatgccgatttcaaagacaaaagaatggatgaattataccgcaaaatcgataagattgaagaaaaattagatgttctaaataacaatataaataattttttattgagaaattcccaggaaaacaaaaaaatggaaattaggctaacaaagatagaaaccgatattcaaaatcaaaaattagaatcccaaagaagaattgcacgaatgggaatagctctaactgcaattactatattaataaacatttatttcaagataatgcattaa

SEQ ID NO: 631 - DNA, 969 bp, Methanobrevibacter ruminantium
  source 1..969: mol_type = genomic DNA
atgaaaatcgccccaatgaataaagataaaggaggtgaaaaaattttagactacagtatattaaaccataaaggattcaactcttttgaagagaaaatcaagaggataaaagtccataagccctatgataagatccttaaaacctcatttaagaaaaatcccaatgggtttttggagatattggaaaagggagcaatatttgaagagtttgtggatagtgaaattataaatgctttttttagggaattgcattctgatattattataagagtttataagaagagaatctatattattgaatttcaaagcagcagattaaagctagaggatattttaaggtttgggctttatagggccagcatagctcatcaagaaaaaaaggacatacatctttatgttgtttcaaaagagccgataaagagggataaaattgaaaataagtatggagactactggtttactatacatgtcaaatcgttaaccgatatggattataataaagctttaaataggacaaataataaaatagagaatgaagaggaagagtttacagaggaggattttgtttatcttgaaattagtcctttaatgactcgaaaaaagaaaaagcagagacagttattaaaaagagtagctgagatgacaaataagttggatgggagaataagcagggaaaagttgattgaaatcaaatccatacaattcgtacttgcaacagaactcctaaacgacaacgaaaaagccaaaatagccaaggtgataagcatgcaatcagaaggaaaagaagaagtcttccaaggatacctaacaaaagaagaacgaaaacaaacctatgaagaaggaagagaagaagaaagagaagaaatcgtaaaaagcctagccgaactagatgtatcaccagacatcatagcaaaagcaacaaaaatgagcaaagcagaaatagcaacactcacaacaacaataatctaa

SEQ ID NO: 632 - DNA, 510 bp, Methanobrevibacter ruminantium
  source 1..510: mol_type = genomic DNA
atggagtatagattgccaaggatggaagatgaggatgacataagggacttcataagggagtgctgttatgttgaggaatgctatgtcatgctcaagcaggagctccttctttcagattacagcaaatgggtttctctaatacacagatatgcatctttaggcaatggaaaatggggaagatccttgcttcttcttgcttatgatggttctcgattagtcggaatactgcctatcagatatgaaatatccgaggactatgcttttctatatggcaatattggctatcatgtaagaccttccttaaggaatatgggctatgctaccaagatgcttaagcatggattggaaatctgcaaggaaaaaggaatggctcgggtaatcgttgggtgtgatagggataatctggcatcttctgctgtgataaagaaatgtggcggtgttcgtcttaggacattcaatgactcctatggcgttaacgattattatggaatttatctctcaagcgaataa

SEQ ID NO: 633 - DNA, 654 bp, Methanobrevibacter ruminantium
  source 1..654: mol_type = genomic DNA
atgaaaaccacctcagtgatagtccttttagttattttaggctatggattaaaggttactcaagacgtaatcaatggaggcaccagtctgcctaagataagccttaaggaattgctcaatttcggagtgaaaggaaccatcgtatatacattctatctgaccatacaagcttcccttttaggtttgatttccctagcaatgaatttccctgaatttgaattggaagagatgattctaaatcttcacgagaccatagaattgttttttgagcatgatcctatcagcttcatactatttatcatattaggacttctcattgtctatggaacaatattctttatggaaatcgctcttgcaatactagcagatggggaaacactaaaagcagcatttgactttaaaagaatcaaaagaacagttgaaacaatcggttggaaggaatatgctgaagactatacaaagattgtagcggctgttgttattttagtatttatcaatggatatttccactcttatggttggataagcattataataggagtattgactgatattttggcatttacagtggaatatcgtggaattggaaatatttatagaggatataaacagaagataaatcaagagacagccctcgaggatacaagcaattaa

SEQ ID NO: 634 - DNA, 1407 bp, Methanobrevibacter ruminantium
  source 1..1407: mol_type = genomic DNA
atgaagaagacaaaaattatagctagtgtaggtcctgcatctgattcagttgaagttatgagtgatatggttgagatggggatggattgtgccaggatcaatctctctcatgctaatcaagaggatattttaaagataatagatgtggttaatgaggtgcgtaagatatgcaatgtgcctttggcaattatgtatgacacaaaagggcctgagtttaggacttctgaatttaagcatggaggtgtgctgcttaatgaaggggacaccattaagatgagcaagacttgcatacaaggtaataaagaggaatttggagtcaatcataaagaagcaatcgactttataaacgtgggcgacaaggttctaatcgacaatgctctcttggaatttgaagtcattgacaagaaagaggattatgtgctattgaaggctttaggagatggaaagattctaaatcataagaccatcaatgtccctggtgttgacttgaagcttgattttataagtgatgtggataaggaggacatatcctttgcagcagggcattcctgtgattatttggccctttcttttgtaaattcaggggaagatgtaattgcagctcgtaaaattgtggaggacgccggaggagatgcccttatcatttcaaagattgaaagtcgcatgggccttatgaatcttgatgagataattgatgaatctgacggaatcatggtggctcgaggggacttgggggttgaggtaccaatggaacatttgcctataattcaaaaggacatcatcagaaaatgtcgtgaaaagggcaagtttgccattgttgcaacagagatgcttgcttcaatgtatgaaagccctagacctacccgtgctgaggtttcagatgttgcaaatgccgttttggatggaaccgattgtgtaatgctctctggagagacaactatcggtaagcatccggtccatgcagttgaaatgatggatcgtatatgcaattatgtggaatcgaccattgactatagtaagcataccttttacaagggaaaggtggctatcagcgatacaatcgccaagcttgtcataggagctagcgaatattcagacattaagctaatagtcacacctactttgactggatttacagcccgcaaaatcagcaatttgagatcaagctctgcaattttagcttgctgtccatctaatgacattgcaaggaagcttgttttaaattttggagtaaaggctgtaataactgacatttatgagaatactgatgaaatgattgataatgtggtggatattgctaaaatggaatttgatttaaacaaaggcgatcttatagtggtcacaggaggattcccattaggtaagactagaaatactaattccttaaggatattggaaatcgattga

SEQ ID NO: 635 - DNA, 1491 bp, Methanobrevibacter ruminantium
  source 1..1491: mol_type = genomic DNA
atggctaatgaaaatgaatggggcagcaatcttgcatttgtacttgcaatgattggttctgcagttggattgggaaatatctggagatatccatatgtgctttattcaaatggaggcggagccttttacattccttatctaattgcaattttagttttagccattcctctcatcattctagaatatggggtcgtctataactataagtcctcatttacaaaggctatcgtaaaaataaagcctaaattggaattttatggttggattcttcctgttgtcacttttattatgacaatttactattcaaccatattgggctgggatggaatctatttcatcctaagcttctttaagggctggggatcagatccaaatacatttttaacagtttccctattgcagtctgcagattcaataagtggcattttaaacttcattccagtcattgccatttcaatgattttcatatggctcataatatggttcatttcccataggaacttggatgaaggcttaggccgtgttgcccgatactttgttccaatgctttttgttataatgatagtgattgttgctttttcattgaccctgcctggagcatccattggtcttgctgagttgtttgatcctgattggtcccttttatacaattatagcatatggatggctgcattcggtcagatattcttctcattgagcttgggaatgggggctggatttacatttgcaagctataccaaaagggacatagacttgatttcaagtggattatgtgttgttttggctaatagtctttttgaaaactttgcagcattaggggttttctcaattctaggatatatgtcccttgagtctggagttgctgtttcaaagcttgtatcacaaggcacaacactgatttttgttgcatatcctaaagtgtttaatattttaggaggtgtcgctttgattttagggccactattcttttttacagtttatgttgcaggagtcacaagcatattgtcctcctttgaagtgctttcaatttccattcaggacaagttcgctttttcaaggaaaaaggctacaaccgctttatgcattgttggagggctggcttcaatggtctttgccacttcagctggaggttatttgcttagcattgcagacatatttgtaaataatattatggttttgttttcagtgattgttcaaaccatcctttttgcatgggtattcaaggctgaaaggctggtggactttttcaatgctaaaagccgatttttaaaacttggaagatggtggttaatccttgttaaatatatttgcccaatccttttaactgtaatctggattggagaattatataatcttataaaaatgggttcaactgaatttgtagtgattttaggagtattgcttgcaatattattgatatttgcatttatatttacaatcaggccagcaaaaactgatgaatggtttaaaaccgaagagaggattaagtaa

SEQ ID NO: 636 - DNA, 618 bp, Methanobrevibacter ruminantium
  source 1..618: mol_type = genomic DNA
atgggtgaagaagaattaatagaccaatatatgaaacctcatggcgaggaaggaattaagataattgaaagcatgaacgaagagcatcaaaatatctctgaatttgcatttgaatgtgtcaatctcggtgcatatgatgatataattgatattggctgcgggggcggcgtaaacatagaaaaattcctaaatgtgactaacggacatgtggatggccttgattactctgatgtgtctgttagcgaatcaatcaaaagaaatcagacttcagtagatggtggaagatgcaatgtaatcctaggggatgttactgacatgccaattggggatgagtcctacgatttggctacagcattttctacaatctttttctggcctaatcttgttgaaacatttaaggaagttaaaagaatcataaagccaaatggacaatttatgatagcccaaggaaccgatggaacaaatcccgaagatcaggaatggattgataccattgctggaataaatgtctatactgctaatgagcttgaagaatatttgcttgatgcgggatttaaaagagttgatgtatttaccaaggaaaatacttatcttttagttgttattgggaaaaaatag

SEQ ID NO: 637 - DNA, 498 bp, Methanobrevibacter ruminantium
  source 1..498: mol_type = genomic DNA
atggatttcaataaggaaaaattcaagatggtcttgcagtacatcatttacaaatgcggaattaaaaatactgttggaaggacagttcttcataaattgctatatttttcagactttaattattttgagctttataataagtctttaaccaatgaatgctatagaaaattagctagaggtcctgtgccagttcattttgaatctgttgttgaggaattgattgatgaaaagaagatctctttaaagaacaggagattgccttgcggcaagcttatgaacaggtatttctcattggaaaagcctgagatagacttaaaagaagatgaattagctgtcattgatgaagtcattaaggatttaagccatatgaatggaaagatgattggagaatactctcttaaggatatgcctgtaaagcaggctcatgataatgggagtattgactataatcttgtttttagccgcagtttacaatattcaaagagaactgacgattag

SEQ ID NO: 638 - DNA, 357 bp, Methanobrevibacter ruminantium
  source 1..357: mol_type = genomic DNA
atgttagacataccaaaagaagaccctcaagttagaagattcattaaactagttaaagaagagggatacagttatgaaaaagctttagaagaagttggagcagactatatcgatgagcgagattgggaatatttcggattcaatcaaagagaaggagattatagggacttttataatttaagacatcctcctaaagaacatcattacttatcagggtccaattcatcatcagggtccagttcaaataaaagacagtccagcaaatgggatgatttaaaatgttatatgagtgttttaggcccattgataataatctttgcaatagcaattctttggggagtttttaaaggagggtaa

SEQ ID NO: 639 - DNA, 486 bp, Methanobrevibacter ruminantium
  source 1..486: mol_type = genomic DNA
atggattctaaaaaaatattagttattttaggtttaactgttttagctatttttttagctagttcagttagtgctggtgacttgatttctactgggggttataatccagattcacttattatacttgaaggagccgattttaacattccagatggatttgaaagaattgaggataaatccattgcaaatcagacaagaaattcaggagtcttttcatccattttaaatagggaagtttatgggaatcctaaaggtgaggagatagtaatttctgttgtggattttgataattttgatgcaaatctgccaattcttagcatgatttgcaaaggctgccaaaagaaggaattgcttggctatccaggttttattggctctgatggaaactccactaagttttcttatgtatttgataataaggtggtgtctatatccgctccaaatgaggatttgattaatcaggttctagtggttgaggatgcatag

SEQ ID NO: 640 - DNA, 123 bp, Methanobrevibacter ruminantium
  source 1..123: mol_type = genomic DNA
atggctaaaattaattattcttatagtaaaaagtattgcataattgttttcattatgatgttttttatgaaaagaaattattccaaaaagaattataaaataggaaaaacagatattttataa

SEQ ID NO: 641 - DNA, 339 bp, Methanobrevibacter ruminantium
  source 1..339: mol_type = genomic DNA
atgaaagaccttattggattttgtggtttggattgtgagctatgtcaagcttatattgcaacaattaatgatgatgatgaactccgtgaggaagttgctaagcactggagtgagctcaataatgttgaaatcagtcctgaaatgattaattgtatgggatgtagagttgaaggggtaaagactccattttgtgattttatgtgtcctatacgccaatgtgctttggagaataattatgatacctgtgcagactgtgataaaatggagggctgtgaaaaactagtgatgatctttgaaaacaatgataatgcttataaaaatttaaaacatcattattag

SEQ ID NO: 642 - DNA, 549 bp, Methanobrevibacter ruminantium
  source 1..549: mol_type = genomic DNA
atgtctaggagatttgcagttatcgacactgaaacaaattggaatgatgaagtaatgtctatcggtgttttaatcgccagatgcaagaattttaaaagaacagactctcgccattacatattgcctaaggcagaggcagtagggggcatgtattcaaaatcaatgagagttacaagtcatgagattctgacaaagcataggaatgatgccattgacgatttaaggtatttgcttgattccaatggtgttgatgatttgtttgcatataatgcttcttttgataatcgtcatttgcctgagctttctgacttttgttggcgtgatataatgaaggttgcagcttataaacagcataatccatccattccaaatcatatgccctgcttcaagactggaagattgagaagaggttatggagttgagccaatgcttcagattttgggaattgaggactactgtgaaagccataatgcgattattgatgctagagacgagctgaagatcatggagcttttaggatatgatatagatttctatcctgaaatctga

SEQ ID NO: 643 - DNA, 609 bp, Methanobrevibacter ruminantium
  source 1..609: mol_type = genomic DNA
atgactgtgatcatgagcactaacaccatgggctatgcagatttggatttaagacctgctgaaatgcaaagaagcacaatgtacatttccataaacgaatgccctaattgcggatatgctgaatttgacttctcaagagaacctaaaatcaaaagagaatatcttgagtcagaagagtatcaaagctgtgagggaatcgaatttaaatcagaacgttcaaagccattctacaaagcttatctgattaatagaaaagaagaaaacacccaaaatgaacttaattttttaatgcattccatttggtcttgtgatgattccgaagattgtgaaaacgctagaaaacttagaagaattgcatgccaattgcttgaaaccattcttagcaatattgaaaaacataaagaatgggcagataaggacactttaatgctcatgaaatctgatttgatgagacgtggggagatgtttgatgaattgattgaagaatacgagactgtttcttttgaagatactcttttgaataatataaatcaattccaaatcaaaaaatctaaagaaaaggacagtgccagatacaccattggaactgtgataagcctttatggatag

SEQ ID NO: 644 - DNA, 627 bp, Methanobrevibacter ruminantium
  source 1..627: mol_type = genomic DNA
atgaacactaaggaaaagatatttgatgtgtctttagatctgttttcaaaaagaggatacgactctgtctcacttagagaaattgcagaagaggtgggaattaaaaaaagctcaatatatagtcattattcctctaaagaagcaatattaatggatatatttgaatattttacagatcttttcgaatatgatgatttaatcaacagtaaagagcttgtcttaagcgaagataatgatgtattgattgaaaaccctgaattgttttatcatatgggctctgaagccataagggggatgtttaaagaggaaagaaaccttaagatttggaagctgatttttatacaaatgcattataatgaaaagataaggaatttcttccaaaaggaaatgcttcttaagccattgatattttgggagaacttttttgctattctaaaagaaaaagggataattcgtgcagattccaatccgcagttacttgctaaggagtattatagctttccaatctttttgcttttagaaatctgtgcaaagtatgatgacattccagagagctgtttggatgacttctttaagcaagctgaagagcatgcaaggtttcttttggattgtgtgaaggtgaaataa

SEQ ID NO: 645 - DNA, 1092 bp, Methanobrevibacter ruminantium
  source 1..1092: mol_type = genomic DNA
atggattctaagtttaacattcaagaatatttggctaatggggttgaagtcatcttaaaggatgcctttaaagccacattaaagaatccaaaggaaggcttatatttggccaagtttgcaaagcacgctagaaaggccagtgaaatcagaagggaatatagcaaaaagggccagaatattccagttttccttatagcaagcataacaagttcctgcaatctccattgtgtaggatgttattctagagcaaataattcctgtagtgatgaggctcccttaaatcagctttcagctgatgattgggaagatatatttaaacaggcaagagatattggaataagtttcatagttcttgcaggtggagagccaatgattagggaggatgttataaaaaaagcaagtaaatttcctgaaattttatttccaatatttacaaacggaaccatgttaaatgaggattatttgaaattattggataaaaacagaaaccttgttcctatattgtctattgagggggatgagaagcttactgattcaagaaggggctctggagtctataaacagttgatggattctatggagacaatgaagaaaaagaatattgtatttggagcgtcccttacctttacaaaaggaaatatctcttccctactttcaagggactatattgaaaagctgcatgatttgggatgcaaggtggtctttttcattgaatatgttccagttaatgaggaaacagttgatttggctccaagcgacagtgaaagggaattattgctaagtgagcttgatgaattgcgcagtgattattcagatatgctatttttatcattccctggagatgaaaaggaatctggaggttgccttgcagctggaagaggatttttccatattaattcccatggaggggctgaaccttgtcccgcttcaccttattcagatataaatgtgtgtgagacttctcttttggaagctttggaatcaaacttgtttagatcccttagggatggtggtcttttgctggatgatcatgaagggggatgcgttctatttgaacataaagaagaagtagaaagtttatttgataattga

SEQ ID NO: 646 - DNA, 414 bp, Methanobrevibacter ruminantium
  source 1..414: mol_type = genomic DNA
atgagttttacagacaatttaaagaaaagtttaggctttgaagaaggagaatatggtagtggatatacttttgatgaaggttataatggtgaaccggacccattttttgaaggaattttgattccctataaatttccagaaacaaaggcttttatggaaatcatcttaattaaacctaaatctgttgatgatatggattatatttttgatcaagttgtagaagagaacaatcctgtgattatggatttaagtttcatggaaaagaaaggtgcagctgaatttaaacaagcaggagaaaaattaaaagttttaagacaacaatataatgctgaagctatcttgctttctaaatctgatgataaaaatttaattattgtgactcctgcaagagttaaattgattagaaaagagtaa

SEQ ID NO: 647 - DNA, 756 bp, Methanobrevibacter ruminantium
  source 1..756: mol_type = genomic DNA
atgatagatacacatatgcatgcagacgcaagaagcagtgaagactttgaaaaaatgtttattggcggaattgatacagcaataagctgctcatactacccatacaaagtaaataatgccgaaatactcttaaaccatttaaatagaatattgaactttgaacctaaaagagccatggaatatggccttgaattaaagattgccttaggaattcatccggcaaactcaattaaagacaatgaaataatattcgactcattaaaagaatggatagacaacaaagacataatagcaattggagaaattggtcttgatgaaaacacagagcttgaaaaggaagtctttaaaaaacaattagaacttgctgaagagacaaaatcaaaggtaattgtccacacaccaagaaaaaacaaattagaagttttaaaagacattaaagagattgcacttgaaaatatcaatcctaagcttgttgtaattgaccacataaaccttaacaccattgaagagataattgatgatgatttcaccataggattaaccgtccaaccgcaaaagatggaagttgaagaggccattgagattttggacaaatatgactttgataagtttttattaaatagtgatataagcaataaaccatcagatcctttatctgttccaaagacagtaagaacattgaaaagacttggatataaacaagataaaattgataaagtggcttttaaaaatgcagaaagcttttttaacttgtaa

SEQ ID NO: 648 - DNA, 813 bp, Methanobrevibacter ruminantium
  source 1..813: mol_type = genomic DNA
atgtattatcacgattatgtaaaagagcaattgcgatttttgaataattcagagattcgattgagaatattggcttatttgtctaaaaagccattcagtttagcagactttaaaaatagttcctttgtaagctatagctctatttcctctaatgtttataagcttacggatgaaggatttgtagagaagattgataaaaataacttcagattgacaaatattggtaaaatttacctgatttccttaatggagtttcatgatacaataaatacggtaaataatttctcagacttctggttggatcatgatgttcgggcattatccagcaaatatttaaagaggatttcacagctggaaggttctaagcttattcaaagcagacctacagatatctataagactcatgaggagtttagaaatctatttaaggattcagatattctaaaggtcattttcccttatttgcatcctgaatatcctagattgattagaacattgctttccaatggttcaaaaatagagatattggttccaagagtaatctgtcgacgatttatcaagagtgtgggagaatccttggttagaagctcgattaagcagaatgctctttcgataaagttcattgacgatgaggttaagcttgctttggctatttctaataaatgggtttctattggtctctttaaacgagatggaagctatgaccaaagcagattattggtttcagataaaaaggatgccattaaatgggcatataatattttcaaatcatatgataaaaaagcagaacttgtggaccttagaagtttataa

SEQ ID NO: 649 - DNA, 819 bp, Methanobrevibacter ruminantium
  source 1..819: mol_type = genomic DNA
atgattggtgatattaattttgaattggatagtgaaaattttagaatcatgcgtttcttattaagctcttttatgagaacagatcttttgttgactttagtgaattcttcttctcgcttgtgttccttgagatcgaatttaggaaagagttctgctacaatcttgcatggagttagtgagttggaagcctttaatttaatttcaaaggattccaaatattattgtctctcttcgaaaggttttatttatggcttggcattggataagctgtgtaagaatctatatatttttcagtcaaatccagaattctggcagaatcattttatagacggtcttccaagcgaatttgtagaaaatgcatatctcattaaggattccgtttatatatgcagtgataagcttgatatggaaaagccgattagggattattttaagaatataaagaattccaaaagcattaagattattttgcctatattttctgaattatatttggagatgattttaaaaactgttggaagcgatcatgacttggaattgatagtggatgaggaagttttcacttcaattaagaaatccagatattataggaggattatacgtctatccaaaggtggaaaaattattttgagaaaatatattggggatttaaatttatttttaacatttagcgatgaattcatgtctttgaatctatttgataaggatggattctttgatgattctgaaactattttcaataatactccagatggtgttaaatgggcagaaataatgtttgattactttttggacaattctaatgtggttgttttgtaa

SEQ ID NO: 650 - DNA, 1713 bp, Methanobrevibacter ruminantium
  source 1..1713: mol_type = genomic DNA
atgaatcatgaaaaaatgtcaaacatagcaagaaaaagaggatttttatggccgtcctttgaaatctattccggagtgtctggatttaccgattacggacctctcggagcaagcctaaaaaacaacatcatgcaaaaatggagaaagcaatacattgcaggagaaggcttccacgaaatagaaggacctaccgtaatgcctaaagaggtattaaaagcctctggacacgttgataactttacagatccaatgacaaaatgtaaagactgtggagaagtctttagagcagaccacattattgaagaagccattggagaagacgtagaaagccttgaaaatgaagagatggatgaaatcgttagaaaaaatgatatcaaatgtccaagctgtggcggagagcttgcaaatatttggaattataacttaatgtttaaaaccgaaatcggagcaaaaggagacaaagtaggatatatgagacctgaaaccgctcaaggaatattcattctattcaaacgattgtccagattctttaaaaataagcttccattcggtgctgtccaacttggtaaagcatatagaaatgaaatctcaccaagacaaggagtcatccgccttagagaatttacacaagctgaagcggaaatcttcctagaccctagagacaagacacatcctaaattcagccagattgctgatgaaatcttatatctatcatctcaagatgttcaaataaacaataaggaaaccttggaaatcaccgctcaagaagctcttgatcaaggagtggtatcctctgaaacattaatctaccaattataccttgcaagaaaattccttaaggaattaggcattccagatgaagtattaagattcagacaacacctacctggagagatggcacactatgcacttgattgttgggatgtagaatgcctaactgaccaatatggttgggttgaaatcataggtattgcagataggggagattatgacttaaaagcacatacagagttcagtaatgaagagttaagcatttacattgaatatgatgaaccaaaattagtcaaaaagaccattgtaaaacctaatttaaaattattcggacctgcatttaagggagactctcctaaaataaagacatatattgaaaatctcagcgatgaagaggtcatagaacttaaggaaaaaattgaaagcaaaggaaaattcacccttgagctagaccaaagctttgaaatcctcaaagagcatctattgtttgaggacattgaagaggaagtcaaaggagaaagaatcatccctcacgttattgaaccttcatttggtattgaccgtatcctttattgcacactattacattcattcaagacagaagaagatggtttcgataaggaatactttaaatttgctaatgagattgctccaatacaagtcagcgtattcccattgatgaatagagatggccttggagaaatagcaacagaaattacacataacttacgtgaagctggatttacagtagataatgacacttcaggaaccattggaaaaagatacgctcgtgcagatgaagtaggtgttcctatagccataactgttgactacgatacaaaagaagacgatacagttaccgtgagaaatagggacactgaagaacaagaaagagtaaaaattgaagacttaaaagaagtcattgaaaccaaatacctttaa

SEQ ID NO: 651 - DNA, 588 bp, Methanobrevibacter ruminantium
  source 1..588: mol_type = genomic DNA
atggctattttaagtgacagagatattaaaaaatacttaaatgaaggcaaaataacaattgaccctttagaagatgaaaagcaaatacagccgtcatctgttgacatgagactaggggatgaattcaaagtctttaaagttattagaaaacctttcattgaccctaaagacccagaagaccttgcatcctatatggaatccacaatagttccagaaggagatgcattcatcatccatccaaacgaatttgcccttgcaaccacatatgaatatgtaaaaatcccagatgaccttgtagcaagagttgaagggcgttcatcaatgggaagactgggagttaccatgcatgtgactgcaggctttattgacccaggatttgaagggagaatcacccttgaaatctctaatattggggcaatgccagtggcattatatccgggtcaaagagtatgtcagcttgtatttgagacaatgacttctccatctgaattgccttacggccatccagaaagaaacagtaagtatatgcgtcaaagaagaccagaaagcagtagaattaaatttgattatgaattaaatgaaaaataa

SEQ ID NO: 652 - DNA, 876 bp, Methanobrevibacter ruminantium
  source 1..876: mol_type = genomic DNA
atgaggaaaggattttacgaagatatcagtacatttttagtgaaacatacatttcacactcgttttttcctttcaagattaactaaaaaatctaaaattgctaaaaaaatcatagatagacttcttttccaaggtgacgaagtttatgttcttccaaacaaaaatacagtacaaaaaacaaaatctgccacaatctctgcaaacattgaagtcaaccaaagcttccagaaagacgattccgaattcgttccaagcgaaatattaaaaattgcaattagagaagcttcagacattgtcataatgaacaaatgcctttgcagaagctctaatgattgtcaagactatcctcaagacttgggatgcatatttttaggccctgcaagcagaaagatagcctcaaaatatggaagaagagctactgtagaagaggcattggcacatgttgataaagcagatgcagaaggattgagccacgttattggaagaaataagattgataccatatggatgcatgtaagccctaaagaagagttactgaccatctgccattgctgtccatgctgctgtctatggaaagtacttccagacttggacaatgatattagcgataagatcatgagacttgaagacgttgaagttcatccaataagcgacaactgtaaaatgtgcaaaaaatgtttaggggatgacatttgctttggcggtgcaatcagcttggaaaacgacaagataactatagatcaaaacaaatgtgtaggatgcggacactgtgttcaaacctgcaaattcaatgctattgagttaaattatactcaaaaatcagttgattctgttttaaatagaattggagaattagttgattataagaaacattaa

SEQ ID NO: 653 - DNA, 792 bp, Methanobrevibacter ruminantium
  source 1..792: mol_type = genomic DNA
atgaaatacaaagataaaaaatcagagagaggaaaagtaaaggaaatagttgaagatgaagaaactataagacttaaagaaaacatctatgttgtctttgtagaatgtgaatctcctggaaatgttggatttttagcaagaaccatgggaaactttggattgaataaattagtcctaatcaatccctgcacacttaaggaagaagcttattatcaagccacccatgcaagggacactgtagagaatgcaatgatttatgacactgtaggggaatttgtcaaagacaaaaagattgacttcataataggatctaccggagctcccggaggaagctataatatttcaagaattccattgaagcctgaagagctagcaaaatcaatgaattacaatgataagatagcgattctatttggaagggaaggaaatggactgaccaatgcagaagtggacatgtgcgatttgattgtaagcattccaaccgatccaagctatccgattatgaacatttcccatgcagctgcaataatcctttatgaaatctttaaaaacaggaatgagtttccagtgcaaggcctggaagaaagcacagcaatcgagaaggaatatcttatcaaggatatggaagaactcatcgataacttaaacattccagaacataagaagaaaaatggattgaaagtattcaagaacattgtaaatagggctttcattacaggaagagaagcccatacattaataggtattttaagacgtttaaatttaaaaataaagcatggagacgaatattaa

SEQ ID NO: 654 - DNA, 1527 bp, Methanobrevibacter ruminantium
  source 1..1527: mol_type = genomic DNA
atgataacagtttatgtaaagagattcgatagcgagaaggatgaggagcctcatatcgaagcttacgaaattgaagaaagcccaggaatgaaagtgctagatgcattagaagaaatcaacagaaaatataatgcagacattagctttagaagctcatgcaaagcaggacaatgcggatcatgtggagtaaagattaacggaaatggcgcacttgcttgcaaggcccaaataaaggacaatagattaattgaaccattggatttcccagtgattaaagacctagttgtagatagaagctctgcagatgaaaaggtaaagcaattgcaattaagcctaaattgcgatgatgagactgcacatgagaaattaaatcctaaagatattaaggacactaaaaaggtcagaagttgcattgaatgctatacctgtctttcaacctgtcctgttgtaaagcactttaaggaagacttcctcggaccatattacttaagatacctctctaaatttgattttgacccaagggacgaatcagacagacttattgaagcattagacagcggaatgtacaactgtacaagctgcggcaaatgcggttcaatctgtcctaaaagcattaacagctttggagatgcaatagaaaagcttagagcaatggcttatgctagggatttaggacctcttgatgcccataaaatgtttagggaaaatgttgtagcaagcggaaggtctgtaagcaaacctgaagagccattcattgaaacaatccataagaaatgggatgaagaaggcaaatattatactgatgacgaaagcaatgatgaaaacaaaaataaagaaaaagtggccttattcactggctgtatggtagactacagagcacaggaagttggatatgccttaatagatgtcctaaaggcaaacaatattgaaatagacattccagaaggccaagtatgctgcggctcacctcttcttagaacaggacaagtagatgctgtccaagagcttgtagataagaataaggaagtctttaaggattatgataaagtaattacaatctgtgcaggctgcggagccacacttaaaaacgaccatccgaaatacggctcaaatctcaatgtagaggacataagcgaattccttgtagataagctcgatacaagcaagatgaagccattgaacactaaagtaacttggcatgacccttgccacttatccagaggccagaacattaaagatcaacctagagacataatcgaaatgattccaggagtcgagtttgaagagcttgaacttccttgccaatgctgcggtgcaggaggaggaatcaagtccggaagaccagacattgcattggaacttgctaaagacaaggcagagatggttagagttaccggtgcagattatgttactacaatctgtccgttctgtcaaataaacttacaggatggtttaaatgcaattggtcttgataatgttaagacattgaatcttattcaattgcttaaaatggcttatgatgaataa

SEQ ID NO: 655 - DNA, 1992 bp, Methanobrevibacter ruminantium
  source 1..1992: mol_type = genomic DNA
atggcttatgatcaattagtgactagtgaaaaaggagataaactttttctgcttggtaatgaagctgctgtaagaggagctatagaagctggcgtatcagttgcagcaacatatccaggaactccttcttctgaaattggaaacatattgtcagtagttgctaaaagcgcagacatgtattttgaattctctgcaaacgaaaaggtggctatggaggttgctgcaacagctgcagcaagtggtcttagatcatttacctttatgaagcatgtaggtttgaatgtggctgccgattcattcatgactactgcatattctggagttaagggaggaatgattattcttgtagcagatgacccttccttgttttcatctcaaaatgaacaggatacaagaaactactcccgtttatcttcaattccaatacttgaaccttcaaaccctcaagagataaaggacatgatggtttatggctttgacttatccgaacagtttggaattccagttattctcaggacaagcactcgtgtgtcccatatgagaggaatagttgaaatgggtgagataaacagtcctaaatcaactacaaaggaagtcaagtcagataagcattggcttaaaggatactttgttaaaaatccaagggaatttgtccctgttccagcaaatgcacttgcaatgcatgagagattggttgaaaagataggaaaaattgaagatgaggccaatgaaagccctgtaaatgaggttgtttcatttgaatctggtgtgcttcaaggcaaatatggagtaatttcctctggaggggcattcaattatgcatatgacattgtagctggagaaaatcttggaatggacattttaaagattgcattatcctatccaactccaaaggacttgatttatgacttctgcaaaaaccttgaaggtgttttcatcgtagaggaagttgatcctatccttgaaaaggatgtccttgcagttcttggtgaaaagaatcttgattgtccagtttatggaaagatcgatggaactttcccaatggttcatgaatttaatccagatatcgttaaggaatctttcaataaggtaatctctgatttggccgatgatgaggaattaaaggcagaatataaggatgaattcggcaaagatttaactggcgatttgattgagacagtcgaaaaaatggaatttagccaaagtttgaatgatttggtggacaatattccaacaagggctcctacattatgtgcaggatgttcccatagatctgcttacttcgcttcagtaaaggcttatgaagaattaggatacgataaggaagatatgatctttgcatctgatataggttgctatacattgggaatcagccctccttatgagactgctgactatcttcttgccatgggctcatcagttggagacggttgcggattttcaattgcaacaaatcagcatgtcatgagctttattggagattctacattcttccatagcggattatctcctcttgtaaatgctgttcacaataagaacaagtttgttttaactattttggataataggatcacagcaatgactggaggtcagccaaacccaggaattcctattgacggaatgggagatgaggctcctgcaatttccattgaggatatagttgaggcaattggagttaaattcctcaagattgtaaatcctcacaatattaaaaagactgtagatatctataaggaagctcttgaatacgatggagtggctgttgtcattgcaaggtatccatgtaccctaatcaagggtcaaaagagaaagccagtgatggaaatcaaggacagttgtgtaaaatgcttgcattgtgttgaaaagcttgcatgtcctgcaatatcctatcttgatgataaggtgactgttgacgaggccctttgtaaaggatgtactgtatgtattcagatttgtccaaacaaggcaattggagtaaaaaaaggtgattag

SEQ ID NO: 656 - DNA, 639 bp, Methanobrevibacter ruminantium
  source 1..639: mol_type = genomic DNA
atggataatattaatagttcaagttcaaattcagataattctgatgtaaattatagcatttatatctctggtgtaggaggtcaaggaattattaagacatctgtaatcattggagaagctgcaatgcttgaaggatatgatgtggtaatgagtgaaattcatggaatgagtcaaagaggaggctctgtgtcaactgaacttaagataggcaatttcaagtcttcaattgttgaggaaaataaggcagatttgattcttgcatttgaacctattgaagtcttaaggggcttggataaggcaaataaggataccgctcttatatttaacactttcccgattgttccttcaactctcacacagactggagagacatatccagatattggtgatataattaaaaatctcaaggataattttgattccgtttatccagtggaaggaaacggccttgcaaaggatgcaggaagcattttatctttgaacatggtcttattaggtgcatgtgtggcaaatgacagtttcccactttcaaaagaaactgttgaaactgctatgaaacataatttagctcctaagttccatgagatgaatttaaaagctattgaaaatggttataatgcgattaaagactctttgtag

SEQ ID NO: 657 - DNA, 591 bp, Methanobrevibacter ruminantium
  source 1..591: mol_type = genomic DNA
ttgaatggaggtgttaagatagaatctactgatataagatatttttatagaaatatagtcaagtctggtaaaaaatatcgtataaaacataacaataaggattatggagaattcagcaaattatctgacgcactctatgaaagggactgcttattttattgcaagttcgactatgacctacttgtagaatgtgaccttccaaacaagtatgagaatatggaacttcctccttttccagaacatcgtccaagaggacagattaaaggattgaaattcaataaaaaggaaagagaaggagaaatagtctttgaccataaggagagaaagttctgtgtaataaggggagaggaacattttggaaagtataatacaatggttgaagcctattatgtgaagaaaatccttatggaaaacgattgggacaaagcttgcctcattcaaaacaagagaatcagagaagacatatttcttaatcagaaaattaaagcaagcactcctaaattaaataaatactgtccaaattgtggtaacaaagtaaaagaagaagatatcatttgtaaaatttgtggtatacggctagttaaggattaa

SEQ ID NO: 658 - DNA, 1839 bp, Methanobrevibacter ruminantium
  source 1..1839: mol_type = genomic DNA
atgaaagggaatattcttaagaatattgatgaaataattaaatcggattttaaatcagcattttcaaatccaattgtagttattgttctaataggcataattatccttccttccctttatgcggttttaaacatttatgcatgttgggatccttacggaaatactgatgaggtagtatttgccattgccaatttggataacggctccacttttaagggagactatattaacataggaaatgaacttgtcactgaatttaaaaataataacgatttcaaatggacatttgtttccgaagagaatctgcggacgggagtttttaatggaacatattatgcagggatagtcattcctaaaaacttgtcggaaaatgtggtttcaattgcgactgacaatcctaagcaggcaaaattggaatatgttgtgaatgtcaagacaaatcctgtagcttctaaactaacagattctgctgcaaacagaatttacatggcattgaatgcaaagatagttaaaataatcgatttggcagcttatgaaaagttgggggaattgcagaaaggtcttgcatcaggttcccagcaactctctagcggaggctatcagcttcaatcagggtctgcccaaatatcttcaggttcccaccaagtctcatctggagctaagcaagttaaggacggtaaacagcaggttagcactggagctgaaacagttaaaagcaaggcttctgatttggatgaaggtgcacaaactgttcaagagggctcaaattatataaaccagaaatctgaagaacttcagcagggttccgatgaagtgcaggctgccgcagacccatcgctaatgcctgatggccctgtaaaagactatgtagatgccagtgttgaacttgcaaatggaagtggcgaactggctaaaggttcttcacagttagcaaacggttctgttcaattggctaacggttctgttcaattggcaaatggttctgttcaattggctgacggttctgttcaattggcggatggttctgttcaattggctgacggttcagtaagtcttgcagctggagctcaattgctttcaagttatgcagtccaggcattgtttactgcatcctcttcattaggggcaacagcaaatgagcttggaagcgttacaggcattaacaaaacacttcttggaaattatttgtacgctccaatagcattggaaagggaagaaatgttttcagttccagattatggttctgacattgctccgttctatatcgtattgtcaatgtgggtaggagccattcttacctgtgtaatgcttaagacaggccttagcaccggtacaaaatattccgctcttgagatgtatggaggtaagcttgtgatttttgtaatcttaagcattttgcaggcttgcgttacaataataggatgtaatattttaggcattcatattgttaatctgcctctattcatattctcttgcatcttggtatcggtggtatttatgatattggtctattccatcatatctgcacttggacaagttggaaaagctattgcagttgttcttttagtgcttcagatatctgcaaccgggggaatttatcctattcagatcatgcatggatttttccaaacattatattcatatatgccaatgacttatggaattacattggttcgtgaagcccaattaggtacagtttggtctaattattggcctgctttagccatactttttgcaataggtattattacagttatagttgcattgttgattaaggtaaaagcggataaggcttctcattactttgaaaaacgtttagaagaaagtggattgttctag

SEQ ID NO: 659 - DNA, 276 bp, Methanobrevibacter ruminantium
  source 1..276: mol_type = genomic DNA
atgtatgaagataaattgtatgacaaagcagaaagaagagtagatgaaaaaattaagttttaccgtcatttgtacagctatattgctgttaatgtgatccttgcagttattaaccttattttctttaaaggtgactggtggttcttatgggtaagcctattctggggaatcggtttagtctcccattttattaagacatttgtaatctttaattattttgatgaccatcacagagattcaatgattgaaaatgaaatggcaaaaatgagaaaatag

SEQ ID NO: 660 - DNA, 447 bp, Methanobrevibacter ruminantium
  source 1..447: mol_type = genomic DNA
atggataagaaaatgattgtttcagtggcttttcttttattgattttggcagtggctttagtctctgtatttgatgaaagcaatagctctgaaagtaaagtaaacttaatcgtttattctgaaggcccaaagtccttatctgaacttgtcaatgaaattaagacccaagactattatgaaggatatgacaatgagacagttgcctggatggagtccttaggaaataagaaattttattatggtgacggaataatagttattatgagcgcaactgatgcaagcaagcttccttccttatatgtcaccgatgtagagctttttgagcattttgaatgtaacgttttggaaaaacgttctttaggaaatgtagagtatcctaaggatgtcctgtatgtcaagaatgtaaaatacatcggcgaggaatatggtaacttttcaggggcttaa

SEQ ID NO: 661 - DNA, 462 bp, Methanobrevibacter ruminantium
  source 1..462: mol_type = genomic DNA
atgaaagtacagttattcgtttcgaaagatcttgaagagccctatgctgagatttatactgataacttaacagataatattcaaaaggctatggttcttttggaaaatgatgaatcagatgatgatgtggatgagggcaattcaatccttgcagttaagaaggggtccgacattgtccttttagactttgaagacattttcatgataaaggttgaagacaagcagactaaggtcttctctcaaaatgcagaatactcaatcaagaagcccctttatcagattgaagaaagccttgattctgattttgttcgcatttcaaaatccacaattgtcaatttaagaaagataaagagagtggctccttcattaagaggaatgatgtttatagaattgaagaatggcttgaaggacaatatttccagaaaatatttaacagatttcaaaaaggctttagacctatga

SEQ ID NO: 662 - DNA, 432 bp, Methanobrevibacter ruminantium
  source 1..432: mol_type = genomic DNA
atggagattattaaaaggattgggattggagcatttgtaggatgttttgtagtgatgcttgtcatggtgcttggaacatatagccttggtccgcagaacgtcagcttttccggaactgaaatcattaatgcattcttcggatcaatagttgtaggatgggcatttgccttcagcggactcatttatgaaaaagaggacattccattacctattcaagtcattttccaaatggtaatcggattgggaaccctatttgctgtagcagtctatttaggctggatgcctattagcttaggcatagggcctataattacttggatagttattgcaattgcctttgctgcagtcttctggctaggattttacttatattacacattcctagcaagggacattaataaaaagatagaattatctaatgattttgattaa

SEQ ID NO: 663 - DNA, 1140 bp, Methanobrevibacter ruminantium
  source 1..1140: mol_type = genomic DNA
atgaagactatagtaaatggtttaattctaaaaggattagaattagaagcaaaaaaggaaaacatcctcattgatgacgatggaactatcttagaaatatctaaagaggttaaagaaggagaaattatcgatgcagataataagatagtctgtcctaggttcttaaatgcccatactcatattggagatagtataatcaaggatgaaggggaaggattatcccttgatgaagtggtaaagccacctcatggaatcaagcatgtcgcccttgaatcagctgatgacgatgttttgattgaagccatgagagagtccatgtgggatatgtacaatatgggagtaagccattttatcgactaccgtgaaggtggattggatggagtaaagcttctaaaggaagctgctaaggacattccaatcactccaataatacttgcccgagacagctccttctatggggaggatgcaaattatcatatggttaagatggcccttaagaaattgctaaaggaatccgacggcataggattaagcggctttggtgaaatcagcacaactgttgctgagattatctgtgaaaggtgtgaaagggaggataagatatcttctatccatgtagctgaaaatgagctcaatcagattgcctctcttgaaaagactggaaagagcgagcctcaaagggcatttgaagctggattcaatcagatagtacatatgaccaatcctaaaaatgatgatgtcgaattgctagcaaggtctgattcatcacttactgtatgtcctcgctcaaatggagcattggctgttggggttgttcctctttatgaaatcttaaataaaggagttcgtcccctcattggaacagacaatataatgataaattcaccaaatatgtttagggagttggaatttacattaaagataatgaaaggagtttctagaaatcacatagatgctagagaaatattaaaaatggctaccactaatgcagattcaagcatttctaatctgcctattgataagtcatatattggagaaggccaaaaggccgaactcatgattgtaaataagaagtcaaataacccttatttgagtttgatcaatcgaacagaagctaatgacattgttaaaataatctaa

SEQ ID NO: 664 - DNA, 876 bp, Methanobrevibacter ruminantium
  source 1..876: mol_type = genomic DNA
atgattgtaaaagatgttgcatctacagatgttattcatgttacagttcctggaagccgtgatgaagcattacgtatcatgaaaaaagaagatgtgtctgtagtgcctgttattaagaaagagactggaaaattagtcggtatattaactcgttctgatatgattaccaatccagatgaagagcaaatcgctatgttgatgactagaaatttgattactgcaaaaatggatgacgaattgtccactgttgctgaaaagatggtaacaaacgatatcagaagagtccctgtaattaatgatgatgatgaattggttggaattgtaaccagctttgatatagtttcccttgctattgcagatatgggaatcaaggaccctgttgaaaattatatgatcaagaccattccttcaacatgggatgagactcctttgaatgtcgcttttgaagtcatgaagttctttggattaaaatccgtcataggattaaactccaacaacaagatgaccggtatcctaactgaaacagatttcattgcagaaagcgaaatcatatctgaaagaactgagcacagctcttctgtaggtaccgaaggggacaaatggtcctgggacagtaccagcgttttatacattgagaaaaaccatcttaagtttactgacaaggtatttaaggacgttgcatccggtgatgttgtaactgcaaataccaagacaaaagtttcagtatgcactgaaaagatgaaatctcttgatgtggaacaattgcctgttcttggaatagaaggagaacttgtcggtttagtaagggcaagtgatttaattaaaagctttattataggctttaatttttctttttcttttatttttactttttag

SEQ ID NO: 665 - DNA, 1080 bp, Methanobrevibacter ruminantium
  source 1..1080: mol_type = genomic DNA
atgaaagccaatccaaaaatagaaaaagtaaaacagatcctaaaagattacaaaaagatagccttagcattctcagcaggtgcagacagcaccctccttgcataccttgcaaaagagtcagactgtgatgtgcttgcaatcacatatgacaaccagatctttccagagggatttttggaatttgctaaaagacgtgcagatgaacttggaataaaacacgaaattatagaaaatagtttcttaatgatatatgatgtggcacataatactccacaaagatgtctaacatgcagaagattgatgtatggttcaattaaacaagtggctaatgaaagaggatacgatattatcatagatggaaataatataacagaccttatccacgacagaccaggcatcctaatgaaatatgcaaatgggattgaaagtcccctcatagatgccaatcttgaaagctatgaaattcatgatttccttgaagagaatgatattgaatattcaaagtcaacaacctgtcttgcaactagggtgaaggcaaatgaaacagttacagaggacaaggtaaacaggattgactactgtgaagggtttattaaaagtactataggtgctgatgtagtaaagcttagggaagaaaagaacatagccaccattgaattaggaaataatgattcaaagaagatattggataaagaaaaactagagatcatattcaatgagctaaaagaagcacagtatgataagatattattaaacattgatttcactgaagatgaggaagagcttattttagattcagagcttcaaaagggaaaggaaaatctaattcttagaaagaaactgccatttgacattgaaatttccaaaacaggaaaagtaatcaatgaagcagataatgaatttatatcagatattcaaacaattgaagagataggatacataaaattaaaaatagataaaaaagagtctaaaatatttagagatggtaagattagcattgagaataataaaaacaaggaagatgctaaagagtctttagttaagatcttgcctttaataaggagagcaaaaccattttaa

SEQ ID NO: 666 - DNA, 642 bp, Methanobrevibacter ruminantium
  source 1..642: mol_type = genomic DNA
atgacaaagatcatagtttatttaggattatccattcaagaggaagaagctaaaaccatcttagatgcggattatagaactccagttaaaaggggagacatattaaaggcaatcagcgaaaagccagacataataggaattatagatggagtcttccaccacacccctgcagttgcccataaggagatcatgaaagccttgaaaatgggaatcactgtagttggagcaagcagtatgggtgcccttagagcttccgaactggatgaccttggaatgattggaataggatatgtctataaagcatacagaagcggaaaaatcacatcagatgatgatgtggccctcagctttgaccccgagagaaatgtgccaatctccgaagcccttgtaaacattgactacaagcttgatttggctgtgaaagaggaaataataagcgaagaggataaagaatacatccataatattgctaaggacatctattatccaaaaaggtcataccaatacatattctctaaagtggaaatggaagatgaaaagaaaaccaagcttattgattttatcctaaaggaaaaggacatcaaatatctggatgcaatagaagctctagagtacattaaatccatttctgaagaagaatag

SEQ ID NO: 667 - DNA, 1260 bp, Methanobrevibacter ruminantium
  source 1..1260: mol_type = genomic DNA
atgtttgaagatgttgaaatacaattctttaaaggaactcacagagtaagagatccaaaggaaacaatcgaaataaatgaaaataagctaagaactgcaggaatcacccgtctaactgaaataacagacttagacagaataaaaatcccagtgttctctgcaattcgtccaactgcacaggaaggcggagtcagcgtatatgctggaaagggagcaacaaaggaacaagcaaaggcatcagcgatgatggaaggctttgaaagatattctgcagagcgccaggatatagacaacgaaagaacctttgttgacacctacaacaatataaaatcaagccaagaactaaaggccctcgaccctagagaccttctattgccaaagaatttcaccacacagaatgtggaaaactcaaggctcgaatggattgaatcaaaggacataattagcgaagaaacaatctatgttccctcaaatgcagtgtttcacccatatattcctaccagagaagtaattcctagtccactagctatttttaaaggaaacactaatggtttggcatctggaaacataatagaggaatctgttctccatggaatctttgaagtggttgaaagggatgcatggagcctttttgaacttacaaaaagaaacaagaaggaaataaatcaggatacaatagaaaacgacatcataaatgagcttttagccaagttcaacaatgaaggaataaatataaagcttatggacataacagcagaccttaagataacaactgtagctgcaagcgctgatgatacagtactgaaggacccggcactcctcacattaggtgtaggcacccatcttgaccctaatatagcagtgataagagccttaacagaggtggctcaaagcagagcaacccaaatccacggaacccgtgaagacacaataagagcagatttcatgagaaagtcaagctatgaaggcatgaaaaggatgaacaaacactatttccaaaaggaagaagatacaattgacctttcagacattgaagacaagagctcacactcaatcaaaaaggacattgaaacaagcattgaagaggttcagaaggtcggattcgataaggtcctatacacagaccttacaagagaggagattggaataaatgtggctagagtaatcattccaaaggcagaactctactcattggacgaggaaagattaggaactagagccttggaatatgatagaaaagcacgtagaggactggtctaa

SEQ ID NO: 668 - DNA, 1044 bp, Methanobrevibacter ruminantium
  source 1..1044: mol_type = genomic DNA
atggtttcaagtgaaaataaagttcatgattttcatataaagaatattttaaagagattggaagaaaaagacttggatgcaatgatggtggctaatttcaacaatatctattatctttctggctacttatctacaagctttgcatttatgatagtcaaggaaaatcctatcatatttgtatctgggatggatttggaaaatgcaaacaacaattcttctattgatataatcaaatatgagtctgcagatcagatggttgaatatttgaatgaagaggagattaaggaccttgccatcgagtctgatttgactgcaaatgcctaccaaaagtttaaggactttaatctaactatttctccagctatttccatagaaaggatgataaagaccgatgatgaaatcgataaaatattcaaggctggcgaaattgcacataagtcattgttggagcttgatgtaaggtcaaagcaggaaaagggtgctgaagaatgggaatgtgcatatgagttaggctatctcatgaggaagaatggagcaagcacagaatcattcgatacaattttcgcttcaggtcctgtttcttcacttccccattccacaccaaggcatcacaagttggatactccggtattggttgattatggttgtaagtttgaaggatattgctcagacaccaccagaacatttgtctataatgaaaagcaggaagagatttccaagattgtgcttgaggctcatgacaaggcaataaaagcagttaaggaaggagtaaaatcctgtgaagtggataaggtggcaagggatataattacagaatatggctatggggataagttcattcatagcacagggcatagctttggattggatattcatgaaagcccgtcactgtccttaaaggatgagaccattcttgagaagaatatgtttgttacaattgagcctggaatctatcttgaaggggaatttggtgtcaggatagaagatatggtcttagttgataagaaggctaaaatagttggcaatctgcctcctatcctataa

SEQ ID NO: 669 - DNA, 930 bp, Methanobrevibacter ruminantium
  source 1..930: mol_type = genomic DNA
atgtttgttgaagatttaataaataatttatcaaattttatagaaagcagattaagcgataaaatattaattttcttacaggaatatttcttaaaggcaggaatattcactttggcctctcaaatcattgctatattgttcatttcaattgtttttacattgatattggctttgatgattgcattgttattttcatttgatattcttatggcaattctattggctattttcattcctcttttgtcttttattctatttgtttttataaaatccgagcgaagaagggaagagcttgaaaactcaattccggactttttaagacaattggcttcaatgctgcgggttggaatgagtcttgagaatgctcttgttgatttgtcagagcatggaaacggcccattatatgatgagctgcgccgtgtggttgttgagataaggatgggaaagtcttttgatgaatcctttaggaatatggcgaaaaggcttgactcaaaggatcttgaacgtagttttaagattatcttaaatgctcataagagtgggggaggtcttgctgatgttattagtgatgtcagtgatgatttaagggctatgctgattttaaaaagggaaagaaagtcgtctgtaatgatgtcaatcatgtttttggttttggcatctgttgtagctgctccctttgctttgggaatggttggagtctattcttcctttatgattgaattgaacagatcaagtgccatctgtcaacttgccccaacggttgctctgatctatctgatcattcattcgattttggcaggatttctcatagctcttattatgtatggggatattaagaaaggtgtaaagttttctattccaataaccgcattagcatttttcttattttatcttattaatgtgtttggactatcctttttcggattctga

SEQ ID NO: 670 - DNA, 225 bp, Methanobrevibacter ruminantium
  source 1..225: mol_type = genomic DNA
atgtttagcatttatttaaaaaatgattttaatagattattcaaggaagataaagcacaggggtctgtagaattaattttacttatcggaggcataattgtaattgttttggtttgcatgtttgtttataagtcctatatggggggattaggtgatgaattggaatctaatgaattagaatcattaaataactcttttgaagaattatcctctaaatttgagtga

SEQ ID NO: 671 - DNA, 1416 bp, Methanobrevibacter ruminantium
  source 1..1416: mol_type = genomic DNA
atgaaagtattgattgatggagaggattttgacagcggcgaccattatgaagtaaaaaacccatatgatggtgagcttgtagatactgttccaatttgttttaggcaagatgtagatagggccatagatgcagcaaatagggctaaaaaggaattgcaggatatgtctgcaaaggaagtgtccaataatctttattctgcttatgaagagctcgaatcaagaagcgaagaattggcaaagcttatagtcttggaggctggaaagccaattaagcaggctattggagagcttaacaggtcttgtgagacattgaagtttgcagcagaggaagccaaaagaatctatggagaatctgtccctatagatgctacaggttctgtagatgagcgttttttggcatttacaaagaaagtacctttaggtgtcgttggagcaataactccattcaattatccggttaatcttgcattgcataagatagctccagccattgcagcaaagaatgctgttgtggtaaagccttccactgaagctccattagctgcacttaaattggttgaaattattgataatcatttcccaaatggggtgataaactctgtaactggctatggaagtgaagttggagatgcattggttgtttcagagggcattgataagatatcatttactggaagcattgccactggattgtttatctcttctcgagcaggaatgaagaaattgactttggagcttggtggaaacgatccattggtcgttcttgaagatgcagatattgaaaaggcagttagtgctgcggtgtccggcgcatttctattctccggacaggtttgcataggtgttaaaagaataatattggataataagattgcagatgagttcattgacttatttgttaaagaggcaagtaaattgaagatgggcaatcctatggatgagtctacagatatcggtccgcttataaatgaaaatgcttcaatcaatgttgaaactgcagtaaacaatgctataaaagatggggcagaacttattttgggtggaaaccgtaaggactgcttctatgagccaacaatattggatggtgtcaatatgtctatggaccttgttgcaaatgaaacattcggaccagttgcacctatcataagggtagatagaatagatgaggcaataaaagtggcaaatgacaccagatacggtcttcaagcaggtgttttcactgaaaatgttcatagtgcattaagatgtgcaaatgagatagatgcaggttcagtcttaatcaataaggaatccactttcagaacagatgccatgccatttgggggattcaaatcaagtggaatgggtaaggaaggaattaaatatgcagttgaggatatgtgcaagtttaaattgattgcttttaattgtaggtga

SEQ ID NO: 672 - DNA, 726 bp, Methanobrevibacter ruminantium
  source 1..726: mol_type = genomic DNA
ttgtgggatacagctaaagattatagaattttagtagctatgcatgctcgtgagttatttttaagaactgttcaaactggaagttttagaggtaactggaataagaaggctacaatagaagaaaccaaaaagatggaagctgacttaaaatcattgctttactgttatcttgaaggggatgctcttgctaattgtgaagatgttcaaaagcttgaagataaggctggaagaattatagagttccttggcggtgaagattggaaccataaattcatgcaaggggctcctaaagacgaaagggaaaagacagaagagaacattgcaaaagtaagatttttcctagacactatcttaggccttagaaacaggtttaagttcggccctattgatgatcctatcatgggaatcgatgtaaaggttggagagataatgagtgtcagcaagcatcctaaagccgattccttaatgatatgtaatgtaaatattggcaaaagggccttaaaggtcgttaccaatgatttaactgttaaggaaggcaatagggtaggggtttccctgcttcctccggcaacattcatggatgttgtgtctgaaggaatgtttttaggaatgaatggtagcatattaaaagaagttcaaggtgatttgggtaatatgcctaatggaatacctatggaatctttaaatgagactaaaaatatgataactgcctttttagacagttaa

SEQ ID NO: 673 - DNA, 417 bp, Methanobrevibacter ruminantium
  source 1..417: mol_type = genomic DNA
atggtggaagttacccaattatatgatttagatatatatactttagctggacaatacgtaggtcaagttcatgatgtagttctcaatatcagatacggaaccatctctagacttcaagtaaaagctttagaacctgaaaaaaagagtgcaggttttagagacatcttcagaggcggattccaatttgtacctgaagaagaagtaggaagaacttatcaagaaggtttgcttaacattgaatttgacagagtaactgctatcggggacattatgttaattgatcctcaagatttaaaaagaccaaaacctcctgtagcaggagaagaaatgtcaattcgcccaagacctgaagctccaaaacaagttcctcaagaagttcctcaagaagtcgctccaaaaccaaaagaagtaatttaa

SEQ ID NO: 674 - DNA, 762 bp, Methanobrevibacter ruminantium
  source 1..762: mol_type = genomic DNA
atgattgttggaatattaggttgtggcgcaatagccaatacaatagttaacgagtttctatctgatgatggaatagatattaaatatttctatgatacagacattgaaagggctgagaatcttgcccagatttctaatggtatagctgttttagagatggatgagatgttggacaatgtggatttggttttagagtctgcatcccctattgctttaaaggttcatgccttaaacatcattgaaaacggaaaggacctaatggttatgagtgttggagcattgatggataaggaatttagacaaaagattcataaggctgctcaagcaaacaatgcaaaggtctatgccccatctggagccattgtcggtttggatggaattaaggcggcatccattggaaagattaaaaaggcttcccttactactagaaaatcacctaagtctctaggtcgtgaagttgaagaggaagaaatattatttgaaggaaaggcctctgaagctgtagagaggtttccggtaaacattaatgtggctgcttccttaagcattgcctgcaatatggatattgacgttaagataattgtagatcctaaggtagataggaatgttcacgaggttcttgttcaaggggactttggtgaatttagatcaagttctgagaatgttccatttgctgcaaacccaaagaccagtatgctagcagcattttcagcaattaaattattaaaaagctttagtgagtgtttctctgttggtacatag

SEQ ID NO: 675 - DNA, 759 bp, Methanobrevibacter ruminantium
  source 1..759: mol_type = genomic DNA
atgaaagattatgaaatttattcaaatttaaaggttccaaagaattctaatattattttacgtttggatggccgtaaatttcatagcctagctaaatatttggctttaaaaaagccatatgacaataattttgctaaattgatgtctgaggtgtccttagacatttttaatcagttttcacctaaattcatttatacattttcagatgaaatcagcatattattggatgaaattcctttccttggccgtgtagaaaagttaaattcagtattctcatcaatagcctcaagttcattcacctatcacttattaaatgattttaaagatgatttcaatatggataaattggatgaagatgataggaatgtcatttttccagtttcattcgattccagagtaattccaattgtaaatgaagacatttatgattatttcaaatggaggcaggatgaggcatggagaaactgcgttaatgcctatgggatttgggccttaaagaaggaattctcacctcaaatcgcaaatgaaaagattaaaggtttaaaatcaagcgaaatccatgaattattatttaaaaaaggaatcaatcttaatgacgttgacacttggaaaaagagaggaattggtatttataaaatagaaaatcaaatagaaggatttaatccggttaaagaagaaaaaacagtttcttatcgcagtgaagtttttgttgattatgaattggaattgtttaataaggaatatttttataggttttaa

SEQ ID NO: 676 - DNA, 921 bp, Methanobrevibacter ruminantium
  source 1..921: mol_type = genomic DNA
atgggatttaaagatttaatctcaaaattgaatgaaaaaaatcattttgaaaaggtttgcatagatcaaactgtaattgattcaatcatttattattcaaagaaatcatatcctgatgagtttttagccatgtttgacggttttgttaagaacgaagttctttatatcagtggcttaatctttttaggaggtgaacgttctcatacaagcgctagctttaatgattggctgcttccacctgatcaaaagaaatggggaactgtacattcacaccctggtttaaatgcaaggccttctggcgctgatttgacaacattctcaaaatatggttcttttcatattattctttgtgagccttattctcttgaaactatgatggcttatgattcttatgggaatatgagaggctttgaagttggcaattttgttgatggtaaggatgatgaaatctataaagaccttgaggaattaagaaaagaaatagaagaagaggacggagagctcactccatctatatttgacctagatcaagacttgtccttttttgatagcgaagaggtaaaaaccaataagtattctcatgaattagaggatgaatttgggaatttagccttagataatgatggctctaatgatttcgattcaaataatttttctgaggatatcaattcaaataatccaaattcaaatgacttcacttcaaaccgcttttatccatcaagaaatgtctcagatgaagatttaggttctattgacttaaatccgcaggttattagaataggtggagaaaaagtaaatggtcaaagccctaaattaggcattatcattgaatttagggacgggaaacctattttaaaaagttatactgtggattctcaagaaaatgaagattctcaagaaaaagaggattctgataaataa

SEQ ID NO: 677 - DNA, 1575 bp, Methanobrevibacter ruminantium
  source 1..1575: mol_type = genomic DNA
atgaaagcattagtcgcagatgcaattaacgaaaaaggaatagaaaatttaaaagaagtatgtgatgttgttgtagatactagcatcactcctgaagaattactagaaaccattggagaatatgacgctatcctcattagaagcagaacaaaattgcctgctgaagtaatagaaaaggcagacaatcttaaaatcattgcaagagcaggagtaggtgtagacaatgtagatgtaaatgcagctaccaaaaaaggtatcatggttgtaaatgcacctgaatccacttcaatcactgtagctgaacacacaatgggattgatcttaagcaccatccgtaagatagcaatcgctgataaatccactaaagctggaaaatgggagaaaaaagcatttatgggtatggaacttagaaacaagactcttggtgtaatcggtatgggaagaatcggttctcaagtggttaacagatgcaaggcatttgaaatggatgcaattgcatacgacccttatttacctcctgaagttgctaaaaacatgggagtggaattatacgaagacattgaagacgtattaaccagagcagacataattaccatccacgttccactcactccagaaaccgaacactcaatctccacagaacagttcaagatgatgaaagacaccgcactcatattcaactgtgcacgtggcggagtcattgatgaagatgcattatacgaagctttagttaacggagaaatccttggagcaggtttagacgtatatgaaaaggaacctgcaaccaacaataaattattcgaattggacaatatcgtctgtacccctcacattgcagcatcaaccaaagaagctcaaagggatgcagcaatcattgtagcaaatgaagtaatcaccttatttaaaggaggcatgcctaaaaacatcataaatatgcctcgcatgaacaacagcgaatttgaagaaaccaatgattacttagaactctgtgaaaaattaggaagctttatcacccaagctacaagcagcccaatcaacaaattggaaatcacctacaaaggtgaaatcaacaagctccctagcaaagacctattcactagaaccatcttgcaaggaattttaaaccctgtcactgaaactgcagtgaatgcagtaaacgctaccaccgttgctaaagcaagaggaatcagcattacagaagcagtaagtgatgacagcgaaggatatgacaccttaattaaagttgcagcaaaaaccaaggaaggacaaatgtctgctgaaggtacctacctccacgaagctaaaatcataaaggtaaatggatactgggtagatgtaaaacctgaaggaaacatgttcattgccaaatacaaagacattcctggaagcattggtgcaataggaactaaattcggtgaagaaaacattaacattggtatcatgcaagtaggaagagattcaactggtggagaagccatcatgattcttacattagatgaaagaccttctaaagaagctgttaagaaaatcaaagacttagacaatgttagtgatgcaacctgtcttaaattatag

SEQ ID NO: 678 - DNA, 339 bp, Methanobrevibacter ruminantium
  source 1..339: mol_type = genomic DNA
atggtaaaatttgaagaattccctatttccagtgcaaattatattccaggttataaggtagttgaagaaaaaggatttgtatacggtttaaccgtacgtgcccgtggccttggtggagacattggtgcaggactaaaaggtatattaggtggagaaattaagcaatatgttaaaatgatggaagagtccagagaagaatccattggccgttgcattgaacatgctaaggaattaggtgcaaatgcaatcatttcagttagattggattcagacagcatctcccaaaacatgcaagaagttttagcatatggaactgctgttgttattgaaaaggaataa

SEQ ID NO: 679 - DNA, 774 bp, Methanobrevibacter ruminantium
  source 1..774: mol_type = genomic DNA
gtggttttaggaaatgctccttttcttgcagatgcatattttggtcataggactcgtttatataatttagatcttttaagaaatccaaataatgtaagcaaaatcatagaaaagtcctatgattgtggagtgagatccattaatcttgcaaataaggaaaacctacttaaggcatttgggatggcttgtgacaatggagtcgagatgcaggcagtttccaccattggaaagacagagatggattatgtaatccctgattatgatgaggcaaggcgagaggccacctggaaggaggacattgaaaacttggctcagttcgacaattccataatgcttgtagatgagtttcttatcgactcctatgattgggattttatcactgatatattggatgcaatcaacgatacaggtattccatctggaataatcacttcttttccttttaaaacttctctagagcttattgattcaccattacttgaggataaaaacttatttgacttttatatgattccggtaaacaagttaggttatatgatggatgttcctcattttaagtctgacaagcaggaagagttgaagttgatgcttgataagatagacaaaaagataataatcaataagatattggctgttggcattcaaaggcctgaggaagctttcaatttccttaataccttggattttgcagatatggtttcagttggcattgcatcagagagggaagctgaagagacctttggtatttttaagcaaaatttagattttttttaa

SEQ ID NO: 680 - DNA, 810 bp, Methanobrevibacter ruminantium
  source 1..810: mol_type = genomic DNA
atggactatttaaagaagattcccgctattcgttggaaagatggaaaatacgaagaagtggaagagaaaacagttagcgatgagaatatctatttttatattgatttattgcctcctcgtaagttttccacatatcctgcagatttggaggactttggtgtagggtattgcttaggtgatggtctggtaaactcatacgatgatattctaagcattgatattgacggcaagcatataacaatcaaaaccaagttcaatcatggcgcagatgaggataataaggaagcagatgaagaaaagccagatgtggatgctgatgttttaggctatcaaagcgtaatgtctgacagtgcaggaggatggagaagcgagcttaaaaagattgagccaatcgaatccgatctagttgtaaatgcaagtgaaataatagagaatatgaaaaggcttacagctaaagcagagatttggcaagccactggaagtgttcatgttgcccaattggtttatggtgacaaattcattactcgtgaggatgtaagcagacacgttgctgttgataaggtaattggtgcagcagctaaggcaggatttgacctatcaaagtgttatgtgacttatagtggcagaatgcctgcagatatggttataaagatggttagagtaggtgttcctattttggtttccaatgctgctcctgcaggttccggctatgaggttgcagtgaaaggaaacattactttagttggctttgtgcgcagcaataggtttaatgtttatgcttctactagtaggatagatttggataaataa

SEQ ID NO: 681 - DNA, 432 bp, Methanobrevibacter ruminantium
  source 1..432: mol_type = genomic DNA
atgtcagatgagaataaagataatagagtttataatcttctaataactaaaggaacagacccagaaggccaatatgaattttataaggagagaattgatagtcaaaaggattttttatatgctgaatataacactcaagataacgagctaaatgatgatttgtttgaagaagtagatgttatagtattgctttatggtctttatcatgataatacggagatttgcgatgagttaataaaaaaatcaaaagaattgagcattccttttcttttggttcgctcttttggtgttgaatggatattgcaggatttggaaagtaaggctgatgcagtggttggatggaatgggcattgcattgttgatgcaattaaaacccttgttgatggtggtggcgagtggatcaaaccatgtgatattgaagaggaatattaa

SEQ ID NO: 682 - DNA, 168 bp, Methanobrevibacter ruminantium
  source 1..168: mol_type = genomic DNA
atggaacttaattcaaaacattacacaattattttaatcatagcaataataattgcagttattatgacctatatgactggaataaaaaacccaatcattattggactttgcatacttgccataattgtaattctagctaatttataccttactaagcttaaaaaatag

SEQ ID NO: 683 - DNA, 981 bp, Methanobrevibacter ruminantium
  source 1..981: mol_type = genomic DNA
atggctgtaactaataggaatcaattaataagagaagtttatcaattgctaaacaaggagggctttgaaacatccaatatatatgatcaaagctgctttgatatagttgctcgaaagaaactgctcattctacttttaaaaatcctcgtaaatattgatagcattaacgaatctcacgttgaagaaataaggcagatttccaatgttttcctagcaagcccaatcatagtagggctaaaatccaaaaatcacatccttgaagaggatgttgtctatgaaaggcatggtcttccagccattgggcttcagactcttaaaaatatgattatctatgacgaatatccggaaattctagcagaccgtggaggatattatgttcaaatcaatggaaatgtcctaaaggaatacagagaggaatataacctatcattaaaggatttggctgaccttgctcacgtttcaagggctaccatgtacaaatacgaaaatggcatggtgagggcaaatacagaaactgcaatgcttcttgaagagattctaaacacaaagatcactcttgacattgacctttttgagccttatcaagaagacattaagctaaaggcagatacaagcaatctaaatcagacacaaggaacaaacgctcaaaatcttgctaaattaggatttggtgtggtttccacaaacaagagcccatttgatgcacttgcaaaagctgaaatagctaccaaaaagaaagacaaccctttgattgcaaatttaaatgttcaagatgagcagaatacaaagacattgaagaaaatggcaataagcttaaaggatctttcccttgtaacctcttcagatccgttctttgtccttgcagacgataagattaaggattccattgatggaattccagtaataaagtcttgggagatgaaagaatttgaaaattccaaggagtttttaaagttgattaaggaaagaagaaataattga

SEQ ID NO: 684 - DNA, 1293 bp, Methanobrevibacter ruminantium
  source 1..1293: mol_type = genomic DNA
atggaaattttatatttttattcaagttcagtgattattatggattatttttacataggaatagatgatacagactctccagatggaatgtgcactacatttttagcatcctccattttaaatgagtttgagaggagcaatattaaaattattgattatcctaggcttattcgattaaatccttttgcaaggtttaagactcgtggaaacggcggggtctcattcaagctagacattgatgaggatactgatttggcaaaggagattgtgctaggttatgtaagggagctttccatgtttgactgtgacaacacaaaccctggagttgtcttctatgagggtgaaatcactgaagagatggttgattatgcatttaaggcaatttattccattatcactatagaggaagccgaagaatttgcaaaccatattggggctgaaatttataagttcaaaaagggaaggggaataattggctcaattgcagctatttcctgccctttagaggattacacctatgagcttttggcgtatagggaaccttcaagatatgggactcttagaaacattgattatgattctgttgttagaatggataaggaaacttaccctgaaacctttgaaaatatcgatggcaagtatttggccatagagcctaagactccatgtcctgttttatatggaattagatcaaacagtcctgaggtattggaaaaggcaagggaaatggtcattccaaatgaaaccattgcagacagttgcatatttaagacaaatcagcatactgacatgcatattcaaaatgcagataggataagtgacatgaagcaatattcctgctataggataaggggaaccgtcaaggaaaggccacatataatcgaaggaggccatatgtttttcactttatatgatgattccggcgagatagagtgtggagcatacgaaccaaccaaggactttagaaagatcgttgccaaattaagagaaggggacgttattgaactctatgggggaataggcgagcaaaatacatttaatatagaaaaattccaagtcattaagctaaatgaatttgtatatagaaaccctgtttgcggatgtggcaaaagaatgagctctgctggaagaggaaagggattcaagtgcaaaagctgtggaaaacgtatagaatcagatgaaaaggtgcctgaaaagattgatagaactttaattaatggcaaattctatgaaactccagtctcagcaaggagacacttgtctaaaccgttgattcgtatggatttggattag

SEQ ID NO: 685 - DNA, 1251 bp, Methanobrevibacter ruminantium
  source 1..1251: mol_type = genomic DNA
atggctatcggtgtaaaggagattaagattaccgacaccatcagtatcctattattacctttgatttatgccttggttttaggtttagccctttatttggcaaagcctattaagtttataggcagaaagcaatctaaggtagctgaaggggctatggttctatttattggtgtattaattaccaaattggctatttcaagcggtcaagccatagccagtattttccaagtggggcctgctcttctcttgcagcagataggtaatttaggtactcttatagcattgcctatagcactctttttcggctttagaagggaagtcatcggtatgacaagttccatttgccgtgaacctaacttaggagtcattatcgacaaatacggttttaaatctccagagacccgcggagtattggctgtttttgttatcggatccattttaggtactccattcatcagcttcctatcaagcataagcgcttcactgattcctatgcacccatatgcctatgcaatggcttcaggtgtgggaagcgcaagtatgaatgccgctgcccttgctcctttgatgcatatgtttccatcaatggctactgatttggaggcttttgccggatgcagtaaccttctttcattctgtttcggtatctatatgtgtatatttgtatcattgcctcttgcagagcgtatgtataagtggctatcccctcatataggccatgacaaagaggaaacaattgacgatgagtatgcaatcgaaggggtaaagcatgataagtatgcatctaaggaagagttaagttcaggaaagattaaaagatgggctacattccttcttatattctcattcaccgttgctgtaggaaattatataggatatcacacttcattgctggattcattcattggaatgatcattatttcacttataaccattctgggaatgtctcttgaaaggataattccttggaatattcaatcaatcatttatataagcctgattggtataattgtggctattccaggcatgccaactgctgatttcattgtgcgttatgtttctcaaattgatctgaccacaatatgtactgcattcctggcttatgtaggtatagctataggaaatgattgggaagagtttaaaaagattggttggagaggaatcattatcactctaattgtaatttctggaacttatttatgttcagcaggaattgctcatttgactttagtggctactggaatggtataa

SEQ ID NO: 686 - DNA, 2964 bp, Methanobrevibacter ruminantium
  source 1..2964: mol_type = genomic DNA
atgggaggtgaaataataaataatgaaaaattaaagttaattttaattttaaccttaattttttcaatattaattatgaatacagtcaatgcaagtgacaatggtatcattgcagaatacgctgatatctccacaattccaaatgatgaaaaggtttctatcaatgaaaatgactatgatacaaattattatgagttacctgataaaaaattagatcatttagaatcaaatgataatcaaaatcatttagaaatgaatgataaaaaactaaatgatggaaactcaaataatgattttaactatatacaagagttgatcaatagtcataaagatggagattcaatattcttagaagacaaaacatatataggcaatggaagtccaattatcataaataaaaacctaaatatttatggatatggctataaaaatttatccgatcttgacataaaaacaatactggacggaaactccaaatcaaacatatttatcattaataagggaattcaattaaatctttatggattaagccttatcaatggaaatacaagttatgaggatggaggagccatctataacaatggactattgagtatagatagctgttcaatttcaaacaataatgctggcggaggagcagtatactcctctgaaggctcagaaattgaaatatacaacagtctctttgaaaacaatagcggacttcttggaggagccttggatttggaaaatgcaaatgcaataatatccaagtccacattcaaaggcaacagatgcaatggagacggaggagccatttacaataatattggaaagctaactatctctaattccaccttttcctttaacaagggagctcgtggcggtgttatctacaataatcatggaaccctatcaatatacgattgtgagatgttcttaaactctgcaagccaattaggaggtactgttaaaaattggggaagctgtgaaatatacaattccacaatcaaaaacaatactgcagacatgtacggaggaggattatacacctttgaatttaagatgactgtaaatgattgcctgatagaaaacaactatgcagatgaaggaggaggcctttttgcagatgcagacagcagattgattgtcatcaattccaccataataaacaacaatgctaaaattggagggggaattgatgcaaagcaagcttatctgactgtaaataactcttccattataaacaacaatgctaaaagcaatggaggaggaatctatgctgacaagcaccctgcagaaatccataacactaatataaaggacaataatggaaattccggaggcggagtcttcataggagacatatcagcaaaaataagtgattccaccttaaatggcaactctggagaaactggaggagcaatattcaataaaggaaaattgattatagaaaaaagcaccctaaactcaaatgaagccaattacggtggagcaatctataatcaaaagaacctaacagtaaacaaatcctcttttgattcaaataaagcctatgaagctgcaggaatctataacttaggagactttttaatagagagctctaactttaccaaacaatctgtaagccacaaagcaggagtcatcttaagcgtaaacggaaacattaagattaaagattccatatttaagcaaacaagcggagcagatgaaggcggagtaatctttacaagagaagggaatatatttatagactcctcactgtttctattgaacaatgccttaagttatggtgctgcaattgataatagcgcaatcatgacaatccaaaactccttattcagcagaaacaaggcatttggtgcaggtgcaattgacaatgggggagatttgactgtcacaaactccactttcacaaacaataaggtcacaaacaacggaggggcgattgacaataatggcaagctttatatgagcggatccgttctagtaaacaataccgctcaaaactacggcggagccattatctctagaaaagatacaaatatagagtattgccaaatattggataattccgctccagagggagatgggctttatgatagcggagattacttattaataagcaataattggtggggagaaaacaatccaaactttgatgaactcttaaacttcaatattgatgaagacttcaaatggattgaaatgaattttaccaattcaaccccccttatgcaaaaaaaggtctctaatttgaccataagccttaatggaaaggataaaaacaacaatagcttcaaattagagaatccagataaattgcctattttaaaatcaagtattcaagtggtaagcgaagacagtaaaattaagtacaatttgaatattgttaatggttcagcttccacttcaactgatatgaagcttgcaaagacagtaaatgcaattttggataatgagattgtcagcttagatgttttggaaaacaatgaatcggatgatgattccgaggattcagacgattcaaatgactccaatgatgaatcagataatccgaataattcaaatgataattcagataatgttactgatgattcagatgactccaataagtccaataatccaaacaatcatcaaagcaatggcaataagaataatgataataataagaattattataataaaaatggtttaagatattctaaaatgaaaaatagtcttttaaattctattgattcaaatttagacaatgattatttaaatttaaaagaaaataatgaaaataatgatgattcaaactccaataataaggatatgaattattctgataaaaaaactgatttgaataatgagagttctaataaggaaatcgatgaaaatgagaccaaattatttgatataaattattctttattaatcataccaattgcattaatcctattggttctatttgcatttagaagaaaaaataaggacgattaa

SEQ ID NO: 687 - DNA, 1434 bp, Methanobrevibacter ruminantium
  source 1..1434: mol_type = genomic DNA
atgattattcatgaattgtctagatttctaatagatttaaaatatgatgatattccaaaggaatctattgaaaaggccaaactctgctttttagattatctttcagtttattttaggggattggaaagtgaaaactctaaaatagccattaagaccatatataaactatttggagataattttaattccttgaataaggcattcatcaatggaatagcatcccatagcctagatttggatgatggccatagattggctcaattgcatccgggttctattgtcttttcaagccttttggcactcataagcgataagtctttagatttagacatttcaacagagaaattcattgaatctattgtggcaggttatgaagtagctatcgctcttggaatccttgttaatccaaaccatagaaatcagggatttcatagcacaggaacaataggaaccattgctgcaggtgcagttgcttcaaaaatccttaatttaaatctagaacagacagagcattgcttaggattgtgcacaacccaatctgcaggtcttcttgaggcagatcatgctgggactatgggtaaatctttccatgttggaaatgcttgttatggcggaatcatctctgcattccttgctaaaaatggttttactggaggagaatccataatcgatggtaaagaaggatttttaaaggccatgtccttaaaaacttatgaggattatttggatgcagataataatgatttagactatttaagaatttctaagtttttagaggataatttaggcaagttccatataaatgaggtttatttgaagaaattcccattttgcagacatattcactcttcaattgattcaactctctatttaaaggaatctattgttaattcggatgattttgattctttagattctattggtttggattcaattgattccattgaagtaaaaacctacaagatagcaagtgaacatgataatttcaatccaaagaatccacaggatttaaagcagtcattgccttatgcagtggccatttctctggttttaaatgatttaagtttagattcaattgatgaattaaaagatgatggtctttttgatgaaaagtccaataaggaatatgttttaaaaattaaagaaattatatcaaagataaatattatctatgacaaggatttggatgatttggctcctcaaatgcgtccttctcaagtgacaattaaattcaaggacaattcaagggatagcattaaacatactgtctattatcctttgggtgaagtggaaaatccattaagcgaagaggatattttagaaaagttcaagcttttaaatcctaagtttaatattgataaattacaaataattaaacatatggaagaatattcaattgatgagctttttagggagctagatttgattgattag

SEQ ID NO: 688 - DNA, 876 bp, Methanobrevibacter ruminantium
  source 1..876: mol_type = genomic DNA
atggatgaaactaaaaattcattaaaagaattaggcattaatgaattgcatgatgattatgtgtcccaaaagcgatttgaagatggagggcaatataggtttgaagttccaggaattcaaggtccttctgcactcgagtctcttttaaatgcttgtgatgattttgatttaaccattcacagagccactcaaaccaaaggaataatgttcttattggatgaagagatagaagacatggttgatttggctgatgatgcaaatattcagttattcttggctgttggcccaagggctccttatgatacaagtgctaccgttcaaacagaagagggaaaaagaataggctatcgtcttagaggatataaaaaccttgtctatgcaatagaggatgttaaaagggctgttggccttggagttagaggcatcctattgtatgatgaaggcttgctctttgccctttctaaaatgagggagaatggagagcttccatctgaccttaagtttaagctttctgcacatgctggatgttccaatccagcttcagctaagttatttgaatcaatcggattgaattcattaaatccagttcgtgaccttcaaatccctatgttagcatccctgcgtgatgcaatagacattcctattgatgttcatactgaaaatccaaagtctacaggaggtttcatccgccattatgaggttccagaaatgattaaggtggcaagccctatctatctgaagactggaggatctgttgcaaagcatcatagctgggatacaacagaccaggaggctcgccaaagagctaaacaggttgctttaattagggacttgattgaaaggttctatcctgaggctcaaatgtctaaattatga

SEQ ID NO: 689 - DNA, 885 bp, Methanobrevibacter ruminantium
  source 1..885: mol_type = genomic DNA
atggatttaattaaaaaagttgaagatgcagttgttaaggcaggaagcggatatagtgaagatagattaactgcatatgaaaacgcattaagactggaagaagaaaagggaaatgaaaatgcagtttgggctttagaacaaatgattgaaaactttaaagtagcaaaagaaaataagcttcccctatgtgatgacacaggaatccctcatataataattgagataggttataatagggagattcctaaaaacttttttaatgatattaatgcaggcatagcaaatggtttggataaacttcctggaaggcctatggcagttaagggcaatgatattgaaagaatcgagcaatcaaagggtttatatgccgagtccaatatgatgaaacctgcctcttttcttattgaagagaaggatgattccacttatggaagaaaaataggcatcgatgatgataagataagaataaatgtccttctagaaggtggaggtcctgaaatcagagctaaaacatatagggtttttcataagagagattcaaatatcgtatttaatgaagcactcagctggctaaaggagtctttgtctatgttgggttgcactccttcaattccagccattggcataggaagaagccacttcgaggcaaattcattgatgttaagggctatggttcatggcaatcttaatgatcaatcagatattgaaaaatacattgcagatgagttgaataagacaaatatcggtcctttaggccttggcggtgtgacaactgttcttggatcttttgtaaatattggatatcagcgagctagcggcgttaggatagttgcagttaggcctgcctgttttgttgaacctagagtttctagctttgaattttaa

SEQ ID NO: 690 - DNA, 849 bp, Methanobrevibacter ruminantium
  source 1..849: mol_type = genomic DNA
atgagtgatgatcaaaagccttacaaaaatggtttcaagtttccagagcaaagcattagaacaaaaattaccgaagtaagtcctaaccgattatccactcgaggtttcaatcaggaggaccttattgagaatctttcctactctgagaatgtttttttaatattgagaggaagattgcctgatgagaaggaagctaaaatattcaatcacattcttgtttccttttgcgaccatggtgtcactcctccaagcacacagtctgcaaggcttatcgcctcatctggagcaagcataaacaatgcagttgctggaggattgctgtcctttggcaaaaatcatgcaggggcaattgaaaaagccatggctttgtttcaggaatcaatcagtggcttaaatttggaagagacagaccctgacgatgaaaacaagagaattgccctcttggccatagaaatcgtaaaccgctacgaaggcgaatcaaaaagagttcccggttttggccataggtatcatgataaggaccctagggcagctaaactgattgatttggccattcaagaatcagccattggtcctcatacaaaactagcccttgcaattgaaagcatcttaaatgaaaagaaaggaatttgcttgaatgttgacggtgcaaatgcaggtcttttatctgatttgggctttgatagtgacttaggattgggaatttttatgattgggcgtttgccaggtctcattgctcatgcatttgaagagatgcaggaggaagagaaattcagacgattctgcgatttggaaaacatagtctatgaaggttttaaaaataaaaggattgatgatggcgaagaatga

SEQ ID NO: 691 - DNA, 510 bp, Methanobrevibacter ruminantium
  source 1..510: mol_type = genomic DNA
atggaattttttgatgttattgaaaaaagatacagtatgagaggttttgaagacaaagaggtagagcaagagaaattagataagatcttaaaggctgctcaaatcgctccaactggagttaacttccaaccttttaaggtaatcgtaattgacactaaaaagtataaggaagaattaaatgcaatctatcctccagaatggtttacacaagcgccaattgctctttgtgtagttgcttccaaggaaagggcttggacaaggaaattcgatggcaagaatattgcagacatcgatgcaacaattgtcatgacccatatgattcttgcagctgaagacttaggcctaaacacttgtttcattgctgcattcaagcctgatgaagcaaagaaatttttggcacttgatgatgaatgggaacctgtattgttcactcctttaggatatggaaatgcagagcctagagacactcctagaaaagcaatagaagaattggtaatctataaagattaa

SEQ ID NO: 692 - DNA, 372 bp, Methanobrevibacter ruminantium
  source 1..372: mol_type = genomic DNA
atgaaaccaaagatagttcgtgcaagggacaaagaggtaatgaatcaattggcaaagctttttgaagagtctaaatacactgtcaagtcccaggataagaattatgtccttcttaagaagaataattatggaaatcctttaattcatcttccattcatattgattggactgttcttcaatgcatttgctattctagttaatgtggcctattttgcctacagtgtttttaaaaagtccaatgtaatcttaattacaactgaaaagaatgatgaagatggcaatcccttggaattcgatgacgtcggtgaaattgaagtattctacgaccaagaaacttgggataaggcgatagaattatctagattggaataa

SEQ ID NO: 693 - DNA, 339 bp, Methanobrevibacter ruminantium
  source 1..339: mol_type = genomic DNA
atgagaaaaattatattattggctttttcagctcttttaatcattttagggctttggaattatatgagtgtacctaaaccaggtttagacattattgcatcatcccttgtgcttgttgcagttggttggactcttgcaatgtctgtttttgaacctaactggattaaagcagctatcttcattgacggattggtatttgtacttgtatctatcacattcttagtaagtcctatcaattatgtgttccttctctttggaattattttggttgctatagctgttttagcttatcttagaaaattaccagacaatatattaagatacttctacagatcttaa

SEQ ID NO: 694 - DNA, 315 bp, Methanobrevibacter ruminantium
  source 1..315: mol_type = genomic DNA
atggcagggatatcagaagctattacccaaataaaaaaggctgaaagtgatgctgattccttagtagaacaatcaacagtcgatgcgaaagcaatgattgatgaggctcatgttaaagctaatgaaatggttgaagctgctaagaatgaagctaacgaagaagctcaatctactgtttttgatgcagaagaaaatgcaaagaaagaagctacttctatatcttctcaagctgatagcgatgttgaagctatcaagaataaggctagaaataatatagatgaagctgcttcaattattgttaaaaatattttatag

SEQ ID NO: 695 - DNA, 2007 bp, Methanobrevibacter ruminantium
  source 1..2007: mol_type = genomic DNA
atgtttagaactgcgagaatgcgtaagcttaatgttataactttggacaaatacgctggtcctacggtcagtgcacttcacgacgagggtattgtccaaataaatgatatttctgaacgtattcagcaagatcctaagctagcagaacttttgaaaccttcaaaagttacaccttatactggtaagctgtcctcacttcttatgaagacaagcgcactttccgatcttctcggagatgccctttcagaaggtcagtcccttaaggacacccttatgtctttcataagccccgatcttccagttcctaaagaagtcgaggatgttgatacagaaagctttatagcttatgctgaatcaacattaagccaggttgaggctgaaacaaaaggtattgaagataagttagccgcactagacagtgaagaaagtaagcttgaatcaaataaaagtttagcttctaagcttaaaaatctggatatggatttagctcttttaagcgattcaaagtatacttctaccattgttggtaggatcactgctgagtcagctcagaaattcaaaagtgaatacagtaagattacagaggatctcttttacgaattggttccagatgatgagaaggagtacaatattcttgttgttgtcgtagccaacgagtttaaggatgacatctataccttacttaggaaaaatgaattcgagaagtttgaaactgaggatttacaaggaagacctgacagtcttatttcctcttgcgaatccaggcttcaggctatcgaaagtgaaagatcccaagctaaagctgatttgaaagttgtagcagaaaaatgggatgatgaagttcttgctttaaaagaacaattggaaaacgaaaaagagaaaaatgaggttttcgcaacatttgctgaaaccgacaagactgttgtccttgaagcatgggtgccagagaaaaacctggagcaagctcaaagcataattgagactgctacagatggccacgtgatcatggaaacagaagaggttccagacaatgctgaagacgtacctgtactgcaggaaaactgcacatatgcaaaaccttacgaactattggttgaaatgtactctccattgaagtacaatgaaatcgaccctaccttattcgtagctattacatatccattcttcttcggtttctgtttaaccgatgcaggatacggtattttagttgcacttataggattcatcctctatagaggaatgggtaaagtcaacagaaccatgcacgatggtggtctaatcatcattgcaagtggtatatggtccattattttaggtctgtttaccaacggtttcttaggggacatgtggactaggattttaggtttaggacctgctcttcctacagttatcgattcaatcaatgcatttaagttcccagcaacaatcttggttattgctatcgtaatcggtatcatctataccaatatcggtttcatcttaggtgcaatcgacaacttaagatacggagagaagaaagaagcaatcggttctcaaatcgtatggtttgtatttgagcttggtattatccttctcatattaggattccttttcccaacattcggaatgattggaatggctcttggtgcagtattaatcattgcagctcttggaatgctcatatgggctaacggcgcatatggtcttatggatgtctttggatttatgggagatgtattgtcatacgctcgtctattggctctctgtttagctacaggtggtattgctatgaccgtaaacatcttgaccaatatggtaaatgacatgattccatttgttggtatcgttttagctattatcatctttattggtggacatattgcaaacttccttttccaagtattaggtgcaggagtaaacgctttgcgtcttaactatgtagagttcttctctcaattctatatgggtggaaaaaactcttaccaagcttttaaagcgaaaagacaatttactaaagttaaaaaataa

SEQ ID NO: 696 - DNA, 486 bp, Methanobrevibacter ruminantium
  source 1..486: mol_type = genomic DNA
atggtagaaattgctttaggtactgctttagcagcaattggtgctggtgtagcaattggttttgctggtttaggttccggtttaggacaaggtatggcagcagctggatctgttggagctgtagcagaagataacgatatgtttgctagaggtattattttctcagcattaccagaaactcaggctatttacggattcttgattgctattttattacttgtattctcaggattattaggtggaggagaaggtctctccacaactgcaggtattgtagctataggtgtaggtgcatctattggatttgcaggtttaggttccggtatgggacaaggtatggcagcagcttcctctgttggtgctatcgtcgaagataacgacatgttcgcaagaggtattatcttctctgcattaccagaaactcaagctatttacggtttcttgattgctatcttacttatggtattcggtggaatcttaggttag

SEQ ID NO: 697 - DNA, 681 bp, Methanobrevibacter ruminantium
  source 1..681: mol_type = genomic DNA
atgagctctggggcagataaaattgtctctaacataatgtctgaagctcaaggcaaggctgatgcaaacattggcgaagctcaagctcaagtcgatgcaatattggcagatggcgaaaaaagggctgaagccactaagcttaaaatctctgaagacgctgcaaagcaagcggaaatgagatatcagcaaatcatctctgaagctaagatgaatgctcgtagggcagaattaggggcaaaagaagaagtaatcgaagaagctttcaataaagctactgaagatttgacaaatatggcaaataccaacgatactgaatatgtggacgctttaattgaaatgattaaggaagcagctgtagaaatcggcggcggagacttaatcgttttattgaaaaaggaggacattcctaaaattgaaggtaaattagaacatatcgtaggtttaataaaatctttaatcaaacgtgaaaaaccttccgatttaaatgtgattgctaaagaagtttctcgtgaaactgatgttgaaactactttagaaattggagaacctatcgataccattggtggagctatattaagaacaagaaatggtgaaattcaagttaataacactattgaatccagaatgttaagatttaaaaaatcattacgttcagaagttgcaaaaacattatttgattag

SEQ ID NO: 698 - DNA, 1155 bp, Methanobrevibacter ruminantium
  source 1..1155: mol_type = genomic DNA
atggctgatgaaattgctacaataataagttccttaggactttccaatgaggcatttttagcaatagttcttttagcgtttgtagttattggtgcaattattgtaattgtcgcaactagaccaattttagatgtttacccatatcttcatcctaatgcaagagtaagagcaagaaaaggaagattgtttgatgagaaacagatttcagaacttgttgaagcaaacaacgttgatgaaatcacaaactatctcagaggatctcctgactatgcagactacttggataattatacacttgaaaaggcattggacattcagcttggtgaaacctatgacatggtttccagaatggctcctaaagagattcaatcttcatttaaagtaatggctaaaaagtcagacatcaataacattaaaagtttattgactgctaagcaagcaggattaaacgaagaagcaactgctgaccttttaattcctactggttctttatatgaagatatagaacgtttgaccgacgctgatggtgtaactggcgttgttgcaggattagatggaactgaatacgctccagtattggaagaagcacttccagaatatgaaaagactggaatggtccttcctttggaatcagcattagataagtattacttatccaaattgctcgcttcctctgaaaccccatctgatgagaataagcagatactctattcttatgtcggtaatcaagtggatgttgcaaatatcaaattaatattaagagcaaaggctgatggattagactatgaagctatcagcccatacatgattgatagtggatatcaattaagagaatggaagcttaaggatcttatggaagctgaagacgtcactggtgtcatttccggtttggaaggaaccaaatactcagacgtccttgttgaagtgcttcctgaatacaatgaaactggatctgtagctctctttgaaaaggctttagacaagttcttagtcgactctgcaaaatcctattccatgaaaaagccattaggcattggacctataataggattcctctcacagaaagaggttgaagtcaagaacttgaaggtcattgcaagagccaaaagagaagctgacttcccaatatctaaaattagggagatgttagtatga

SEQ ID NO: 699 - DNA, 318 bp, Methanobrevibacter ruminantium
  source 1..318: mol_type = genomic DNA
atgagtgatgtcgctataattggggatatcgatactgttactggttttaaacttggtggagttaaaagaggtattattgtaaataatgatgaagaagctaaagatgctcttgatgagttattgaacgatgaaatttcaattattataattacacaaaagatagctgataacataagagaacatattaatagacgtcttggttctgatgtcttaccgatggttattgagataccagacaaatctggttcatctgaaggcggtgccgatcaaatggcagctcttattaagagagttatcggggtagagatggttaaatga

SEQ ID NO: 700 - DNA, 1755 bp, Methanobrevibacter ruminantium
  source 1..1755: mol_type = genomic DNA
atgattaatgaaggaaatattattaaaattgcaggtcctgttatcgtcgcagatgggatgagaggaactcaaatgtatgaagtggtaagagtaggtgaagccaagcttatcggagagatcattgagcttgaaggcgacaccgctaccattcaagtttatgaagaaaccgctggggtaaagcctggcgagaaagtggaaagtactggaggtccattgtctgtagagcttggacctggtgtaatgggttccatttttgatggaattcaaagacctttggaagtaattaaaggaatctccggagactacatcgcaagaggtattgatgtagactctattgacaaagagaaaaaatggactttcgaacctattgctaaagtaggagacaaagttgtaggcggagacattttaggacaagtacaagaaacatctgctgttgtccaaaagatcatggtccctccaatgattgaaggtaccataaaatccatagcttcacaggctgaatacacagtacttgaaactattgcagaaatagaaactgaagatggaattgaagaaattcaaatgttacagaaatggcctgtacgtaaaggtcgtccatacaaggaaaaattagacccggacattccacttattaccggtcaaagagcacaagacactttcttctgtttagctaaaggtggtgcagcagctattcctggtcctttcggttcaggtaagactgttacccaacagcaattagctaaatgggcagacgcagacattgtggtatatatcggatgtggagaacgtggtaacgaaatgactgaggtacttaccgagttcccattccttactgacccaaaaaccggaaatcctattatggacagaactgttcttattgcaaacacttccaatatgccggtagcagctcgtgaagcatgtgtatacaccggtattacaattgctgaatacttccgtgaccaaggttacgacgtagcgctcatggcagactcaacttccagatgggcagaagctatgagggagatttcaggaaggctcgaagagatgcctggggaagaaggttaccctgcatatctcgcatccagacttgcacagttctatgaaagggctggaagggtcatcacattaggtcaagaccctaaggaatcttccgttactgtagtaggagcggtatcacctcctggtggggacttatccgaaccggttactcaaaacaccctacgtatctgtaaggtattttgggcattggatgcatctcttgcagataagcgtcacttcccttccatcaactggttgcaaagctactcattatatgtagagagcattaccaactggtggcaagaaaacgcttcagaagaatggagagcaaacagggaccaagctatggtattattacaaaaagaatccgagcttgaagagatcgtacaattggtcggtcctgatgcattgccagattctgaacaagtggtattggaaactacccgtatgttaagagaagacttcttgcaacaaaacgcatacgacgatgtagacacttactgttctccaattaaacaagcaggcatgttagaaaccattcttaagttccacgaagcagcaagtgcagctgtaactcgtggcgcagatgtaaaggaaattgcagctttaactgttaaagaggacattgctagaatgaaatacatccctgaagatgaatttgaagcaagagtaaaagaaattcaagaaaaagttgtaacacaatgtgctgaggtataa

SEQ ID NO: 701 - DNA, 1386 bp, Methanobrevibacter ruminantium
  source 1..1386: mol_type = genomic DNA
atgaacgcagatattaaaacaagagaatatacaacagtttctgaagtttctggtcctttgatggtagtagaaggtgttgaaggtgtagcttataacgaaatcgtagaaattgaagctcctaccggagaacacagaagaggacaagtattggaagttaaagatgatgtagctgttgttcaggtattcgaaggtaccactgacttaaacaccttaaacactaaagtaagattcacaggcgaaaccgctaaaatcggtgtttcaaaagacatgatgggacgtatcttcgacggtactggtaagcctattgacggcggtcctgaaattatcccagaacaagaattggatattaacggtaacccaatgaaccctgcatcaagagaattccctgcagagtttatccaaactggtatcagtaccattgacggaatgaacacccttgtaaggggacaaaaattacctatcttttcaggatcaggtttgccacacaacgacttagctgctcaaattgcaaggcaagctaaagtagtaggttccgacgacgatttcgcagtaattttcgctgctatgggtattactcacgaagaagctaacttctttatgagagatttcgaaagaactggagcacttgaaaaggtaaccgttttcatgaacttggcagacgaccctgctattgaaaggattcttactcctaagatggcacttacaactgctgaatacatggcattcgaacttggtatgcacgtattggttatccttactgacttatccaactactgtgaagcattaagggaaatttccgcagctagggacgaagtgcctggtcgtagaggttaccctggatacatgtacactgacttagctggtatctacgaacgtgcaggacgtattgcaggtaaggaaggttccattactcagatgcctattttggtcatgcctcaagacgatattactcacccaattcctgacttaaccggttatattaccgaaggacaaatcgtattaagtagggatattcacaggaaaggtatctatccacctgtagacgtacttccatccctatctcgtttgatgagtggtggtatcggcggagacaagactcgtgatgaccacagtggtgtatctgaccagctttattccgcttacgcagaaggacgtaacttaagagaccttgtagcagtagtaggggaagacgctcttactgaaagggaccaatctttcttagcatttgctcaagctttcgaagatgagtttatcactcaagctaaagatgaagacagaagcattgttgaaactttagatcttggttggaaattattaactatattacctaaaacagaactcaaaagagttaaagatgaatttattgaaaaatactacccagaataa

SEQ ID NO: 702 - DNA, 693 bp, Methanobrevibacter ruminantium
  source 1..693: mol_type = genomic DNA
atggcagaagaaatactagaaggtattaacccaacccgtatggagctacttgctcttaaagatagagaaaaacttgctgtaaagggtcacagtttgctcaagcaaaagagggacgctttgattaaggagtttttcgatatcttagacagagttaaaggtgctagggaaaacgctgaaactaaccttagtgaagcttacgaagcacttactgaagctcaaatcattatgggtgacttagctgttcaaaaggcagctttatctgttaaggaatctgttaaagtagatatttcttcaagaagtattatgggtgtttccgtacctattgcagatatggaaatggaatcaagaactttagttgaaagaggctacggcttttcagacacttcaattcaattagacgaagccgctaaaaaattcgaaacagcgcttaagtacatcattgaattaggtgaaatcgaaaagacaatctatcttttagctgatgagattgaatctaccaagcgtagagtaaactcacttgaacatattatgatccctagattccaagcaaccatcaagtcaatcaatatgaaacttgaagagatggaaagggaaaacttcgttagaatgaagatgattagatctactattgagaaaaacgaagcagaagctttagctaaagctcaattaaaagcagcaaaagcagaagaataa

SEQ ID NO: 703 - DNA, 2859 bp, Methanobrevibacter ruminantium
  source 1..2859: mol_type = genomic DNA
atgattagtctgtcttttgtttcggcttcatatgctctagactctaatcatttgggagaaaatgatagatcttgtcttaattcttgttcttctttaaaatattctttaggtgataataaaaataatgacttagataatagtgctgatttgaatagtttaaatcccaatagcaataattgcttaaattccaataaaaataattgtaattgctattgcaagaatcaaacagatcttaatgatgatttaaacgattcagataactgtcctgacagttttgctaaaaagacaaatattaatcatgataagcagttgaatgatggtgagatagatttctccgagcgcaataatcaaatcttcctgataagtcctgaaaacttcagtgttttctttgatgaaaataaccgcttaaaggaagattatgggggatgcacccttgtatttgaaggggatttcgctgagcttggcataatcgacatatcatatccttacactcgaatcactgcaaaggaaaactcattcaagaatactgcattcaagctttctgcatctgatatcgaactttccaatctaaacataagtttggataaggaatttaaagataacgaatatgcagggattttggttctatctgattacattagcatctacaatattaccctaaactatacggttccagccaatacaaacggattttgcatctacagcaaaggtgaaggctttagaagaatcactgatttgtccttaatcaacaacacaatcacctttacaggcaataatctaaatgaggcttgggattatggcattttccttgataagacagataatgccttggtttatggcaattcacttggttcatatttgccattatgtgaagacaattggtataataatgaatatggtgctgtcagcaagatgtccagcgctggctttgtagctcaaagctgtaatgatctaaagctgtccagtaatgaaatcaatacctatgttacagattccacccaaagctcatttgctatggattcatgcatattatatgattgcagtgaccttactgtcgaaagaaacactctttatctggaggacattgacagtcaggacggcaagaacaataccttgcatggatttgacttgtatctatgtgacgatgcgataattgccttcaacaatatcgatcttttcacaatgggaggcaatgacgggagaaaaatcacatctccattgcaagtgaacggaccatcagacaatatcagaattgcatataacaatattacaagttctaatttcggttctaactgtggaatatattcccataacttctatggggacacacaccttgaaattataagcaatttcattgatgttgcaggctttgcaaactctggagaatggtcacttctatctggaattgaagtccaggattcagatgacgtaatctggaataatacaattatcgtaacaaatctaggtgatttcaaatataataacaaggtctatggaataagctattcacaaaataggaacaactataactctacattcaatgtccaatacaataacattacaacaaatggatattatgctgtatatttaggtaaggatgattatcctgttgtaaattcaaccgttaagaacaatgtattgaacacttatataaccggaggaaatccggcagtgtcaattgcaaatgataataaaaacaatcctatcgtaaacaatacagacaatgagtttaaaaacatctttaaaaatagcagttttcctaaatggcttaaaaacttcttgagacaggacactaaagtggacaaggacttttcatggattacagatgctataaatcctcaatcaaacggcactggattttctaatgacactggaaatggcacagggataatagataatgatggtagcgacactgtaggaaacaattctgaaggcagcgattctatcgttaatggaagcacttccgctaatggaacaggcaatggaacttctggaaatgccacagaaccacaaaatccgattgatgacaatcaaggagataattctggaggctcaagttccagcgacaattccacaggaagccaaacagataacgaggattccaatcagaacaataccgaccctactgactcaaaaccgacaaataatacagatgtcccagtgaatcctacaaacactagcgataagccagttaacagtacagaaccggtccccgctaatgatacagagccagttccagcaaatgatacagagccagttccagcaaatgatacagggccagttccagataacaagactgataatccagttaacaatacagaaccggttcaagaggatgctaataaaaccgattcagataatactgaaccaatcaacactacaaaagacaatagcactgaaattatcaataagacagaatcagatgatgatactaaccagactgtgttaaaagacgatgatttggatcctaaagaatcacacgaaaattctcaagatgacaataagaatccaagtgatgatgaagagaaatcaacacctggagattctggaaatgagttaacagatcctgaaagcaattcagaaagccctcaaaatcaagaggaaaactcagagaattcgaatgatgattctagtgagccttctagttctacagtcggcgattcacattcagattctgcttccagtccaggtcttagtgatgcttccagcagcaagaatgcatatgaattggataagcctgtagaggatttagttacaaaatctgttgattatatctcacttgcgggaatctgcattgttactttgttattaattttattcggttataaacgtcaaaaggatattgaaggagaagactag

SEQ ID NO: 704 - DNA, 639 bp, Methanobrevibacter ruminantium
  source 1..639: mol_type = genomic DNA
atggttgacgtgggtggaggaattctaacttatatcttagacactcttagtcaaagtttacagattccagtaatcatattcttacttatattcgctgttggagcaatcatccttttaggaggcctaatcagagaatatagtcatagaaagaccatctcagatgctgaaatgagaaatattattgatgcaatcaacaaggctaatgacaaatctgagattttatccattgtagactcttcagatattccaaactctcaaaagactgttttaagagagattacagattctgactgggacaatgaatcaagagtgggccttgctaaaaagcttataagttcaagagaaaagagactcgaaaagcgcttgtcatacactgacataatcactcgtatcggtcctacattagggcttatgggaacactcattccaatgggtccaggacttgctgcacttggtacaggagacgttgtaactttgtcaaatgcaattattgtagcatttgatacaactgtggtaggtatcggttcaggtgctcttgcatatgtcataagcaagataaggcgaagatggtatagcgaatacattaacaatattgatgttttaactgatgtggtattgaataagcttaataaattataa

SEQ ID NO: 705 - DNA, 342 bp, Methanobrevibacter ruminantium
  source 1..342: mol_type = genomic DNA
atggttaagattagtcgtaaaaatagttttgatgaaagcagtgaagaagaccctatgtcaggtgttgccaatcttgtggatgccatgttggttattgcagttggattgctggtgtttttagtcattagctggaatatgcaatctatcatattcaatgaggatctatctccccagcaaaagcaagaggctattgatgccatgaatcaggttattgaagtggatcaggggcaacaattaaatgagactccagatataagcaattcttcaggtgaaggctataccgaaatgggtaaggtttatcaggaccctaagacgggtaagctgataatgattgaaaattag

SEQ ID NO: 706 - DNA, 1323 bp, Methanobrevibacter ruminantium
  source 1..1323: mol_type = genomic DNA
atgggaaaattatcattttcagtagctcaaaggttcggcaaaaagggcacagcccttccaggtaaggttgcattgaaattcaatcctaatctgcttgaagaactatccaaaaaatgtgataagatagtctttatcacaggaaccaatggaaagacaacatcaaacaacctttcaacacacgttctaaaaggagggttcaatgatgtcctctcaaatctgaatggttcaaatatgattcaaggagttttaacccctttcattacagattataaggattcctatgacgtaggtatttttgaagttgatgaaggctctgttccggtagttagccaattcatgaagcctgattatttcataataaccaatttcttcagagatcagctagaccgatacggtgaagttgaaaccacaataaagatggttcatgattcaatcactcctgaaactgttctaataattaactcagatgagccatccttgcttagattcgatgaccttccaaataagaaggtatactatggaataaacaagacaaagtttgcacaagatgatattgatgttgcagagtccattttctgccctaaatgcggaaacaggctaagttatgagtatatctattatggaaatgttggaaaataccactgtgacaagtgcggcatagaaaaccatcctgcagactatttcattgaatctgcagacctaatcaatggctcctataattttacagtattaaacgacaacaaaagagaggaatacactctcaatctgatgggcctctataatctatacaattccttgggagtgataagccttgctaaggagataggccttgactacaatctaattaaggaaagaataaacaatttcgaatacagattgggaagaatggaaactttccactttaaaaataaggaccttgttttggtcctctctaaaaaccctgtaggcctttctgaagtattcaatacaataacctatgatgaaagccaaaaatcagttatgtttatcttaaacgactatgctccagacggaaaggacgtatcatggatttgggatgcaaatttcgatccagttaatcacatccctaatatggatgcattctattgtgtcggaacaagagcagaagaccttgcattgagattaaagtatgcaggagtggatgaaagccttttaaagatatatccggcaaaagaccagtttgacataaacgaggcagtcgatacaatatcaaaggaaagcacaaaggcttatgtgataggaacattcacagcaatgcctgaagctcgtaaaatcctagtaaaaaaagaacaagaaggtttttaa

SEQ ID NO: 707 - DNA, 777 bp, Methanobrevibacter ruminantium
  source 1..777: mol_type = genomic DNA
atggataacttagaattaacagtaatgaatatgtactccgatattttaaatacatacggagacataggaaactttagatgcatcaatcaaagaatcagatggagagacatctctttaaacattcaggaatgtacaatcgacaaggatgatgactttgaatgggaagacatcgacataatcctaataggtggaggctcagataataaccaatccattgtatctaaccaccttctagagcaaagaaaagatcttgtcgagtttattgaaaatggaggagtccttctggccatttgcggaagctatcaaatgttcggaaacaaatacctagatgtagacggcaaggacataccttgccttgaagtctttgacatagaaaccacaagccgtcctgatagactaataggggatattgtaatatccaatgccatcccagattcaaataatgtattaaacaaggattttgatttcaaattgaaggatatggttggatttgaaaaccatggaggcagaacctatcacaaccacgaccctttaggccatgtaaaggtcggattcggcaataatggtgaagacaaaggggaaggaatggtatataaaaacttcctagcaagctatttgcatggtcctttcttgccaaagaacccacacattgcagattatatgatattcaatgctttaaatagaaagtactcaattacagagataaaagacctaaatgacactattgaaattagggcacatgaaagaatgttaaaacgtttattgaacgataaatag

SEQ ID NO: 708 - DNA, 1287 bp, Methanobrevibacter ruminantium
  source 1..1287: mol_type = genomic DNA
atggaaaatttacttattatgggaattaatacaagaccaatggttaattctgcattgaaattggattatagaacatattcagtaagttattttaagacttatgatttcgttagcccatataatgaaaggcatgttttagaccaggaatctgtagactcctgcggattctttgaaaggaactactctcctcaaaagctattggatttatccagggaatatctattcgacttatctaaagaacacaattcaaaaaagcaagataatgaaaataatgaagatatcgatgaaatcgataaaatcgtacttataactggaatacatgctgatgactttaaaggggaattttccagattcaagaccaagattagaggaaacataaatacaaaggatcttgatgataaatttagattctatcaaaaaacaaagaacaaatttgatgttcctctaacttttaaactaagtgatgtagatgaactaagagatattcttaaacaatacaataacaatcaatttattttaaaaccccttaaaggaaatggtggtttaggaattttccttatagattatgatagcttaaatgaattaaataatagcaataatcctttggaaaatatttcatttgatgactacatattgcaggagtatattgagggcacaagcatatcatcttcagttcttggaactaatgatgattgcgttaatctctttaattcaagactagttacagaaaatgatttaggaaatgataattttgcatatagtggaaacattgtgccattggatgtgaatagctttaactgttttaatgaatcttttaaaggattggggattgattcaaagcaattaaacaaagagatgaaagagatttccgaagacctgattaggcaattccgattgattggatctaatggagttgactttattttagatagggaaaacaatctaaaggtcattgaaatcaatccaagacttcagggaacttatgaattatgtgaagagataatggacttgaatcttcttgatgcacacataaaggcatgcgaaggagaattggtggaagttcctaaacttaatggcagatatgggattaaaaagattatttattcatccaaacaggttaaaattggtaatttgagtttatcaaatgtctatgatgtcccttatgaaggagttaagatagaggcaaatcagcctattgttactttgattgattcaaataaggatttgaaaactgcaattgggaatataaatactgcagaagagttggtttataaaaatatctattag

SEQ ID NO: 709 - DNA, 981 bp, Methanobrevibacter ruminantium
  source 1..981: mol_type = genomic DNA
atgaacatattttcaactgaagaaacatattatggcactagaaaagactctccagtactgctgccttcatacaacgaatatggagacaagctccatatcaaggacgtattcgattttgaagagatgctggaaaactacatcatcgaaatggaaattagaaactattccgaaaacactgtaaagacatacagctccatcataagaagcatgatagattatatgagctcagaggaaggagtctacgatggaagaaaattcctagcatgctttaaaaagtatataagagacctaaagaaagaccaagacgtttcacaaaactacatatacctaaacacagtggtctgcaagaagttccttgaattcaatgacatctattttttagaggatgttcaaaaccctaaaagaacaaagtcactccctaaatccctgactgaaaaggaagtgaaatcacttatcgatgcagttcaaatcaccgatgaggacagcgaacttaagaaaaaagccaaaatgagagacaaggtcattcttgaattcctatactctacaggacttcgtatttcagagcttgtcaagctgcaaaaaaaagatattgactttgatgagaggacaataagggtaagaggtaagggagaaaaggatagaatagttctttttgacgaaaatacgagagatttgatagataattatatagaaacacaaaaccagaagtcagaatatctattcatcaacaagaacggcagaaagctaactccaagatatgtccagatgatgataaaggagtatgcagaaaaagcgggaatcaaaaagaaagtaaccccccatgtcttaaggcattcatttgcaacacatcttctaaagaatggagttgatataagggtcattcagcaactattgggacactccagcctttccaccactcagatttatacaaacgtagatatggatacaataaaatccgtatatgatcatgcaagagagtag

SEQ ID NO: 710 - DNA, 1338 bp, Methanobrevibacter ruminantium
  source 1..1338: mol_type = genomic DNA
atgggaaaaggagtagaattaactacaactaaatatcttattcacgctcaaattaatgccaacggaatcgtagaaaagcctgatgttgtaggtgctgttttcggacagaccgaagggcttttaagtaacgatttagaccttagggaacttcaaagaaccggaaggataggaagaatccaagttatcattcattctaacggcggacgtgcaaaaggtgaaattgtaattccatccagcttagatagaatcgaaaccgctatccttgcagcatctcttgagaccattaaccgtgtaggtccttgtgaagcttccatagaagttcttagggtagaagacgtaagagctgtgaaaagacaacaagttatcaatcgtgcaaaagaaatttatatgggcatgatggaaactgtctctcctgaaagcatgaaaatgattgaagaaatcagagaatcaatgagagttcatgagatctctgaatttggagaggaaagacttccagcaggtccaaatgtacatacttccgatgcaatcattgtcgttgaaggaagaaatgacgttttaaacttattaaaatatggaatcaaaaacactgtagcagttgaaggagtaaacattccaacaagcgttgcagagcttactaaaaaaagaactgttacagcatttgttgatggagaccgtggcggagagttaatcttaaaagaactcttgcaagtgggagaagtagattacattaccagagctccaagaggcaaagaagttgaagacttggaaaaagaagaagtcttagtggctttaagagacaaagctccaaccgaacaggtaatcaataatcttgacttcaatctagacactcaagcaaaaactccaaaaaacaaagtaaacagaacagacagaagagcaaaaaacttcaataaatctgacaagttccatggaaataaaagaaacgatcgtaaagacaaattcaatgacagaaaagacaaaaacggaaaaaacgatcgcagaggaaaagacagaaattctagaggtcgcagagacagaggcgacagaattcctgaaagcagaatgaagttattaaagaacatgttaagagacttagaaggaactggaaacagtgaaatcttagatgattctttaaacctcttaaaagaaactaaagtcgaaaccctttatgaagacttaaaagaagacatcccagatgctgatacaattatcttcgatggagtaatcagccaaagattagtggatattgctcattcaaaaggagttaaaacattagttgcttttaaatccagcagagtaattaaaagacctgacaagctcaaattaattactttaaactaa

SEQ ID NO: 711 - DNA, 756 bp, Methanobrevibacter ruminantium
  source 1..756: mol_type = genomic DNA
ttggaaggtgttattttggcaaagattaaacctaatgatttattgaaaaaaccatcaaagatagaaaaaatggaactggatcagattgacataagcaaataccaattttcaatagatgatttggagggtaaggacagttccaattacattttactcaagaagattcttgattcaagctcttcatgtcaagtttccgatgcatatgcctctgtatccggacgcagcggagtacttgatggattaaagccaatgaatagaaacaaggtctatggtagggtttttacagctaagaccaatacaaacgattggggaacttccttgatggctatggacaatgcgagccaaggagaggttctattcatctacagctatggagataaggcctctgtttggggagagcttgcttccacatgtgcaggtgagaaaggaattgctggaacaattctttatggttatgcaagggatatggatgctctaatcgacttggattatccagtatacgctcttgactattgtcctaatgcaggtaaggctttagggcttggaaaggttgatatagtgcttgaaattggtgaagacataataaagccaggtgattttgtatttgcagatgagaatggtgttgtattgattcctcaagagctctttggagagactatggtggcaacattcaatgtaaaggtcaaagagagctttattattaaggagcttaaaaaaggcagattattgtctgaaattattggattggaaagatag

SEQ ID NO: 712 - DNA, 363 bp, Methanobrevibacter ruminantium
  source 1..363: mol_type = genomic DNA
atgaaatttttaggaaatatatcacaccttgcaaattctggaaagcttatcgccaagtcaagccagactccacctgctggagcttttgtttttactaatgataaacagaaaataggtaaggtatataatatctttggcccagtgaagaatccatatatctctattaatctttacaggtcagtaaataaaagagatcttgaaagtagacaaggtgaaaagctttttgtttctacaaaaagagagatggaaaaagataagaaaaagaaaagaagcaataaatctaaaaaaggcaaatattctaaaggcaaaaacaagtctaaaccatctaagaaaaagagatccaataaaaaatctcgcagataa

SEQ ID NO: 713 - DNA, 795 bp, Methanobrevibacter ruminantium
  source 1..795: mol_type = genomic DNA
atgggtcctgaatggagagcatttgaccatgaacaaagagacaaacgtacaagggtaggcgctccaattacttacacaattcacgataaaggattaagtaccatgatcgattggaggaataaggacatctatggtagagatattcctgcaagaaacagagctcaatggtatcgtttaagaaaatggcaaaggaaaatcagaatttccggtgctaccgaacgtaacttggcttttgctttaagtgagttagacagagactcttccagattaggtcttccaagaagcgtaagggaagctgcatctgttatttacagaagtgcagttgaaaacaagctcattcgtggtagaagtattgaaggtgttgtagcagcttctttatatgctgcatgcagacaatgtaaagtccctcgtactttagatgagattgcagaggtttcaagggtaagcaagaaggaagttggaagaacttacagattcttgacaagagaattacacattaaattgcctccaacatctccagtggactatgttcctagatttgctagtgaattaggcttatccggggaagttcaatcccgttccattgaaatcattgaaaaggcaatggaaaaaggtcttacttcaggaagaggccctaccggtgtagcagcagctgcattatacattgcatctgtgctccttggagaaagaaagactcaaagggacgttgctgatgttgcaggagtaactgaagtaactataagaaacaggtataaagagctaactgaacagcttgagacgggagttactttatag

SEQ ID NO: 714 - DNA, 2106 bp, Methanobrevibacter ruminantium
  source 1..2106: mol_type = genomic DNA
atgaagcttagtattatcatacctacatacaatgaagaggaatatcttcctaaactgattgaaagcataagatctcaagagtttacagattatgaagtcattgttgcagatgcagacagcaatgataacaccagagagatagctgaagcttacggatgcattgtcgtagatggagggcttccagcaatcggaagaaataggggcgctgcagttgctaaaggagagatactgctatttttagactctgacttggaattgaccgaacattatcttgaaaatgtcatagaagaatttgaagaggaagatttgggaattgcaatcacccagatgacccccctctcccaaaagaaaagggacatctatcttcataacttagccaattggtttatgatagctgtagaaaacatcaagccacatggtgcaggatgctatggaatcatatccagaaaggagctccacgacgaatgtggaggatttgatgaaaacctgacatttggagaggatacagattatattgaaagagtggctgagataagtcagtttaaagtccttagaaatgctaaaataggagtttccacaagaaggcttgaagaggaaggactttataccctccttaagcaatatggaaaaagcactgtaaatgattttaggggcaaaagaacaagcgctgaagatttaggatatgaatttggacatgaatcaagctctaagcttgaaagtggtgtgcaggaatcagttccaaaacttgaaaacggcgtgcaggaatcagttccaaaacttgaaagcagtgcagatataagttctcaaatagaagataactctccaagtcttgaagatgaaatagacattgaaagtgaccactatccaataactgctcttgacagcacagatatggagaggattgcagaaaagtccaaaaacagaaagcaaagttcatttaaaagaaggctcaatgagtttaaggacaaggaatttgaaaccaacgagcttatcgaatatgaggatgaatcaggccatataaaacatgaggcagttggccttgacagccgaaagaagatattctattccatctgtggagagggaatgggacatgccatccgaagcagcgttatcctagaacatctaaccaagcatcatgacgtttatatattctcaagcgaacgtgcctataagttcctatctgaaaaattcgacaatgtatatgagatcggaggattcaatacagtctatgaaaacaatgtggtgcggactaaaaagacattcttcaaggcaatgaaggcaaatcctacaaaccttaaggaaggatataacgtgctctataaggaatgcaaaaaggttaagcctaatataatcatatccgactttgaaaactactccagcatgctaagcaagcttatgaacattcctcttatcagccttgacaatatccatatgataacccaatgcgattatgactatccgcctcaccacaaggcagacatgcttactgcaaaggcagttacaaaatcatatatattacgtccaaaaaggcatataataaccagtttcttcttcccaccattgaaacatcctaaaatgactgccctttatccgccagtcctaagaaaagagataatggatttagaaagtgaatctggagaccatgttcttgtctatcagactgcagagtctagcataaaccttatggacgaacttaaaaagttagatgaagagttcattgtctatggcttcaacaaggatgggactgatgagaatctgacttatagagccttcaatgaagacaagatctatgaagacatgagaacagccaaggcaatcatagtaaatggtggattcaccatgatttcagaagccatttatcttaaaaagccaatctacagcacaccagcacataagaactttgagcagattctaaacggcttttatgttgaaaagttaggttatggagagtcacatgaggaccttgatgttaagaagatagagaagttcctggataatcttgatacctatcagaacaacttgaataaggttgaaaagtgggataatactgcaattctagaagatcttgatttaagcattgaaatgtatgcaaagaagaattattaa

SEQ ID NO: 715 - DNA, 1059 bp, Methanobrevibacter ruminantium
  source 1..1059: mol_type = genomic DNA
atgaatttaaaaataaacaaatatattccatttggaataatattaatcatacttggagggtctttatacttcttaagtggcatagaccaattcataagaccatttacccaacctattctaatgggctcctcaaagggtaaggacatactattctttgttctatttggaataacaatcatcttgtcctccattggagataatgagaggattcataactatcttatgaatctatcaattccagaaaagcttaaggacaaggacttttatttaaagctctccttgatcttgtttttaataacagcaatatcaggattagctgtagaattgtacttaagagcatctcttgggcttaactggaatacaatacttgtaatcatgaatcctagccttacaagcacaagctttctccattcccatttatataaatcaatatttggaattatccttggaatcttcttaagccatattccagcaggaatccatacaggaagctcattaagtagctatgccccaagtgtgataagcctgctctttatattgattccaataacttatatttctatggttctatctaatcaaaggcgaaaggcagcttctagaatacttttagcctttacaagcactcttggaataatcggattgattgacggaggcctctttgcaactcctgcaatcggaggaatctatggaatccttatattgatgtacaatgaagagattttagatggaatttcagactttataactgaaaaagacaaaagagatggaataaaagagaaattaaatgaggaattaagggcgattaagtcaatctttaacaataaaaatataaagaaatatttgaagattgccttgcctcatattgcattgattctaataatcatcttaaggttctctgttgcattctatggtgcatgtccagattcttatgaattgattatatctaatggccacgatcttgatttagatgaatatgatacattaaatatatcagaaaatggagataggactgttgttcatctttccaatcaatataatgagatggaactttttaaatga

SEQ ID NO: 716 - DNA, 738 bp, Methanobrevibacter ruminantium
  source 1..738: mol_type = genomic DNA
atggttccattgcagtttttcctattcacttcagttggagttgacccttcccttgccatgatggtctctcttggaaccagccttgccatcattattccaacggcgtcctctggagcctatcagcatcagaagaagaacaagtccattgtcagaccaggaataagattagctgtttttggaattattgggggattctgcggaggtcttttagcaaatatggttcctacaagaatcctgcagatgatatttgcctgtctattgatttttgtagctttggatatgctatttggctccaggtccgatggggaaaaggcattaatcgatttcaatttgttaaatggaggtatcgttggattttccataggaatcatctctggattgcttggcgttggcggaggagtctttttgattccatcactttgcatactgtttggattcagcttgattgaagctattggaacatcctctgtattcattgcatttacagccattggggggcttatatcttatatttacacaggttttggagtaaatccaatgccttattgcttaggatatgttagcttgataaactttgtagtgattgtattgttttcagttccgatggcgactataggagctaaattagtttataaattgcctgagaaaagattaaaacaaatctttgcaataattttgatttatatggcaattaaaatgcttggattcgatccaattagcatcttgttaggtctataa

SEQ ID NO: 717 - DNA, 915 bp, Methanobrevibacter ruminantium
  source 1..915: mol_type = genomic DNA
atgccatctgaaaaagtgaaagaatttaatgaaagccttaaaacaaaggaaggaagagacaaattcttcaagcaaatattttgtatagctattggaacagtggtaggtgtagccacatatgccttctgcttatactttaatcttgcaatattcggatggaatattggattggcattatcccctctcactgcaggatacgctgaaagcattcttgctaaaaagatccttaatgagagcacaggtgcaataagcgcattcattcttttcataattactgtagtctacggattcttcatatccaactctaccttaggattcaatataattacagcaggaagcgcagtggtaattattcaagcagctatgcctacagctacaaactatctcctgcttgcagtaggagtgggaatcctaacttatgtaacaggtttcttaaagaagttacattctgccttatataagggatataagaaaatatttaagagagagccaaaaagagctgaaagatactatcagaagcaagcaagccaagtgcatgcattctatgatgaaaatctggatataaatagtttaggagttcttataatgacactggagtatcctcctaaagaattaaatatcatagagcaaaagggaatatatgaaaccagacatattttcggttccaaacagaaggaagatataaaatccggacttgaagactccttggaagaagaagtcataaatagagtaaagcttgcaagagataagacattagttaaattgattaaagaggttaaagccgacggatgcaatggtctgatgcatttgcataccacttatgaaaccctagggacagaaaagggagaccacattgcacaagtggttatgagaggaactggtattgttattgaaaaagaggaagaggaatattaa

SEQ ID NO: 718 - DNA, 327 bp, Methanobrevibacter ruminantium
  source 1..327: mol_type = genomic DNA
atgttattatcttctacaagtactttagaaagcaaaaccatactaaaataccatggattggttagcggcgaatcattaatcggtgccaacatctataaggatctcttctctggagtcagagatgttgtggaaggaaggacttcaacttatgctgaagaacttgacaatgcaagaaatgaagcaattgcaaccatggaagaaaaggctaaggaatatggtgcaaatggaatcataggattgaaaatatcctataacaaccttggcggaaccatgggaaacaccattttagtaaccgtttatggaactgccgtaacttatgaagactaa

SEQ ID NO: 719 - DNA, 189 bp, Methanobrevibacter ruminantium
  source 1..189: mol_type = genomic DNA
atggtagaaccacacaaacattgtccagtatgcggtagtccaataccaatgaaagaaagagtatgctctccagactgtgagaaagtattagaaatgaatcagaaaaacattagaaaaagcagaatcatgttatttgctgtgattgttgtctttattctcgtatgggcatatttcatgttctttaaataa

SEQ ID NO: 720 - DNA, 795 bp, Methanobrevibacter ruminantium
  source 1..795: mol_type = genomic DNA
atgaccggattaattgacataggccttaatttgatgcacagatcatttgataaaaacagggaagagattatcaataatgcaatatccaatggagtgagccagtttgtaataactggaacaagcgttaaatcaagcaagattgccttaaactatgcaaaggatgagaaatggaatggaatactcttttcaactgcaggggtacaccctcatgatgcaaagacctgcaatgagaaaacccttgatgcattgaaggaatttgctaaaaacgattgcgttgtagccattggagaatgtggacttgactataacagaaactactctccacaggatgttcaaagggaatggtttgaaaatcaggtgaaattagcccaagagcttgacatgccattgtttctccatgaaagggaagcccatgaggatatggttaagattttatcaaaatatcctgagatgtgcgagaaggcttgcgttcactgctttaccggaacaaaggaagaggcagaaaagtaccttgaattgggatgttatattggagttaccggctggatctgcgatgagagaagaggacagtcacttcaggaagctgttacagtcattccacctgaaaagatgatgattgagactgatgctccgtttcttattccaaggaactttccaaaaaagcctaaatcaaataagaacaagccggaatatttgcctcatatcctaaatacaattgcagagtataaggaatgtgatagcgcagagctaggtgaggctgtaagcaagacaacaagagagtttttcaagatatga

SEQ ID NO: 721 - DNA, 678 bp, Methanobrevibacter ruminantium
  source 1..678: mol_type = genomic DNA
atgagaattgtagtggctattggcggatccatactattaaagacttatgatgcacaaagatttcaagagtattcagacattctaaaggacttaagcaatgaacatgagatattcattgtagtagggggaggaaaacctgcaagggagtatattggagttgcacgtgatcttggagccggagaggcaaaatgcgatgaccttggaatagaagtcacaagagtcaatgctaagcttctattgcttgctcttggagactatgcttatcaaaaggttcctcataactttaatgaagctcaggaatactctgcaagcggaaagatagttgttatgggaggaaccgaacctgcacacagtacagatgcagtatctgcaatattagccgaattcgttcaagccgacatgcttatcaacctaacttcagttgacggaatgtataccaaggaccctaataaattcgatgatgcagagctcatttcagagattacagctacagacatgatggatttcattagaaaccaggatgtaaaggccggaacatatgaattctttgactttactgcaattcaaatgataaagcgttccaatctagagactgtaatagccaatggattcgaacctcaaaacctaatcaaagcgattaatggtgaaaagataggaacaagagtcatatctgattag

SEQ ID NO: 722 - DNA, 7728 bp, Methanobrevibacter ruminantium
  source 1..7728: mol_type = genomic DNA
gtgagtttaaataaacttaagattggtagagtttttatttgtctttttattttagtttttatttcttgttcaattaattgtgtttttgcagttgatgatttagctttcaatgatacatattattctgatttagattctgttaatggggattattcaggttttcttagtgaaggagactttaatggaggctcttctgtggttgttgatggtgaaattgactcctctccaattgccaataataaaaagaattcttcatttgcccttactagcaaaaaggattcatcttcaccttctatttccacatcatcaaaaaacaataaaaacaataaaaacacttcttctttaaaggaaaacaagaccgccgccccatcttcacaacgtgtattttatgaccgcgacatagtgtctgatgaagatgtaatcggacctggtcatgaaaacttggactggattaacctaacacatgtcgacgacagcctattttcagataattcaaaggaagatggagcaaaaggcagcaagattgccaccaccattgtcgcaagcaacctagttaaatattatctcaatgccagccaactaaatgtcggcttgaaagactccaacggcaattacctctccggaaaaacaatcaatttcacagtaggcagcgcttcatacatacgcaccaccaactcatcaggcagatgctccctaacaatcaacctaatgcctggcgtctatactttcacaatcagattcctaggagactcctcatattccccaagcagcaaaaatgtcaacgtcacagtcctaaagatgcccacaagcatcacagcaagcaacctggtgaaatactatcacaattcaagcagcctaatcgccacattaaaggacacacatggcaaccccctatccaacatgacagtaacattcaaaatgggatcaaacaactataaccgcaccaccaacacaaacggaaaagccacactagcactaaatatgatcccaggaaacttctccgtaaaaataagcttcacccacccaagatacataacatccagcaaaaacgtaaccgtcacagtcttaagcatgcctaccagcataagcgcaagcaacctaaacatgacctatggagacggcagctacctaaacgccacattaaaggacgcccataacaacccattatcaaacaaaacaatccattacaaactaaacaacaccatatataaccgaactaccaataataacggtcaaacatccctaataatcaacataaaccctggaacttaccaattcaatatctatttcaacgaaaactattaccaaaactccaataaaacagccacagtaacagtcaacggcatacccaacagcataatcgccagcaacctagtggcatatgtcaacgaatcaccaactatagtcgcaaccttaaaggacgcaaacaacaaccctttatcaaataagaatctgacatttaacagaacaggcacactaacaaacatcttaaccaatgccaacggccaagccacatacaacctaaacggctgcacaggcaatttcaacataaaaatcacattcaatacaaccggctacgcattcagcagtaaaacagtaaatgtaaacataaaattctggccatccacaatcactgccaatggtgccacaacatactttacagacacagtacagctctcagcttgcctaaaaggagaaaacaacacccctctagcaaacaagaatgtcaaaatcacatatgccaataagaacataactcgaaccacaaacagcgcaggaaatgtctattatgactttaacgaaaatgtaggcacttacaatgtaaactttagctttaaagagaactattaccaaaatgcttcaaaaacagtcacagtcacagtcaataagatgccaaccagcatcactgcaagcaatctaaacattacatatcaagacggcagcagcctaatcgcaacactaaaggacagccacggcaacccaatagccaacaagacagtcaatttcaaaatggaaacaaacaactataacagaactacagatgccaacggaagggcaactctagcattgaatatgattccagccacatttaatgtaaatatcacattctcccacccatcatatcaaacatcaagcaaatcagtaacagtaacagtaaaccctatctccaacagcataatcgccagcaacctagtggcatatgtcaacgaatcaccaactatagtcgcaaccttaaaggatgcaaacaacaatcccttatcaaataagaatctgacatttaacagaacaggcacgctaacaaacatcttaaccaatgctaatggccaagccacatacaacctgaatggctgcacaggcaatttcaatgtaaaaatcacattcaatacaaccggttatgccataacgtcaaagacagtaagcgtaaacataaaattctggccatccacaatcactgccaatggtgccacaacatactttacagacacagtacagctctcagcttgcctaaaaggagaaaacaacacccctctagcaaacaagaatattaaaattacatacggcaataagaacataacccgaaccacaaacagcgcaggaaatgtctattatgactttaacgaaaacgtaggcacttacaatgtcaatttcagttttaaccaaaactattatcaaaatgcctcaaaaacagtcacagtcacagtcaataagatgccaaccagcatcaccgcaagcaatctaaacatgacatatcaagacggcagcagcctaatcgcaacactaaaggacgcccacggcaacccaatagccaacaagacagtcaatttcaaaatggaaacaaacagctataacagaactacagatgccaacggaagggcaactctaacattgaatatgattccagccacatttaacgtaaatatcacattctcccacccatcatatcaaacatcaagcaaatcagttacagtcactgttaatgagatagcaaccaatcttgcagtaagcaatctaaatatgatctatatggacggcagtcatctagccgccactctaaccgatggcaataacaatcctttagccaataagacaatcatttataccttaggcaatgtaaattataattacaccactaataatagcggtcaaaccagcttaatgattcatttaaatcccggcacttatcagtttacagtccagttcagcgaaagtcattaccaatcagctataaaaacagtgacagtaactgtaaaccctatttccaatagcatcattgccaacaatctgcttgcttatgtcaacgagtccccacatattcttgcaagcctaaaagacagcaacaataatcctataatcaataagactttagtatttaacagatcaggcaacataactaacatcataaccaatgccaacggccaagcaagctacaatcttaacggatgcactggcaatttcaatgtgacaatcacatttaatgccacaggctatgcattcagctcaaaaacggtaaatgttaacataaagttctatccatcaatcatatcagctaatggtgcaacagactattatggcaataccattcatctgtctgcatctcttaaaggagaaaataacactcctcttgcaaatagaactgttcatatttcttatgccaataagaacattacccgcacaacagacagtgcaggcaacatctattatgattttagagagattccaggaatctataatgtctgttttaattttaatcagaattattatcagaacgcttcaaaaacagttagcgtagttgtccttaatccgccatctcctaatgttaatgtaagcagcggtttttataatgtctcttatttgctaattaatgtgtcctctaatatttctggaggaattttatattctagtttggataatggaaccacttggtatactggagaagacaatatctgtttcaatttaacagaaggcaattggtctgtctgttcttactattctttaaatggtttcaatagttctattgtttataataattttattattgatggtagtgctcctttagtttgggcaagcaatggatctgggttttataaacgttctttagatgttaatttaacaagtttggatattgtagataagaatcctgtcatatattacactttggacggtagcttgcctaataatctaagtgctatttatactggcccaatacatattaccagtaattatggcctaacaaaattacagttctatggtgttgatagatttggacataatagttctattgtttgtgtgaattatttccatggaaattatgtggctaatttgaatagtggaaaatattttgatagtgtacaagatgctattgatgatatggacactataaatggtgatgttattgaagttaataaggatttatctggagcttgtgatttgaataaaagtgtctatttgcgctcttcatgtctaaataattttacttggagtcagccgaatatagttattcatagcaataattctgttattgagggttttgattttgatggaagttctatgcattctgttattttagcaggtgtttctaattgtgttataatgaacaatagattttccgttgttgaatatggtatttggtcttccttaagtggttataataatgttattatgaacaataatttttcttcttatggtttgtcaatttcattcatttatttgtctcctatatatggtggagagaatacttatctaattaaagataatatttttaatcattcacgatgtggaatatgcttagaatcttctttgaattctattattagtggcaatgttttcataggttctaattatggtttaaaaattaacggaaacaataattccgtagtttataataatttaagttttaattcttatgcggtttgttgttttggagacgataatacattaatgtataataatattgttaataatgtttatggaatttatggagattattcaaacttgactgtaaattttaatcgtttttataataatagtgctttcggcctttatgcatctggaggtccaattaatgcttgtaataattggtggggtcataataatctttctgtaagcgaggattatggatttgatatttgtcttcaaacagacaatattgactatagtagttacataattttaaaaaattacaaatcctattttgaattaagaaataattttatagataatgtttcttgtgttgttgatttaaattggaataatttaaaggagtatgtgggagagtttattgatggggtaaatgttaagtttgttgatatgaaaacggggccttatcctcattggattgctattgaatctggtcaagcattatataaaacttcatgtgtaaatcaggttaataatgttattattagtttggatgatgagattcaaactttaaattattccagtttttcctcttcggtaaggttttatataaacactacaggtttcataagcaataatagcggaaatttggataattttgttgcgaacgaaaatggatcttattttacttttgatgttattttagatcatgatgtcgattgggtcagttatgtttggagaaatattggtgattttaaatctgaattggacttgattgttgatggggatattgtttccacatcagttgtggagagttcattttataggaataatttaaataatatctcaagcaatgtttttgatgcaatattgttatataatgattggtattatagtcgtttaaattgggctaaggcagttgtgtatgtttatctttctttggagtataatactactgatcttaatgatgttcaatacatttatagtaatgttaattggggatgtttaagtcctgaaaggaagaatcaactgttaaacgatcataatattacttttaatgatgcattatggaatttaatacagaactcctataacttgtcagatgaggatgtgatttttattaaaaatcatcataaatctttcaatgattctgtttgcgtttctgctcattattatggaaatgataatgagataataaatttaaataatataaataataatacattagcttattccggaggtatggtaattggctcgtggaaggcacctattatgtatgttgatggttcttatcaacattttataggtaataactcggacaatagtacggatatttttacttattatcataattatgggaatggcagtattgattgggcttattcaactaattatggtaatttaactaatggcacttatgatggcttgatgacttttacttttgcaaatgataaagttaatggcagtgttttaaatcattatttaagtgagaaaaatcgtactgatgttaatggcagtctggtttattccaatggttttatgaaagcggcatatggcagctttcttgaaggtttgttggttatctatatggatgatttggtggcagatcttgtttcttcaagatataatgcctcttgggaaagggtcagtcctatggttatgagtgttagagatgaccatggcaggctagtcatgagcggagagtctgatttttattttggccgtaagcttttatgtgatgatgagaatataatcaagagcttttatttcgcttgttcaagtgttttctcttccattgaacattatgttcaccaaactttattcccagaccgtatagggtatggtgttacagttgatttgggccgtcttttagctgatggtgaatgtctttctattgttgatgaaggtcgtttcatttatatctgtcctaatgaatctgatgagatttattatttgtgctttgataaattgactggaatcttgatggatgcctccatacttggcaatgatgcttattgctacagtaatcaacagacagaatgggcttttacattaggggaggagctgatagataattgtgatttgatttgggattatttaaatggattggatgtggatatttgtgctttgaatgtttccacacaagacatgttaaaggtttgttatggattcaatattctatctgatttgtttacctgtgctttattgtccgaagtaaatattctaatagaatctattggtttggaggaatcttttaatgccattgttcctttagttggagtattagtttcttctttggagaatattggatcttatgttttagatgaatacctgtctaatcctaagtttttaagcggtgttgtagggggcttattatttgaggctggaatgatagctacatgtacaggtgtaggggcccctgtaggcttggctttaatgggtgctggaacaatatgcacagcatatagctcaggattaatagattataatgacaatgatgggatttacttcaacaccactcttgaaaatcaggccaatttcggattttcaatgtcctgtaatcttattagtggaggtattgggggtttagcatcttcttctgcttttaaagctacagggtctgaagttatacaaattgcaagtaaaaatgctgtaatagactcaaaaggattttatacaacaactatttctactaaatatgttgcatatgaaggttcaagtaatactgtaagtagatatgtgattaatcgaatggtaaattctcaaaatccttctaaaaaaatctttattttaaaaggatgtaggaatattttagattctttaatgcaagattgtatatgggaagaaagaaataatcttttaataaagtaa

SEQ ID NO: 723 - DNA, 567 bp, Methanobrevibacter ruminantium
  source 1..567: mol_type = genomic DNA
atgggagtattagctagtgttgctggaggcatattttttgaagcaggcatgattgctacttgtacaggtgttggtttgcctgtaggtttggctttaatgggtgtaggtacaatttgcactgcttatggctctggtttatttggcatgacagacacgggcaatttctattctaatctaactgatgaaaatttagccgattttggcttttcaatgagtttaaatctcattgggggagggtatagtgcagctgctgcgaaatctacattaaggactgtaggaggtaaatcggttcagatttccatatctaaagcggcatttgcaagtgaccaaagaggtgcatacaccacttttcatacaattagttctaaaacatatattcaaaaagttgaaaatggtgcattcagtaactgtggagaatacttaatagaacaagaatttggaacaacagtaattgaaaatataagaaaatcattaagagttttatcaattgattatgctttaaatttttgttatgattttcttaaagaaaattatataaagagcttagatggaggtttatatgtataa

SEQ ID NO: 724 - DNA, 168 bp, Methanobrevibacter ruminantium
  source 1..168: mol_type = genomic DNA
atgaatgctgcttatggtagttttcttgagggtttgttggttatctatatggatgatcttgttgctgatgctgcaggggagcgttataatgtcaattggacacgtgtcagccctatggtcatgagcgttcatgataatataaaaggacatatcttacccgggaagtga

SEQ ID NO: 725 - DNA, 1359 bp, Methanobrevibacter ruminantium
  source 1..1359: mol_type = genomic DNA
atgacaaaacttataaaaagagaagttaaaagggaatataacgaggaaagtcctctaaagcttaagatagctaatgccatctctacttttacaaatcctccgattatttgtattcctttgtttttattgatttcatttgtgcttgcatctaacggaaatccgttttcaagtagtttcagctttgactggatgctatttgccaaatgcgagatcatttcacttgtatttgcatctgtccttcctatggcaatcataatctactgggcaaagaagctgaatacagataaggacatctcaaatcgtgaagatcgcttcattccccttatcgtaggggtgttgtcctacctgattggctttgtaatatcatttttcttcgaattgccaaacttcctgacaattcttctcttatgttatgcagtaaacacattcattgtcatgctcattacaagcctatggaaaataagcatacatacaacaggattaagcggacctgtagctgccctaatcatgcttcttggacctattggtgcattatttggacttttatatcctgtcctaatctggagcagggtcacccttaaaaagcatacaatggctcaggcaatagcgggaggaatattcggattcgtattcactgttggtgaaagctatctttatatgcgcctgtttaaaatgagcgttccaggccttgtgccgttagcggaatgcttctggatcatatttgcccttgttgcctgccctatagttcttggaatatgcgggcttttggaaaaaagaggaatcgaatcagttataagggcaaagctattccacctattggctttcatcggatttgcagcattctacttctacggaccctctagcgcagtcttgattcttatattaagcgctatagtaagcgttttagtaacaatatttgcaggagatacattctcatggtataagggaatcagcagaggacttgaaagggaaaacctatcaatagtgctctcacttgcttgcggtctgatttggatatatgtggcaatgaattacttcaatatagaaagtgcaataatcgctacaataattgtggcctttgtaggagcaatagcagagcctgtggcaatcaaatatgcgagatataagttccctatgaagtctttgcttggaaatgatggaaataagtcaatagaaagctctgtggtggcattgattgttacaatgattattcttctattgtttactcaaaacgtatttgtttctatagctgtagggcttctagtctgtctgattgagacattcgttccaaaggaattggagaatctggttattccagttgcttgtgcaattatacttggctttttgcttcattattaa

SEQ ID NO: 726 - DNA, 3789 bp, Methanobrevibacter ruminantium
  source 1..3789: mol_type = genomic DNA
atgttgaataaaaaaataataataattttaacatttattttaatattgtctatttcttcagcaagtgcatctgcagattcaacagatgaaacaatcttatcagatgattctgcagggcttatcaatttagacaattctaataataatctttatttagatgataatcaatttaatttagctaattctaattcagataattccaataactttaatctagatgattctaattcagataattctaacttttatctagatgaagatttagacaataaaatcaatgaaaatataaaaaacactaaaacaatcttaaaggagaataattcatcaattgcttccttttcaaacctttcacatattctatcaaaggcttcagcaggagatacaataatcttagaaaatgattataaatatgattctgcctatgatagtcaatatcagggaggaattgaagtcaattccatcacaatcgacggaaacaaccattatatcgatggaaatggagaggccagaatattctatttggcttcagacaatattgtcttaaagaacatcaagtttataaacggtttcaatagtcaagggggagcaatctatgcaaaaggaacaaatgtcaatataactgactgcatatttgaaaacaatcttgccccagataatggaggtgcaatctatgttgaaggaaatgcttcaataaaatccgtaaaattcataaataactctgcaggatatggaggagcagcatatataaacgattcctccattcttgaagatctgatattcacaggcaatgtggccaatattgaagggggagcagtttacattggaggctcaagcaatataactaactgtatttttgatggaaaccttgcagataagggtgctgcaatatttattccagctaaagaaagccctatgactccaagtgaggatgttccttttgatgaatcagatttaaattctacagatatggatttagattctacagatatggatgataattctaccgattacaatttcacagatatggatgataattctaccgattacaatttcacagatatggatgataattccacagacatggacgattaccctgatgaaagcgatgaagacttcccagatggaggagattatgtttttccagattggtgggaaggtgatgaattcgaatatgatggaattgaatgcataaacgttttcataactaattccacattcatcaattcaaatgatttctataggggagccatcttctcagagcacgacaataacatatccattgacggatgcctatttgaaaacatgagctcccagtatgctccggcaatctactgcaacgtcatggtaaacatactcataaacaatactggcttcaagaatctccatgcaaatggaacaggtggggcaatggcctttttggataatgtatatgcaatagtagataactgcagcttcaaaaacatatcttcctctaaaaacggcggagccatattttatgattcaaacagttggggacactcctctcctgtatcattaattgtccttaattcaagcttcttaaattgctccagcgactatgggggagccatagttgttttaggaggaggattcaaatctaaagacagcagcttcataaacaattctgcaagatatggggccggagcggttcatgtctatacagattatgacattttagtttatgacactgtattttacaacaaccgattgaatgaggacaatacatcatttggaggagccctctttattgactctgccgaaaaggcgataataaataacacccgatttgtcaataactcaaatgatgcaatatatgcttatgaatctcgaataaaaataaataacagctatttcgaaaacaacgatgaatatttgcgcagcatctatacagaaggactgatattaggtgataacaagtataatgatgacacattagttgatttggattatgaccctacatatatcattataggaacaggagaaggattaaagctggatttaataaataacacaatagatgtaactacaattccttcaagctttttagctgcagactggggctggatgagcccattcaagaatcaggatttctcaggaggatgctggtgcttctccacctgcgcagcgattgaatctgcattgcttaagtcaacccaaaagacctatagcctttcaatgcagaatatgcaaaagctctccacagagtattccaaatatggaaacaaccatattgtagaggctggatcaacaattgttgctttgcattatgccctttcctggatgggagtattcccagaggagtatgacacctttgacatgattggaaaattaagcagacaaatctctacaaacgagaccattcacattcaggatgcagcattcacctatcctagaagcatatcctatgatattgaccaaataaagcagactatcatgaagtatggaactgtaaccagtgatttctatgctgtgaatgaggctccaaacttcaatgaaaacacttcagcattctattgcaacgagactgacggaagggatgcaacccacgctgtagctgttgtaggatgggacgacaactatccggcaagcaatttcttagtcacacctccaggagacggtgcatggattattaaaaacagctatggtgaagaaaactatgaccatggatatgtctatgtgtcctactacgatacagtattcaatattgatggcggagttgcatatctctttgaaaatactgaaaactacactaaaaactaccaaaccgacattggaggagacatattcctagttaacgacagcgatagctattcctataagaacagctaccagtcaataggagatgattacattagtgcagttggaacctgtttcaatgatgcagatgaggactatactgtagaaatctatgtaaacaacgtcttaaaaacaagccaaagcggtaaatctccatttagaggattccatacaattaaactggaaaaccaaatccaagtaaagattggagacaatttcactgtagtaatgaaaacacattcagtgcctatagtaaacacatcaagaatgcatttcaaggccaatgtatcattcatagacaatggaaccggatggaaagacgcaagcgatgacaatgcgacagtgctcttaaaggtctataccatggagactctaagggaaaatcttacagacagaatccctacaagaatagactgcaaaaacatgacaacaacagctgtagcagcagaggacggaagaataggcaagtactttgtagtcttcttaaaagacgaaaacggtacagccctatctaataagccaatcaagataggtttcaatggaagggtctacgacaggacaacagatgagaacggaagcgccaagctccaaataaaccttgcttataagggaacctacacattcgctataggtttcttaggagataatgattatttaggagcatttgaagtagctaagataactgtaaaagtccagactcctaaattagccacttcaaataagtcttataaggcaagtgcaaagactaaaagcttgactgccacatttaagactgctaatggaaaagttgttgctaataagaagatcagtttcactgtaaatggcaaaacttatagtgcaaagactaattccaaaggaatagctactgtaaaggtctccttaaacaagaagggaacttatagttttacagttaagtttgcaggagataatacatttgctgctgttagcaagaagggtaaattgactttaagctaa

SEQ ID NO: 727 - DNA, 1245 bp, Methanobrevibacter ruminantium
  source 1..1245: mol_type = genomic DNA
atgagtgaggtatcctcaaaggaattatatgagtttaagaagacattaaaagaactcgcagaaaagaaaggaaaaggaacagaacttgtttcaatgtatgttcctccagaaaagcaattaagtgatatcattaagcagatgagagacgaattaggacaaagcgctaacatcaaaagcaaatccacacgtaaaaacgttcaatcagctattgaagtaatcatgcaaagaatccgtatgattacaaatgaaaacaaggatctccctaacggttttgtgctctttgtgggaatgattcctaaaggcggtcccggcactgaaaagatggaaactgtagtaatcgaaccgccggagcctgttcaaacctattggtacatctgtgacagcacattcttcctagagcctttggaagacatgattgcttcaaaggaagtctatggtattgcagttatcgacagaaacgaagcaaccatagcaactttaaaaggtaaaagaattaagattaccgctcacttaaccagtggtgttccaggtaagcataaggcagggggacaatcacaaagaaggttcgacagggtcatcgaacaattggctcatgagttcttaaagagaatcggccagcatatggatgacgacttccttccaatcaaggatgaattgaagggaatcgttcttggaggtcctggatacactaaagaggatttctacaatggagactatatgcattatgagcttaaggacaaagtcatcacaactgtagacacttcctacactggagaatttggtattagggaaaccattgataaggcttcaggtgcattggaagagttaggtgttataaaagagaaaaaacttgtccaaagattctttaaggaacttagagatgacaacggcctttattcctatggtgaaaaggaagttagaacaaacctccaaataggtgctgtagatattcttcttctctctgaagaccttaaatcaaaaagattaaccttagattgtcaggcttgtggattccatgctgaagtaacccaaaaggaaggtcaaaaagtagaggatctaacctgtcctcagtgtaatgataagatgaaaatcacaaaagaagaggatcttattgaagacctttcaaatattgctgaagacttaggcactgaagtggaaatcatttcaactgaaaccgatgaaggtatgcagttatatagagcatttggtggtatagcggcgattactaggtataaggtaaactaa

SEQ ID NO: 728 - DNA, 654 bp, Methanobrevibacter ruminantium
  source 1..654: mol_type = genomic DNA
atgagtgataaagaggtttatggcatagtattgtctcaaaagttaacaaaggacaatgtaaatatgggagttgtcatggggaccgagaaatttacattgaaaaggatagagcttaatgaagatgtgagattaaagccccaagataagattctgattacaaaagacagcgaagaacttaaaaagaccgatcaaaaattaagctatgatgacttaagcaatgaagaacagatcgaagctgaaaaagcaattcatagcattgtgattgccaatgaaaacaagtatgtaggatttttcaataagcaaagcaaggacggaactcagcttcacttattggaaggcatcagccgaaagaactcaatgaaaatcattgaagaaaaggaattgaatggcgactttgaaagctttgaggacattgacaatagaatcagcttcattgacgacagcgaagacctaattgcaaaaagagtattatatgaattaagcgaacttaataaggtaaaaaaaggaagacctacttatttatttgcaagtgttaaaaggtcatctaaaaaggaagttcttgaattggatgaatttgaggatgatgacagtttctttattgaaaagttaaaaagagagggcttagttgaacaagagggaaaaagaattagataa

SEQ ID NO: 729 - DNA, 426 bp, Methanobrevibacter ruminantium
  source 1..426: mol_type = genomic DNA
atgactgatttaaacacttgctctaatgaaaagttatcctttaaatataatgacaaatgggaattggaagcaattccattggaaaacaatcctgactgcattgctacattaagctatgaggacggcagcctattgaatgtaattgcattcccatcagagctagagtcattagacatctttaaggaagttgttgaagcaagcttaagggatgatggggcagagatagtatcctctgagatagcaaatgtaaacaaaaggccttcaattcagattcattccaaggtaacaacccctgaaatcagctttcaaatgttttcagtcatcttcctggaggaaggattcttatacatatttgaactaagggcggtaagcgaaatagtccacgaattcatggaaattgtaaaaagctttgaaatcctagaataa

SEQ ID NO: 730 - DNA, 804 bp, Methanobrevibacter ruminantium
  source 1..804: mol_type = genomic DNA
atgattatcaaggctgggaaaatcaataaagctagaggcaatatagttctcacaattggtaaggaagatgtcaacaagcacaatcttgaagatggagacttcattatccttacaagtgatgaatatgaggacctaaaggcttcctctgaaattgaagtctctacaatggaagtaattcccgatgatgaggcagtcatcaaattggaatatgacctaaaggaagcaaagtcaaaggaaaagatccttttctccaaggttgaagagcttgaaaagctcaatttagaattgactacagaattatccaagattgaaaaggagaattatataaataaaacagtattgacagattcagaatccggttctcttcttgaagaaatcaaaaatgtcaacgataaaaacgaagagctgaattctgaaataaagaaattaaacaaggacctaaaggaatccgatgaggaaagaatcgaacttctacaggacatgaacgtattaaagacaaagatgagctttgatgcaggagagatttcaagacttagggaaagggaatccaaatacagagaagtattggagattatcctaaagtcaaataagaacatccttgatgaagcggtcaataagacagttacagcaaccatccatgagataaacaaggagctgtcacagacaggattaatcagaagaatcagaggacttacaattgtaagagagcctgaaataagcaaggagtccatttccagcaatgcatataaacagctggaaggagtcattccagatgaatatttcctggattctccagatgaataa

SEQ ID NO: 731 - DNA, 504 bp, Methanobrevibacter ruminantium
  source 1..504: mol_type = genomic DNA
atgggttattttagaggtgaaataatggaagaaatcacatttaatgaagaaggaatcaaatttaagtatttaagcaattggagagaacaggcaaaagagtcagttggcccaaattgcataaaggcattggttaaggttgtagagggcaagccttccacaatcacagtttataaaaacgatgcaggagatgctaaggctgttgcccaattggaagagcctttcaatgaatcattcaaaagtcaaggttggaacattgtaaaatcagctattttaaatctcaacggcaatcctgtctttaatattgtatccgacgctcaagaaggagatacaattttagaaaacaatacttctgccataataaacaatggaaagatgtatgtatttgaattgatgcattttaaagacttcccatatgcatataatgattatttgtcaatcatggactctcttgaatttgtaaacgaagaggaaatcgaagagactgaagaagaatcagaagaataa

SEQ ID NO: 732 - DNA, 423 bp, Methanobrevibacter ruminantium
  source 1..423: mol_type = genomic DNA
atgtctaatctattccaaaatgaccaattaagtttcaaatatccaaagaattggaaactagtttcagatgatgaaatcgaaggctgtttagctatcttagattccgatagcaaacacagcagagtgatgatattcaaatacccagaggaaggactgtcattggaatatcttaaaaacgcaattgaagacattccaagagaagagagcctaaaagtaatatcatccaaccttacaatattggcaaacaaggaaacccacgagcttatagcagaagatacaagccatgagcctcctttaagaacccattcccttacaaccatccacaatagggacgcttatggattcaatttcatgggattcggattggacaatccagacgaagagggattccttttcatgtataggactcttaagtttgaataa

SEQ ID NO: 733 - DNA, 612 bp, Methanobrevibacter ruminantium
  source 1..612: mol_type = genomic DNA
atgactttaaaagaagaaaaagacaaggtccgaaagtcaatctatgacaatctattcaataatggattttccaatcgaccaaatggtgactatggcaaaatcccagactttaagggctcagatattgcagctgaacttttatctaaaacagaagaatggaaatcctcaattacaatattctctagtcccgacgctgcacaaactccagttagatatttagccttaaaggacaataagaaccttattatggcaagccctaatctcacacacggctatctcttcctggaaggacaaaatataaaggaaatcgaagaagcttcaactaaggaaggggcatttaagcactgcagtaaaaaggacatatcaaacataaatgtcgaccttgttgtagaaggctctgttggagtggacagaatgggacatagaataggaaagggaaaaggatttgcagatatggaaatagaagatttaaagaaaagaaacatcattaataataccacaccaattgcaacaaccattcatccattgcaattagtgaatcacattccaactgaaagccatgatcaaagaataaacatgattgtcacaacaagagagattataagggtctaa

SEQ ID NO: 734 - DNA, 546 bp, Methanobrevibacter ruminantium
  source 1..546: mol_type = genomic DNA
atggcagatttaaaaggtactaaaaccgaagcaaacttagcagcagcatttgctggtgagtcccaagctcatactaaatatcaatatttcgcaagcaaagctaaaaaagaaggatacgtacaaatccacgacatctttatggaaacttccaaaaacgaaaaagaacacgctaaaatctggttcaaacttttacacgacggagaagttccagacactatagctaaccttaacgcagcagctgatggtgaaaacgaagaatggactgcaatgtacaaagaattcgctgaaaccgctaccgaagaaggtttccctgaaatcgcaggcttattcaccatggtaggaaatattgaaaaagaacacgaagaaagatacagagctttactcgctaatgttgaaggcgaagctgtattcaaaaaagaagcagaaatcgaatggaaatgtatcaactgtggtcacatcgtaaaagctcctgaagctcctttcatttgcccagtttgtaaacatccacaagcttacttcgaagaaagagctaccaacttcaaataa

SEQ ID NO: 735 - DNA, 159 bp, Methanobrevibacter ruminantium
  source 1..159: mol_type = genomic DNA
gtgtctaaaaaagaagataattgtcaaatagatgattgctctagtggaacttgtgcacctgtcagtcccttttcaaaagagggaatattatttttaattttcatcattgttttattcatagttctgtttttcttattatggactaatggattgatttaa

SEQ ID NO: 736 - DNA, 429 bp, Methanobrevibacter ruminantium
  source 1..429: mol_type = genomic DNA
atgagtgacatgtggggtctaacagtcagaggaatatgcgaatataatgataagatcttgcttcttaaattaagatcaatctcagctcacgacccatgcaaatgggaaattcctggaggcaaggttaaaaagtgcgaatactttgattctgcattaaaaagagaatataaggaagaaacaggaatggacataagcattgactcattataccatgtcattcaaaagaattatactgcctgcaagactggagaaaaaatcaaatccatacagcttatcatgaaagtttcaacaaattcagatgaagttctcattagtgatgaacatgatatgtatggttggtttacaaaggaagaaattaatgatatgattaaaaataatgaattaactcctccggcaaaagcagctttttgtaaaacactattggtttaa

SEQ ID NO: 737 - DNA, 507 bp, Methanobrevibacter ruminantium
  source 1..507: mol_type = genomic DNA
atgagcatgctttccaattatagactaaaagaattgctgaaaaaagagagcgaaatgactgatgaagagtatgagctctttctaaatgaatttagaaagtctgaacttttcataccaatccaagtggacctagattcccttgacttaaaggacgttcaattaaatgaaatcaatcatataaatcaggagataaacttcagactgaaatcatacgagagcaaggacaaaaaaagaaccatccctctttttaccgatgagcatgagattgaaagacttaagatgaatacaactgtaggatctttgttcatgagggacctgtgtgaatcaattatgcctataagagacagctttgaccagataatcattaatcctaaaagcgaaaagtcctttaagatctctgtagatgagttcttggatttattcgatgaggatagggaatttgaagacctgatgaaagaaatagaaaatgatgaagagtttattgagatgatgaaaaaggaactctga

SEQ ID NO: 738 - DNA, 405 bp, Methanobrevibacter ruminantium
  source 1..405: mol_type = genomic DNA
atgaccctatctgacaataagaagctaaagaaattattaaagtccaaatctagagttaaaattgaaaataatccaaatctcttttataaggagtttctaaaatcaactctctttgttccggtgattgcaataaacgaagatgagaacctaaacgatggagacacactagacctgcagattggattctttgatgaggaaaatggagatagaaacatctatatctttaccgattcaaatgagatggaaagggctgattataagataacatcaatagctgtaaatatgaaagagctatctgttattctatcccagtttgatatggactttgattatattgtaattaatccatatggtccagacagctataagatagattatgatgagtttaaaagcagaactgaataa

SEQ ID NO: 739 - DNA, 480 bp, Methanobrevibacter ruminantium
  source 1..480: mol_type = genomic DNA
atggattttaaaagagaaaaatacatcgaagttttaatatacatcattgcaaagactgccaataagaagaatgttggaaagacagtcctagcaaatatgctttatttcattgactttgactattatgaattatatggtgagtcattgactggagagacttattttaagacaataaacggcctaaagcctaagcatttcgatgacactttaattgatcttattcaaagggacataatctatttgaaaagggaagctgattatgacaataagctgaagaaatattatattgcaaggattccagacaataagctttcaaaaaaggaatattttgttataaccgatgcattagatagattcagtaatctaagcgcaagcaagttcaattatattctatcaaaggacattccttttaagagtgcaaaaatggatgggcaaatcaattatgagtgcgtattccatagattggaaaaaactaattaa

SEQ ID NO: 740 - DNA, 723 bp, Methanobrevibacter ruminantium
  source 1..723: mol_type = genomic DNA
atgatatgtccaagttgtggaagtgaaaataaggaaggttctaaattctgtaaaaactgtggtgaaaggttaactgatagttctagacctaccagcaccaatgctagtgcttcatctcaatcaaagagcaataagaatcttttgattatttgtgcaactataattatctgtgttgctgttgttgcaggggctatcctttttatgagtggccagtccactgattatgaggtggcaagcggtgaggctactaatgatcattcatcatctgccttgaattcctatgacagttccaattcaaatgatgaaagtcaggatgattcagcatcagcaagtgaagattcaagcgattcggccgatgaatataataagaatcataaatggggaaagagtttccaagaagcatcagaatatttccctgaagcatctgaaacagttgttactcatgttttctatgaagcagacattgacggaaatggctttttgactgacaacgagtttaaagactttaagagcttggtcagcttcactagaaagtatgcagcagatgtaactaataatgattatgttgacactcccgacctttgggagggagatggaagcgttagaacaagatactgtgcagatcatggtagaatagcagttggcagtgatgacaggtgtccgtactgtgctaaaaaaggtcaggacagtagaaccagaagcggttcaaccagatatgtttaa

SEQ ID NO: 741 - DNA, 849 bp, Methanobrevibacter ruminantium
  source 1..849: mol_type = genomic DNA
atgaacgaaatcattgataattataatgtgaatgaaaagatagaaatagacaactttgaactggaagacataattagcttaggagtaaacaatctgaccattgcagatgaagaagagttcttcaaattacttaaagaagcccaacttttcattttagttcaattgaacaaggaagaagtctttgatgtagacaatcaaaaggttgtagaggtcattaagcctatacctccacttggattcaacttcatgacactaactgtcaatgaaaatgaaagatcaattgttgcattcacacgaaaggagataataaaggaaatagggcttaaggcagaccatattgtaatgaacatgagagaccttgcaaagattctcatgggccttggagataccttctcatcaataataatcaatccccagaccgaacattcaataatgataagcataaacacattcttaagcctctttatggaaaaacctaaaaatccatttataggatcccttgaacagactctagacaaattgaaaaacgattatgtggaacttgacaatcattatatgtttttcatccgctcagactatgaatttatggaaaacgaatcaaaagatggagtctttgtagcaaagatgcctctaagggcaagcaccgatccaaacttccaggcaaaccttccaatattgcataagctgatgatgatggaaggtcagaaagtgttatatacaggtaatccaaacgaggaacaaaccgatttcgatgttttgatagctccaggaactgagtttgaaaagtattatgatgaggatggtgacacttccgtttggagatgtgtaaaacagccattctatgaatag

SEQ ID NO: 742 - DNA, 429 bp, Methanobrevibacter ruminantium
  source 1..429: mol_type = genomic DNA
atgcaagatgaaccaaataaaaaaataaatagagctaaagatgatgagaacttactttttgcaaggggagaagtcattcgattgatgaaagatcaccttgacaaggacaagatgattaccgaaagggtcaaggttgaaatgaacagattcctaagtaatgtgctcgtagctgtttgtgaggaacttaacaaatacccatacaccaccattgattatgaaatgctaaaggaatcaacctatccgtataccagaattaagcagattaatcaggaaagggaaagaatcctggtgcacttgaatgcaatcaaggcagattgtgatgcattgggtatggatattgaaaagactttaaagctcaatgagtccgatggggaggatagtgactttgttcctcataccagcagagtaaaagaggatgatggagagtag

SEQ ID NO: 743 - DNA, 1446 bp, Methanobrevibacter ruminantium
  source 1..1446: mol_type = genomic DNA
atggataatgaattcaaaataaactatctgcttaatatattaaaaacaactccaaaagtagtttcagacaggataataaaagatcagacaagattgaattttagaaaggattattatgaccttaaggaaagcattgataattttcttgaacacgacactgatgatagattctacatattgcctggccttaggggagtgggaaagactacaatagtctttcagctttatgactacctgaccaatgaaaggaacattaactcaaatcatatattataccttgatctagaccgattgaaggaccaaggaccattcaatctcttagaatatcttgatattttcataaaggacatcaatgaggaagcctatctcaataactggccattatttattttcatagatgaatcacaatattcctcaaactgggatcatgtaggaaagataatctttgatgactataagaacgtatttataatattcaccggttctgacgcattgaatcttcaaagctctatggactctgcccgaaggtctcttaaaaaggaaatctatcccctaaattttgcggaatacttatatttaaaatatggctgtgaaattccaagaggcataagtgattccatattcaatgcaatcctcttcaatgattttgagaatcttataaaagacgaacgctacattcaattaaatgtttataataaattcaaaagagatattaacaagatttgggacgaatatatacaatatggaggatttccattatcatttgctcgaaaaaaccatgcttcaataatccaactaggtcttgatatgaaaaataggatagttgaaaaggacctcgacatagtgctttcagtaaactcacagacacggctaaacacctattctctaataaatatcttagcattgcagaagcctggaaccttgtcatataacaaattggcaaagaacttggaaatctctaaaaaaaccgttggcaatttattgaatgcattggaatgcacacagatgatattccatatagagcctcatggagcaattacaaaaagaaacagaaggccttggaaatattatttcctttcaagccagatgaaagcggcaatctatcaaaattccggccaagcaactaaaacaaaaggagaatatatgggaatactaactgagaatctggttggatcattattatttatgatgaaaaacaaaagaaaacaggattttggaattttctatgaagaggaaaaggagagggctgattttctaatcaataccattgatggtaggataatacctattgaagcgggctatggcaagaagggcaaaaggcaggttataaattcaatggaggaccatggaagcgaatatgggattgtggtttcaaacaagactcaaagcattaaaatagaagagaatgtcatattcttacctcttaagacattctctatgctttaa

SEQ ID NO: 744 - DNA, 693 bp, Methanobrevibacter ruminantium
  source 1..693: mol_type = genomic DNA
atgacagaaatagattggtttaaatttgaagatagggattacgattttccattttataaaaagaatccccatatttcaaaaatgggctggcttgtcttattctttgtttttataattggatccatcttatcaatgagcgataagctttcatattcaatattatgttgcatagtctttatcgttccagtattatatttcctagactgggactataaggcaatatttagaaagccatctctcaaggacattgcccttgcagtggcactttttatcggatatcttatatatgcaataattatgggagcaatattggaatctgttggaatagtgagcagcggaatcattgatcctggaagcatagactggacagtacttattaagagcgtcttttcattaatgggggaagaattcatcaagttccttccattcatattcttcctaagggtgctttacaagtacacagataaccgtaaattgtctgtggtgatttcagtcgcattggttatggccatgtttgcatctttgcatgcatacaattgggtcatgttcatatatgcattgttcatacaaggctttggatcaatttttgagttttttgcatacatcaagacaaaaaatataattgtttcctatataacccattattgtacagatgcatttatctttgcaatgctactgcttggacttggataa

SEQ ID NO: 745 - DNA, 1593 bp, Methanobrevibacter ruminantium
  source 1..1593: mol_type = genomic DNA
atggataaagaaacaaaagaacgtctaggagaaatcagagctgcgatgaagaaatacggctttgataagattttaggcgaaagcgcaaaaaacaggatacgcggaaaagatgaggaagaagagagcctcctattggatagcgaagttccagtcaagttcagacttatgcttcaggaacttggaacaaccttcatcaaactaggccagctcttaagcacaaggcctgacatggtaggggaagacattgcaaacgagcttgccaaccttcaggacgacaaccctgcaataagctatgagcaggttaaggcaatagttgaaagggagcttgaaggagacattgacgaactctttgccgaattctcacatgagcatcttgcaaccgcatctatcggacaggttcacgaagctaccttaaatacaggggagcatgttgcagtcaagatccagaaagagggaatcacagacaagattgacctggacataaggataatgaaatacattgcaaaccgtgcagacagattaagcggcgagcttaagaaggtaaatctccctggagtgatggaagagttcgaccgcagcatccacaaggaaatcgactactacaacgaattcatgaacatgcaaaggattgagatgaactttgtagacaatccaaatgtccacattccagcaacctatcctaaatactgtacaacaaaggtccttacaatggaattcattgcaggagcaaaactgaatgacgtatatgcaagcgaaggagacgaatttgacaagaaactccttgcaaaaacagtgattgactcctatctccaacagcttctcatagacggattcttccatggagacccacaccctggaaacatcatgattctggaagacaatgtattgtgctaccttgaccttggtatgatgggaacctttgacgaggacttcaaacgcaacctcgcagaggcaatcttactcattatggaccaggacattgacggagtaatcaaccaattgatgtacatggacatcttagactatgacattgacacaaagccgctcaagagagacctaaacgatctcttcggaagatacttcggagtggatcttaaccgtttcgacggcatccttggagacctccttaaactcatgcaggaatatggagtagtccttccaaatgagcttgtgacaatggcaagaggagtctcaatggttgaggcaatcgcacacaaccttgacccagagattgacatattcgaatccctcaagccaatcgcaaagagaatcgccagagaaaggctagatcctaagagatacctcaagagcaagaaaagcaacataattctatatgagcatatgttccgtgccttgcctcagcttcttacaagaacagtccataagattgaaaacgaggagctccagttcagattcgaagtggacataacagacaaggtatctatagtagcattagtatccgctcttattgtaggttcatctgtagtctcattcggaccaagagcctttgacatgccggtaatttcaattataggctacataatagcaatcatcttaagtattgtcggcataagaaagttcgtattaaaataa

SEQ ID NO: 746 - DNA, 498 bp, Methanobrevibacter ruminantium
  source 1..498: mol_type = genomic DNA
atggatattagaaaagtaattggaataatattaatcattttgggtttaatctttgcaatctacccagtttacagcgcccaagcagtctcatggattgcaggagtagctctaatagcatttggtattggcttaatcctcgacggattctccatatggagcatgatggctggagtttcagcagcaaaaatattgctgggaatcatagcagccataatcggattcatgttcctatataaagtggatgcattatccttcattattgcatatcaattctatataattggatttatactgatatttgtcggtttgctaggtatttttatagcaatagatggaatatcaagagccacagcaatattgactttaatcttaggtataatatgcattatctgtgctttcttctcactttcacagccattatacactgcagttatcgttggaatctgtatgataatggagggaataaccttcctagcaagtggcataattgatgaatga

SEQ ID NO: 747 - DNA, 795 bp, Methanobrevibacter ruminantium
  source 1..795: mol_type = genomic DNA
atgggacttgcaaaagaggctagggatttagaaagagaaaacaaatatgatgatgcttttgaacttgcagaagaagctaggaaattagaaaaaaatggcaaatatgatgaggcaattgaactgatcttgaactatctggaccaaaatcctcaatataagacgattgactactaccatttcgcaaatcccatagaggaaatcctatttaatgtttatattgaagatatcgattcagtcaagacactgaatctggaagagtgtcttgagctgatttattttacccttgcaagagcatatggcaaaaagggagataaggaaaaagaagagaaatatttaaagattgcaaataagatcaatccggtctctgcaataatactgcttagattatgcaaatactgccaatccatcaatgagaatgaaaaaataaaggaattggctccagacatcatgaaatactcttataacagcaaaatattgatagagtcatacctcacacttgccttttcctatttagatgataagcaagagaaagaattatataatcatttgatgcaattttatcttactgttgaaacaggaacagacttttgggattcaataaaggaagatataaaatacttagaggagcatgagattcaagtgggctttaatccagaaatgtttagcatattaaaatatttgattgcccttcacacaaaacaaggccgggaagatactgcaaagtattttaaagacatattgtatttaatggaggaatttacaaagtctttaaatgaattaagatacgatagttag

SEQ ID NO: 748 - DNA, 1014 bp, Methanobrevibacter ruminantium
  source 1..1014: mol_type = genomic DNA
atggattgcattaaaaacggaataatgggacagattgtaggagatgcgcttggattacctgtgcaattccagcctcgtgaagaacgtgacatagaccccgtgactgatatgataggggatggcgcttttgagcttccagctggaagctggtcagatgatagcagccttatccttgcaacaatggatggcttgattaagagtctgaatggagataatgtagattctacaagcttaaatgatataatcgattgggaaattattatgagaaacttttccgattggcttaatttgggagaatacacaccatatggattttcctttgatatagggggagccacaagggatggaatctacaactatgatgacggatgggagccattggaatgtggaggcatcggcgagagagacaatggaaacggctccttaatgaggatcttacctattgcattctttatttattatttatccaaaaaatattcatttatcgaagaagacaagatgactgctgttcataatttgtcttcactcacccacagacacaagagaagccagatgtgctgtggaatctatgtgaacattgctcttgaattcatagataattttgaaaatgggaaatgtttagacttagaggaacttatatcctctggaataaacaaatccaaggaatattattttaatgatgactcatttgaggaagaattgcatcattttgatagagtcttttcattgaatattcaaaatcttccgcgtgatgaaataaaaagcggaggatattgtatttcttcccttgaagcaagcatttggtgtcttttgaataatgagaattataaggataccctcctgactgcagttaatcttggatatgacacagatacaactgcctgtgtagttggaggccttgcagggattttctatggctatgaagatattcctgctgattggattactcaattggccaaattagattatattgaaaatatgattggaaagttttctcaatctttaattgattag

SEQ ID NO: 749 - DNA, 408 bp, Methanobrevibacter ruminantium
  source 1..408: mol_type = genomic DNA
atgtatgatttgacaaagatccaaaaaactttcaatgagagggtatttagcagattagacgatgagattcttgaaagaaatggaattgataaagatgaggaactgataagagaagagttatttaggcaaagggaaataattacagtgccttttggacatattgaatattttttagccattgaagatgaaaaagtcctattatatgtcgagaaggcttcaagaatgggttcccataacatctgcatcattgatgatgattcatatgaatgcattgacgtttatgatgggtatcctccagaattgaaggaaagataccttgaccatttgaaaaggattaagaaaaccagaaatagatttgaggaaaatttaaaaaaattatcagaagaaaaaagtataaaggagaaataa

SEQ ID NO: 750 - DNA, 966 bp, Methanobrevibacter ruminantium
  source 1..966: mol_type = genomic DNA
atgcaatttggaaattatgcagtggaaataagctctgaaaatgagaatcatttaatcaattatcttaaatttaataatttcaaatatgaaaaagatcttgaaaactgtagcgaaaaagaggaatatgtgattgtaatcaatatcatagagagaatttactataagataaagaattatttggcaggaccaatactctctgaaaaggactttttagataagatcaattataataaatacagcattcataaaaaggcatattctaatgatggcaatttaatctatgaaggttataccatctatgaacaaggctatggggaaatagcctatggtcttggaacatcctactttccaaatggaaataaatgtcatgaaggagtatttgaacgtaaaggattgcttgaaggaaaggaattttattcaaacggccaattaaaatttgaagggacttatggaagatgcagaggttatggaccacactatcctagttttggaaactattactcaaaggatgggcaactgctcttttcagggaaattcaaggtcacttttggaggggtcggctatcccatgataaaagaacctaaatataagctacttgaaaaaggcaggccaagatacatattaaaaaaagatgaagatataactaagctaatagagaaaaacaccaatattgaaaataaaaagtatcctatgacttttgaggaatttgaagagaaggtattggaattgttctttgaatatcatagcgatgaatttatagaaatattaaagaaaagattggaggactataaaaagatagagcctaattttatgaaagccctgtataaacatagctgttgggtatatgacagcccacatatctatggagacacttgcaaattacaatttgaaaaagaacgtttaaggcattatccagtatatcgccttagagtgattgttgggcttgaagatggattcaggggatga

SEQ ID NO: 751 - DNA, 567 bp, Methanobrevibacter ruminantium
  source 1..567: mol_type = genomic DNA
atgatatctattaatataaaagaaatgagaaaggaaaaaatctatgaaggcagagtaaagatgggacacggaggaagaggaacaatccgtctgcataattccaatataggagaccaattatacgtaatatttccatcctacggcaagaaggaagacaaggatgggaacttggaaatagatgagatacttaggaagaccgttgaacttggcaaggacggcaaaaataacatagattttaacagggaatacagaggccgcaaatgcatcatcattaaaagggaaagtctaataaaactcgaatttgcaaaatggaaaataatctatgatggaatagtcaaaaaatcattcaatggacaaggacttataagagtaaaggacatgttcctaggagaaagagcatttgtagtctttggggaaagcctcaatgactcaaatgagaacataatggtctcagttaatgagatacgtaataagggaattcatccagacaatgaccatacaagccgagtcttgctttctaaagattacgtaaactgcaaatgccttgtagtcctccaggaagcttga

SEQ ID NO: 752 - DNA, 1491 bp, Methanobrevibacter ruminantium
  source 1..1491: mol_type = genomic DNA
atgagcaaaatacatttatcaaaatccaaatactgcaaatgcgtccaatgtgaaaagatcctttggctcggcagatacaagccggaggtggcagcagttgaggataaggaaactatttttgaaaatggcagaaaggtaggtgagcttgcaaaaggcctctttggagaatatgaagacatagaattcgacataactctcactcaaatgatagagaaaaccaaaaaactgcttgaagaaaaaccaaatgtcatcacagaggcatcattcagctatgaaaacaatttctgcagcgtagacatcctaaaaaacgatgaagatggtgttgaactctatgaagttaaaagctccacatcaataaaagagatataccttgatgatgttgcgttccagtactatgtattgtcaagccttggcctaaacgttaagaaggctgctcttgtctatgtaaacaatgaatacataaggggagaagacttggacattagccaatattttatcatagaggacataactgagattgcaatggcaaagcaggatgaggtaagggccaatatagagcatatcaacaactttatggaagctcacgatagggacaatgagccaaatatggaaataggaatgcactgttgcaatccttattcctgtgatttctgggcatattgtacaaaagaattgccaaagccaaatgtatttgacataagcggaatgtataagtcccagaagtttgaaagctatgccgaaggcaaggtctcatttgaggacttgaggagtgcaaacatcaatccaagatatcttgagcagatagactttgaactaaacgacagagggccaaaggtagaaaagcaagccataaaagactttttaaactctcttaagtatccgttgtactttattgattatgagtcctgcaattatccaatccccgagcttgaaggaactaagccataccagcaaatacctttccaatactctttgcatataataaaagaagagggcgctccattggaacataaggagtttctaggagacatcaatgacaaaaacatcatcagaacatttgcagagcatatgataaatgatctccaagaagacggtagtgtaatcgtatataataagtctttcgaatcagccagaaatagggagattggagagatgtatccagacttaaagggccagatgaatagaatcaacgataatatggttgatttgatggttccattcaggcaaaggaactattatacaaaggaaatggaaggctcctattcaattaagtatgttttgccggctttatatccagatgatccggagcttgattacggcaatctgccatcagttcataatggtggtgaggcgtcagatgcattcttgaatctaaagggcaaaagtccagaagagcaagagcaaacaagagaagatctgcttaaatattgctggctagacacatatgccatggtaaaaatctgggagaaatttaaagaagttgcaaaataa

SEQ ID NO: 753 - DNA, 348 bp, Methanobrevibacter ruminantium
  source 1..348: mol_type = genomic DNA
atgaaattaagaaatttgcatttagactataaagatgaaaatggagatctccgctatgagctaagaaacggagcccattctatgaaagatgcagaaggcttctctccagaggaattctattcatctttggataatgtaatcagagtattaagcccaaacaattcatttagaccaattgaagcctaccctagcaataatggaccaaaagctctatttggattcttattttatttcttaaaaggtatgggctgtaaaaagggcttacaaaaagaattcgattatttagaacagttcattgactatgaaattgatctctttatgattgtcaatttcttaagagaattataa

SEQ ID NO: 754 - DNA, 756 bp, Methanobrevibacter ruminantium
  source 1..756: mol_type = genomic DNA
atgccattggatataattgaggatatatggaagtatacaacaaataataaaacatttcttttaattattttggttttattctacttgttttgtatgttcatgcaaatttttgatgaaatgaggatatcctatgcactttatctgtcaatgataccttatattttcattgcaggctatggaatggctataactaaagatgtaattgataatggtaagcgattgcctaaaatattaatcaaagatgtcattgttttgggaataaaatcaactgttgtttttattgtatatctttctgttcaagggatatttttttccctagtatcttatctatgcaattttccaataattgatgttgaagacctattgttagatttttttgaaacagcacctttattatttcatcataatcttgtaaatacgcttatttttattgttgttgattttgcagtattttatttcaccatgttcttcatggaaatgggattagctaaattagcagacactggcagatttttggatgcttttaatttgattaagattaaaaagattattgatataatcggatggagactatatgcgaaacattatacagtaattatatttttattgtgggttttctcattgcttatagacgtagagactccattttttgttcttgattatatttttaaagtatttttaggtttattattgttcattactcaatattggggcataggtgcagtttatagaatatataaaattaaaacaaactaa

SEQ ID NO: 755 - DNA, 294 bp, Methanobrevibacter ruminantium
  source 1..294: mol_type = genomic DNA
atgattagcagcgaagaaaaagaaaagattaaatctgatatagtagagaaagtaaattcagtcttagaaaaatataatgaatcatttaggatggacaaggtaactgtcttaaatagagcggaaacagtaaaattcatgggaagctatagggtttatgagagaagaaactactgctctgtttcaagagagatcaattctttcttaaataaatatggagacgttgagataaaatccaaaaagataagagatagcggaatgaaatttacaactgtaagctttaattttgaattataa

SEQ ID NO: 756 - DNA, 822 bp, Methanobrevibacter ruminantium
  source 1..822: mol_type = genomic DNA
atggcagaaaatgagataaaactattcaatgataaacaaatccgtactaaatgggatgaagagataggagattattatttttcagtaatagatgttatagcagtccttacagaaagtagcaatccaagtaggtattggtcagaattaaaaaagaaaatttgtgaagaacagggtcaacctttcgaaaatatcgaaaggttgaaacttcccgctaaagatggtaaaatgagattaaccgatgtagctaatactaaacaactattacgtatcatacaatcagttccgtcaccgaaggcagaaccttttaagcaatggttggctcaagtgggaagtgaaagactagatgagattgttgatcctgaattaggtatggaaagattaaaaagtacttatcgcaaaaaaggttacagtgaaaaatggatttctcaaagaatgagaagcattgaaattcgagatgatttgactgccgaatgggatcgtgtaggtgttgaagaaggtttggaatatgctatattgactaatgaaatcagtaaggcttcatttggattgactactcgtcagcataaaaattataaaggtttgaagaaagagagccttcgtgataatatgaccaatgcagaattggttatcaatatgttgggggagttggctactactgagattagcaagacagagaatcctggtggatttgaagagagcaagcatgttgctaagcgtggaggcaatattgcgggcaatgctcgtaaggagttagaagctaacacaggtcgtaaggttcttagtaaggctaatgcgaaggataagaatttgttagaaaactga

SEQ ID NO: 757 - DNA, 294 bp, Methanobrevibacter ruminantium
  source 1..294: mol_type = genomic DNA
atgataagcatcgaagaaaaagaaaagattaaatcagagatagtagagaaagtaaattcagtcttagaaaaatataacgaatcctttaggatggacaaggtaactgtcttaaatagagcggaaacagtaaaattcatgggaagctatagggtttatgagagaagaaactacggctctgtttcaagagagatcaattctttcttaaataaatatggagacgttgagataaaatccaaaaagataagagatagcggaatgaaatttacaactgtaagctttaattttgaattataa

SEQ ID NO: 758 - DNA, 786 bp, Methanobrevibacter ruminantium
  source 1..786: mol_type = genomic DNA
atggataatagaaatatactaatcattattggaataatagtcctaatcgctgcagcagggattattctagtgatgttaacatcagaaaattatgaaagaatggagatagtgccaaacgggacaagcatagatgttccattaaacaagaccacatatgatggagaattccagagcgctagagtttggcattgggacaagggaatattagtcacatacaatagccatgaggataaaaacattttaagagtaagtgaattgggcatttacactctaaataaaataatagaaactggagaaaaggaaaatatcgatggatttacctcttatgtaataaatgccgatgagatattggaaatcgagctattcgatgccattaaattacattataccggcaaattctattgcattccattagctaatggaactaccggcgacgttatcataatctgttccaacgacagggacgaggcagttcatatggccaaatcaatccagtacaagaatgtttttccagtaaatagcgatttcaataacacaattgaaactgtggagaacctgagcgaatatctggagtcaacagtaaatgactatgcaaacagcactgattttgacaatgccgtttcaactgtggaaaacctaactggaaatctagagtcatcagcaaaggattatgtaaatgatgccaatttaagtgatgtcaaaacaacagtggaagagaaaactggaattaatattgatgatgctaaatccgatttggagcaatacattggaaagttgacttcataa

SEQ ID NO: 759 - DNA, 231 bp, Methanobrevibacter ruminantium
  source 1..231: mol_type = genomic DNA
atggcagaactcatggacaaaatatttgtagtgataggatacattcttgcaatactattcccaatagtcggaataattgtcggagcattattatacttcttgaaaaaggaagatgcattctaccaaacacatggaaaatacataatcattgttggtattgctatgattgcaataaatatccttttaattgcatttggcataattaccataccacccgtgggacaggtttaa

SEQ ID NO: 760 - DNA, 861 bp, Methanobrevibacter ruminantium
  source 1..861: mol_type = genomic DNA
atgaatgaaagtcaagacattgaagaaacaacaaaggtagacaacagcagacttgaagaacttctacagctctttaaggatgaccctagtcctcaaaatgttcaggaacttggagaggaaatcaaaagctcacagctttatcttccagttgtctactcccaatcaatgatagaagatatcttatctggagatgttggggaagttcgtgaattcaaagagcctgccggctttgatataaacttcctaaccaataatagaggagagaaggccataccactctttacaagcgatagaataatggaagaggcggggctaagaagctctgtaattgtaatgcatgtggaagaccttgtagatagccttcaagggacagagaacacttatcagctagttacaatcaatccgatgactgaaacaggcatcgacatgcctatccttacctttttgaatatgtttaagaaaagagagatgagcgaggaagagaaaagattccttgaaagcatgaatcgtatgctagaggtgctggaaaaccattcaatagcccttgaggagaagactgcattctttaaccgaggccctcaggactttatgaaagaggtagctgtcgatggggtctttgttccaaacataccattcagcgtaagcacaatcaaggagtttgaagaggatgtttccccatacctgaatataatactgatggatgagggaaaaaggatagtctactttggagagcctacggaggagaatccgtttaatgtattattggctccaggatgtgaaattgagatggtggaagaggtggatgagtttacaactgtgtggaaatgcggcaatcagccattctatgatggcatgaaatga

SEQ ID NO: 761 - DNA, 144 bp, Methanobrevibacter ruminantium
  source 1..144: mol_type = genomic DNA
gtggcaaaagccacaaataaatatcgaggtgattatataacaagattaaatgaaaccaagtatgtcgaatttaatattggaaatgcaccaaaggctatgatatttagccgatgcgatatttcaaaaggaggaagagagacttaa

SEQ ID NO: 762 - DNA, 321 bp, Methanobrevibacter ruminantium
  source 1..321: mol_type = genomic DNA
atgtccttccctactcaaatcaggaatgagcaagaattccgtcttgcccttctgcattttttaggcgatatcaatgtgggtctagtttatacaaagaaatttttcaaggagtttatgggtcttgacaattctgtacggcagatattggtaaatcagatcaagaacgctttgaaaaaccctggttgcggcaaattcatgtctcataattataagggtgaaaaagccgttagggttgataaacgttatagattgcattttaaatatgataaaaaagaaaacttatttgagctagtatctttttataaaaaagactatcaataa

SEQ ID NO: 763 - DNA, 1332 bp, Methanobrevibacter ruminantium
  source 1..1332: mol_type = genomic DNA
gtgtctaatgaatgtctaagatgcggctatgcaaatgaagataatgaaaaattctgcattaactgcggtgcaaagcttatggaagctgattcatctattccagatgatataatttcctgctatttttgcggctataaaaaccatgaagacaacaagttctgcatcaagtgcggcacaaggattcatcatgaattgccctatgaaaacgaattgactgagatttacactagatacggcgatgttgtggatttcaacaaagtttcctacaatatttattataaatacaacttgcctcaagactgctttctcctaaatagcgagcttaataactatgaaaagtatcatgaggaatatgatatggaatgtcccttttgccatcaaaactccttttccgttatagactctgatatctctataggaagcgttaaaattacagagttccatgaagacgagtatcattgcagcagctgcggtttggaaattaaattatgcaagaaagatgataaaaagattcccggccgcagatatttgatagcaaatatggacaataaggaacattggatctggaagaaatacggcaaaactccattgtacaaatatgaattggacgaaattttcaatggaggccttagtgatgacgataaggcaaggctactcagcatacatgcggattataatcgaaaagccataaaaatagttaatagattcagcatttatgtttctgtaaggtttgctgcagaaatcctatcagaggaggaaaactctctaaagccaattgacaccaccttctttttggatgatgacgaggaagcctatttcatgttcacagatattgattacagcaagcctatggtccgttattccacttttgggcaatcccaaggtacctatgatgcagtcacttacggccaatctttcgataatgcattttcctatttgaatggcaggtcattctatgccgacacaatgggatatttttccaccagcacatactcttcaaccgtatcctatgaaaaggtcaaggttgtagacaggggaattctccttttaaccaataaaagattgatattctcaggctccatccactcactggatatcgacatcgacaagatcttgaacctggttcatgacagacaatcccttatgatccatgtcaaaggacgaagcaacattgttaaattctctaatctagatagtaatacattttatttgaatttagatggcagacaacttagcctaaactttacaggctacctcttaagaaccttgattgtcaagttcatgagtccaaagaaaaagaggaatcttttgaaatcaaaaggaagcctttaa

SEQ ID NO: 764 - DNA, 318 bp, Methanobrevibacter ruminantium
  source 1..318: mol_type = genomic DNA
atgaatataagtgaaaaaataaaagaaatgcaaggggatttaggcaaatatcatgctttggagaaaaaagaaggagaatgtggattggaaaacctgattatgctcatactaaatgacggaggccaattcggtccgggcaaaatcattggtgaaagcagtgaatttttagactttatgttttataagagacaaggaccgatcttctctctcagcataaagaaggaacaccttagcggattttcaattttccataaggcaattgatgatgagaaacaagcagcagccaatattggaatccccaaggcattgtatcaataa

SEQ ID NO: 765 - DNA, 324 bp, Methanobrevibacter ruminantium
  source 1..324: mol_type = genomic DNA
atgaatttcagtgaaaaaatcgaagaaatccaaggaaaagtcaagagttacaattcagagattaaaggcatgaaaaacattccatcagaaaagatgattagggtcatgatggcagaaggagaaatacttgagccatgcatgatcattggtgaaagtgatgaatatattgatcttatggttgtggatttagacaagggaccagtttttacagtttccataaaaaaggaaagaatagttggatttggcactttccataagcctttagatgagttggcctatcctgaagaagagctaaatgcagtccctgctgcattatatctctaa

SEQ ID NO: 766 - DNA, 309 bp, Methanobrevibacter ruminantium
  source 1..309: mol_type = genomic DNA
atgcaaataattgaaaaagtggaaaaggaactggaaaagcttggccttacagtggatacggttgcaaacgatcatatcattgaagcatgtgtcaccaaggtttcattggaggacaacttaagcaaagtaggaatcgatttcgaccaaattgaaaagaagctttatccctattcaacatttgtcattcaaatgattcaacatctcgatgaagggggatccactgaagatatgattagggcattcctaatcgaagcattaaattattcactggaattaggggatgcatttggaatctctttagaggaatag

SEQ ID NO: 767 - DNA, 249 bp, Methanobrevibacter ruminantium
  source 1..249: mol_type = genomic DNA
atgaataaacaaaacgtatttgctttgatattattaacaatcattcttttatctgtagttgctgtcagcggatgcattggaaaatcctctgataattctgcaagcgattcatctggagattccgatgattccagtaattccatatttcacagtggctctgacagtgacgatgatgataatgatgacaataatgataaggacgacaaaaacgataatgataaagacgataaagatgatgatgacgattga

SEQ ID NO: 768 - DNA, 639 bp, Methanobrevibacter ruminantium
  source 1..639: mol_type = genomic DNA
atgataggtgacgatgacttctttatgcagaatgcagactatcactatggagctagcgactcagagaagatgtatggaagaggctatgatggctcttcagactatgttccaagatactcatcaggaggcagctatggatcttcctctggtgcagaaagctcagaagacggtagccttggaaaatactgccttataggaattctaattgttcttgggatagttgtttttgcaaacattggcattccagcaattactaattcattgtccagttcagtgacagtggatgatttgaatattacccgatacatctattcaaaccagtataactcaaaaatcactaccgattatggatatcagattacatacaaagagagaagctatggccagcatgccacaaatgttattttctattcgaaaaatgggaaagtattgtataatgacagccaatatatgggaacttgctatcttggggaagtgccatacataatctattttgatggaaaggcagactatgcaatatttgaagtatataaaacccaatttgattctggtgagtgcatataccgtgaaagagtggatgttgataataaaaatgtgataaaagagtttattaattatgatacattgtatgatgattaa

SEQ ID NO: 769 - DNA, 786 bp, Methanobrevibacter ruminantium
  source 1..786: mol_type = genomic DNA
atgaaatattgcaagatatgtagaaaggaatttccaagggacttgatgttttgtccggaatgcaactcctttttagaacctgtatcacactctaaaacccttgacgaaggaattgtggagcatggaatcaatagaataatattctttgatactgaaacatccggattgaatcctaattactgcaaaataatcgaacttggaatgcttgtcattgaagacgggaaaataatagaggagtatgataagcttatcaatattggagaaaggatagattccacaatcacaagaattaccggaatcactaatgatatgctgatagatgaaggagtgagtgaaggggacgttgctcaggatttaaaggaaaaattaatctctggaacattgatgatagcatataattgccaatttgacttgtcattcgcctatggtctgcttaaaagacattaccctcatgaggcagaggcaatcattgaggatgttaaatggctagatccaatgaccgtttttaaggatagaaaggcctatccccataagtttagcgatgccgttgagcattatgatataaggaatgttaatttccatagggcgattggtgatgcaaaaggattgtatgaagtttgtttgtcactgaaggatgaacgtgatgaccttggagaatatataaatgtctttggatataatccaagatatggaattaatggattgaaattcccatttatagaatataagaaacattattataatgattctatggtttctccaaataatattcttcctaagatatga

SEQ ID NO: 770 - DNA, 948 bp, Methanobrevibacter ruminantium
  source 1..948: mol_type = genomic DNA
atgaaactggaaaactttaaatacgagacaaatgacaataatttgataaattattatgaaattgacaacgacaatcccatactgcttataattcatgcccaaagcacaaattcaagtagctattctgatgtggtaaaggatttgtctaaaagatttcatttgattcttgtggattgctacggccatggaaaaagctcccacaacagggataaatacaatatagtcagtcagggggatgacttgattgattttatcaaatcaaaaactgatgaaaagatatctgtactgggccattcctcaggagggctcatcgcctgctatatctcttcaagatcagacctttgcgacaatctgatactggaggaccctcctctcttttcaagctctggagagaaaagatttgactattacaactatcatgacctttccacagtctgccataatttcatcaatcaggatgaggagaaggactttgtctattattacttcatgaatcagtatatgtggaactttttccctgaaagctcaagagaaaaaattagaaataaatccggagcatctgcattaaaatacagagaaaaacatccagataagcccttgaaggttcgcttttggcctaaaaatgttttagaggcctttaatggaatggaggaatatgacccttattttggagagaacttctataatgactcctttaactgtgatatagactatgctgagctactttcaaacataaagtgcaaaaccctgtttttaaaggcaaatacgaaaataggggaagatggcattatccagggcgccttaactgatgatgacttaaatcaggtgatgaatctgattgaaaatattgaagttgaatactttgactgtggccatggcatacacaatgaaaagaagaaagaatttgtaaaagcggttattggaacaacaaagatttttacaatttaa

SEQ ID NO: 771 - DNA, 3282 bp, Methanobrevibacter ruminantium
  source 1..3282: mol_type = genomic DNA
atgatgaggaaaacaatatttggagttatatttatcgtttttattttattcagcatttcaacggtttcagcaaacgatgctcaagttgacatgcttaatgatgcaagtgatgtggaattaaatcaagacttgaatgctcagcctatttcatcaaattgctatgataataatcagaatttaaaagctcaacctatttcagattgctctgatgagctacagaaatctgatgatgatttaaagctttccgaagggggatcaacaagtttcaaacagctttgtgaagatttaaataaaagcgacggcgaatttaatctaactcacagctataaacatgatgaaagtgatgaagagaatacagcggttttttatatggaaaatttggtgataaatggaaataataatattatagatagcagcaaatcaaatttcaactttaaattttccaatgaagcaaacattaccatcaatgatttgactttcacaaatttcaataaatccctatttgtaatcagtgacagccaattgacctttaataacgttaactttactaattgttcctcaaatctttcattgattgcgataatgtttcctagcaatttgactataaacaactgtaatttctattcaaattcatttgcaaattatctcgacggaccatttaacaaattagagatttataattcaaattttgatgggacaaattgtttagattctgctattaaagagaataggggccaactagtcattgaaaattccagctttgagaatttcacaggggttcatggaagcataataaactacaagggagactatttctctattaaaaactccaaattcatcaattccaattcaaacttcactggaggagcaatcattgtaaaatatttccctattgcctatgaagaaggagattcatttgtctatcgtcactctaatgacatgctgattgagaattgcacattttataatctttcatcttccagcaatggaggtgcaatccatcttgaccttgattcaggctctgaaggtattgtagaaactttaattgtaaaatcttccaacttcacagactgccactccaagtttggaggagcaatatccattttaggcggttatttaaacatttcctattccaatttccaaaacaatagcgccagctttgaaggaggggcgatctactcctcatggaccaatgcaaagattgaaggctctaattttactgccaatgaaggaagtcaaaatgcaggggcattatactttgacaagggaaaattgacaatcaatgactgtaagttcattgataataaggctcttaaggaacgagagagaactgcaaatgcaatctatgctcatgatgtagctgcctatttctccaattccacttttgacaatggaggagtatcagtttatgcagattttgcaagcgattcaaaaattgagaatgtggataaaaatgatgacatcttcctaatggacaaccatgattatatcgtttcagttgaaagcaagggaataaagcttaacttgaccggaaatgaaataaatgtcgacagcctcccatcccactttgacgcaagagactggggatggacaacttctgcaaaaattcagggagacaatactgactgctgggcatttgcatcaatatcctctttggaaacctcatttgcaaaagcctcaggggttttatataacctctcacagaattatcttcaaaagctccaattgaaatatttctattcaggagacaagagaaacagcttgacaggcttttcatatagcggtccaggctatgcattaagctggtatggggttttgcctgttgacaatggatatgatgaccgcggaatgattgcagacactgaccttgaggatgaaagaattcatgttcaggatgtgctgtttatagataccggaagggatgacgctgtggaattgataaaatgggccatactgaaatatggcgctgtcactgttcagcgaggcataaacggaccttatggtgaactaccaaccgaaggtgacgacattgccattatgagtcatggaacccatttcatttcacttataggatgggatgataattattttgaattagaggaaggtgatgacgatccgcttcataaatttgcttggataactaaggactccttatccggtttttcaactgctgattacacaaaatttgatgctatagacaattatgcaattgtccctcaaagggctgcagttgcctatatcttcgaaaatgacattgactatcatgtgaactatcagacagacctaactggattggtcggattcgatgccaattacaactattattccaatgagtttgtttcaaagtatgatgagtttatcggagctgtaggaacctacttcaatgaatcaggaatcgattattcctttgatgtttatctaaatagtgagaagatgctttcacaaagtggagtgagcgaatttgcaggtttcaggacaatcaaattagatgaatatatccatataaaagcaggggatgtgtttaaagtcgtctttaaaagcaattccattcctttccaagcatattcaagacagcattatattgaaggaatgtcccttgcaagcgctgacggtgaaagctggagtgaccttgcacctttaaataagaccgtatgccttaaggcatataccgtaaaggaggataaggaagtgagtccaagcagagcatccactaagatagattgcagtaacatgaccaccactgctgtagcaagtgcagatggaagaattggagagtactttgttgtcacattaaaagaccaaaacggaacagtgatagcaaataagccaataaaaataggtttcaatggaagagtctatgacagagtcacagatgaaaacggaagcgcaaagctgcaaataaacctcgcatataagggaacttacacatttgccataggattccttggagatgagaactatcttggagcatttgaagtagctaagataactgttaataagcaaagcccaaagcttgcaagtccaaacaaatcatataaattaacagcaaaaacaaaaacattgaatgcaagccttaagagtggaaatggaaatccagtaagcggtaagaagatcacatttacagtcaatggcaaaacttatacagcgacaagcaattccaaaggagttgctactgtaaaggtaagcctaaataagaagggaacatatagttttactgtaaaatatgctggtgatgatacctttgctgcagttacaacaaaagcaaaattaacaattaaatag

SEQ ID NO: 772 - DNA, 1146 bp, Methanobrevibacter ruminantium
  source 1..1146: mol_type = genomic DNA
atgacaaaattaggtatgggaatgatgagacttccccttcttgatgaaaacgattttaaaagcatcgattatgatgaagtaaacaagatggtcgatttgtatatggaaagcggattcaaccattttgacactgcattcgtctatcatgaaggaattggggaagaaagcttaagaaagtcagttgtcgaaaggtatcctagggactctttcaccgtttcaactaaattgcctctatttgtaatcactgaggagtcacaattggaaggtctcttcaagcagcaattggataattgcggtctggattactttgactattatctattgcataatgtaagcggatttacagaaaacgcctggaagaatgttgacttgtattcatttatccaaaagaaaaaggaagatgggtttatcaagcatattggcttatcaacacatggaaattcagaattcttagatgggattttaagcaagcatcctgaattggaatttgtattacttcagataagctatcttgactgggaagatgaggcaatcgagtcccgaaaatgcttggaagttgcaaagaaacataatgtgaaagttatgattatggaaccatttaaaggaggatttttagcagatgttccgcaagaggcagaaaaaattatgaaagattataatccggacaaatctgtcatttcatgggcaatgagatttgtagccaatcttgatggcgtatgccttgttttcactggtgcaagcaacagcaaacagcttgaagagaatattgaggaatttaaaaatgctgatccgttgaatgatgatgagattgagattctaaaggaggtttctcaaatcattaataagaacatcactgtagactgtaccaaatgcagatactgtgttgacaattgttcaagcaatattgatatagcaaagctctttgacatctataataagcataagctgcttgatacagatgagtggacccctcatggaaacgcttacttgaattattcaaagcttccagatgttggaatagcctctgactgcaccgaatgtgaaatctgcatagaggaatgtccgcagaaaatcaacatacctgaagttttaaaggatgttgcaaaaacctttgaaactggaatttatggatttgggaatgaatga

SEQ ID NO: 773 - DNA, 201 bp, Methanobrevibacter ruminantium
  source 1..201: mol_type = genomic DNA
gtgagtgaaataccagttgcaccagttgtacgtatcttaaaagaagcaggtgcagaaagaattactgatgacgctaaaaaagcatttgctgacgcagtggaagcttccgctgaagaattagctaaaaaagtcatcaaagcagcagcacacgctggcagaaagaccgtaactgtagatgacatcaaattcgtctgcgaatag

SEQ ID NO: 774 - DNA, 2208 bp, Methanobrevibacter ruminantium
  source 1..2208: mol_type = genomic DNA
atgggtttccttgataatgttaaaaaaatttttgattctggtgaaaataaagaggttaaacctcgaaatggtactggaaaaatagataaagttgaatctgttgaaagtaaaagtaattatgttaattttaatgaaaaagatgaacaacaacaaaattcagaggacctcattaatgatgaaatacttgatgaatcaacatccaatgaaactagaaatttcacatatctaaataatttaatccatagtggagttaaagagattattttggattcggatattgtttatggtaatgaggatgaggaatccagacatggcattaaattaaatcttgataacctagttattgatggtaatggatacacaatagatgctcttagagcaagcgaaatatttatttgtgatgctaggaatattgtgataaaaaacattacattaaagaatgggttttctcatcaggctggggcaataaataatcagggagagttaacaataataaaatcttcaattaataataatgaaggaaaattagccggaggaatattaaatcttggtgaattaaccctagatgaatctgtaattgctaaaaataaggcagaacatactggaggaatacttaatttctttggtaagctaagcataacaaaatccaccctcaaagagaacattggaattggcaataaagcaatatctaataacggaggggaattaactataaataaatctagaatcattaataaccagatagacacaaagacaaattttgttaataaagccaggacagtatttgttaataaagccattaaagcacgacgtgatgcagttatatcaaatgggggttatttaaggataagtgattctgaaattttaagtaatgaatcaaagtatataattttaaacatagagttctcaagaatatataatactatttttaaggctaatgagtcacaatatatcatatataatgataattatgaggataatggattatctagtttaggtatttttaattgtaaatttatagaaaataatgcaaaggcatccatagtttataatgatggaaacttgtgttcaatagataatgccctttttgaaaacaatgcctcacacaaaaattccaatattattacaaataaaagtaacctaacattaaataatcttaaaataaaagataatggaaaaaacatactaaatgatgattatatatttataagaaatctatcgccacaaattgaaagtaaaataattggagaaggtctagctgaaaatatcaaagatataaagccacaagaagaaaaatttgattttgggtatttagataaaaagatccatgataacaaaactggggaaataatcctagaggaagacatacgatttgaaaattatgaaatggattattatgagggcggaattgaattagatatggacaatttagtcattgatggcaagggacacacaattgagggggctaagaaatcaagaattttcttaattactggaaagaatattaaactaaaaaatataatatttaaaaatggatttttatacaaagattatgacaatctcatgaataaccaaggaggagccctaaaaaccaactcgaattgtagtttgacagtggaaaattgtaaattcctaaataacttctcacaagatggcgggggagcaatacacagcaagggaaatgtagacattataaaatcaatcttcactagcaacacagtaaaaatgtttggcggtggtggagcaataaataatgatgggaatttaagcattagagaatctacattcacaaacaactctgcagaacggtacggcggggcaatatgtaataaaggagaaataagtttatttgattctacactcacaaataacatagcaaaagttcatatttttaaaacatcttatggtaaaggtggagcaatatataacaagggcaagttgactatttctaattcctcattatccaaaaacacagcacaaattagtggtggagcaatatacaactggaagcataatgaaagatacgaacctatcattacaaaacagaggggcagtgaagcaatgtgttatgagggtgagttaataataacagaatcaacactctacaataacacagcagaagaatctgatggagcaatatacaacgaaggcaagatgaatattactgattgtgacattaataatgactccaataataaaaatacttga

SEQ ID NO: 775 - DNA, 1407 bp, Methanobrevibacter ruminantium
  source 1..1407: mol_type = genomic DNA
atgaccactttaaaattaacaagattaaacgaacctaacattgaaaaactttacgaaatgaaatcagccctcagaaacatccttgaagaaggagatttcaaaaatctaaacaccatattagatttccaggacaaggacggtagcttcaagctattctccacatacagaatcccttcagatgcaagggttgacttctgccatgagccaacttacatctgctcatccattcttatgaaagcatacttaacaggagattctgaattaagacaaaagatagaaactccactaatccacggattagaaagatgctgctgcagaaacttaactggccatggatacgattcacttcaaggacaaatcgacgccttaaacatctttatgaaaggagggcttagagaattcattgatcttcatcctgatttaaattcaaaattcacagaaatgatattgaatatcatggttgaatttgatgctcgcgaagagcaaggaatttttaaaggcacatggggcgaagactacaaggaagacatactcaaaataaacgaatacttcagcactagaaaagtgtttgtttatggaacactcatgaatggagaaagcaaccatcacttccttgaaaacagcatatgccttggaaaagctgccattgaaggatatgacatgtataatgtaggaggatggtatcctgcaattatacctggaaattcaagaatcattggggaactttacgaagttcctgaaaatgacatggcttcaatagacatgcttgaaggagaaggaagcctttacattagaaaatgcgaaattacaactggcaatgaattggcttacatctatgaatacgctcaagacactgaaggacttgaaaaaatagattcatggaaggattacgtctggtatgtatcctatggaagcaacatgctagaagaaagattcctttactacatcgaaggaggatgctttgaaggcagtgcctcctatagatacccttgcgaagatcctacaagacctcttgaaaaaagagccatagacatcccatacgacatgtactttggaaattattctgggtcatggcatggaggaggagtgtcctttttggataccgagaaagaaggccatgcattgggaactgcatatcttataacaagagagcaatttgagcatgttgcagctgaagagaacggcggacgccccccaaatggaaatggctattggtatgaaaatatcattaatctaggggagatggatggctttgagatgcttacagtcaccaataaggatcttagggaatataataggccttctgatgaatatctggagaccttagaaagaggaattagggaaaactggcctgatatgtctgaagaggacatagatgactatcttaatagttgcattagggaatag

SEQ ID NO: 776 - DNA, 1059 bp, Methanobrevibacter ruminantium
  source 1..1059: mol_type = genomic DNA
atgaagcatagattaaatttagataataaagacccaaattatattttgttgaaagaaatatttaaaattatggattcaagagaatccaaaagaatattggtatcctatggatttaaaaacctaaacagaacaatatttgcttttaaaatcatttttataagcatgttctttgaaattgacattccattcatcctaaatgaactcaaatccaatagaagactctgcaaattccttaatatttctgaagttctgactgcagatcaagtttataaaatcttttcagaaataaactctgaaaaacttataaaatcattaaacagaatcttaaactcaaggaatatggttaaaaggagaggaaaaaagacttttattgttgatgcgaccccagtggacttagatattaatttccacagaaataaaaagactaaagaacatctggaaaaaattaatctcaaatggagttattcttcctctaaaggttattatattggatttaaagcgactgttgtgatggattacgattctatgaatcctgtttgcattttaatccattctggagctccaaatgatgcaggactttttgaagagattttagaaaaccttcaaaaaagacgaataatcagaaaaggagacacattaatctttgataaaggatattacaggtataaaaactaccaaatcggaatcagcaaatacaaaatcattcctttcatttttccaaaagaaaaattcagcagaacccgattggatgacattttaacttatccactagccgtatttaacaaaacaaagagaataatgaaagaaaaaagattatacaacagtttaaaaatggaattaatgaaaaaaatagattcatgggaaaaatttaaaccaataaggggcaaaatagaagattttttcaaattattaaaacaaggcttgaatatgagagaaatccacaaatatactctaaaatcagtagaaaaaaccgtttatctaaatgtatttttgggagcactgattatatcacaaggattttactcaaaaacgaccatacaacaattatctgaaaactaa

SEQ ID NO: 777 - DNA, 2427 bp, Methanobrevibacter ruminantium
  source 1..2427: mol_type = genomic DNA
atgaacaatgagacaaacgctttcactggaaacaatccagaattatacaataggctcaaatcaagcataaacaatgcagagagcattgatatcatagtttcttttctcatggaatctggagtgaaattgattatcaacgacttaaaggaagccatttccaaaggagtggaaatacgcatcctaactggaaactatctaaacatcacacaacctcaggcactttatttattgcgcaaggaattgggatataatttagacttgcgcttttacaatgttgcaaataaaagctttcaccctaaagcatatatatttcacaatgaatcagacagtgaaatctatataggctcatccaatctatccaagggggcattgaccgactcaatcgaatggaactatcattttaaaaggtcaaaaaacctagaagacttcgattccttttaccaaaacttcgaagatcttttttataatcaatcaaccattgttgatgacgaggctttaagggattattccaagaaatggaccaagcctagattcccagtcaaagaggctgaaagcatagaagaatatacacaaacccctagcgaaaccctatttgaacctagaggccctcaaatagaggcattatatgctctggagagaagccgtgaagagggctttgacaaggctttggtagtggctgcaacaggtattggaaagacataccttgctgcattcgattcaataaaatataaaaaagtcttattcatagcacacagagaggaaataataaaacaagcagcaaaaagctttaaaaatgtttttccaaccaaaacaattggattcttttataaccagcataagcaaacagacaaagacatgatattctccctggtccagacattgggaaagagcagctatctgaacgacagctatttcaagagagatgaattcgactacatcgtcgttgacgagttccatcatgcagttgcaaacaattataaaaagatattggactatttcaagcctaaattcctattgggacttactgcaacccctgaaagattggacaacagggatgtatttgcattatgcgactataacaacgtctatgaaataagacttaaggaagcgataaacaagggatggcttgttccattcagatattatggaatctatgacgatacaatcgactattccacagtcaacatgagaaacggcaggtatgatgaaaaagatttagaggaaaagctgatgataaaccgccgtgccaatcttgtctatcaccatttcctgaagtacacctctaaatcagcaataggattctgcgcctcaagaaaccatgcagaatatatggcaagctatttcaacgagcatggaatagctgcagcatctgtctatagcggcgagcagggagagcactcccaaaaccgccaaaaggccatagatgatttaagagatggcaaactcagaatcatattcactgtagacatattcaatgaaggtcttgatctcccctccatagatgaggttctcttcctaaggcctacacagtcacctacaatattccttcagcaattgggaaggggacttagaaaggacaagggcaaaaagtacctcactgtccttgactttataggaaactataaaaaggcgaatatggctccattcctattgagcggaaaagactatgattcaagaacccttctaagggaagctgtccttgactttgaatatcctgaggactgtttcatagactttgatttccaattggtggatctctttaagtatcaagcaaagagtgaacttaaggccaaggatagggtagtcattgaattcaattctgtaaagacagaattggaccatcgtccaagcagagtggaactctttttgcatatggatgatgcaataataggagcaatgaaaagaactccaaagattaatctcttcaaggattacatgagctttctaaatgacaacaaagaactaatggacgaagaggaagagtttctaaacagccctgcacatgagttcttaaaggccattgaaaacacaaatatgaccaagtcatataagatgccaatattaagggcattctataacaatggaagcataaagatggccatttcagatgatgatgtctatcttgccatgaaggagttttatgactacggttcaaatggagtggacatgcttaaggataaaagctcaagagactataagtcatggtcaaagaaagactatgtaaatcttgcaaagagaaacccaattaagttcctcaagaaaacccatggagacttcttcatagacaaggaaggattcgctttggcattggcagacaatctagaacaattcataaatctcgacagctttaaaagacactttgaagacattattgaatacagaacccttagctattataaggatagatttgagaaaaaacaagtataa

SEQ ID NO: 778 - DNA, 579 bp, Methanobrevibacter ruminantium
  source 1..579: mol_type = genomic DNA
atgagtgaaaattattatgattccaatgcagatgactttttcaatggaactgtaaatgtggacatgagcccccaatatgaggactttctaaatgaaatacctaaaaacggccatatcttagatgcaggatgcggttcaggaagggacaccttggctttcaagtcattaggatacaaggtaacctcatttgacggctcaattgaaatgtgcaggcttgcaagcaatcataccggccaagaggtcctccatcttcagtttcaagaaatagatttcaaagagacctttgatggaatctgggcatcagcatcccttcttcatataccaacaagtgaaatagatgatgttttaaaaagattaaaaaagagcctaaagaaaggaggagctttctatgcctccttcaagtatggaagctttgaaggagagcgcaatggaaggtatttttatgacttaacagacataactgcaaaggaactcttcacaaaaaacggatttaatataaagaagatctggtttacccaagatgcaagaaaagaaagagaagatgaaaagtgggtaaacatattggcaatcaaggattaa

SEQ ID NO: 779 - DNA, 630 bp, Methanobrevibacter ruminantium
  source 1..630: mol_type = genomic DNA
atgatatgcccaaattgtaacaaattttataatgataattttgctttctgcccacattgcggtgcagaaaaaccagaacctttaacttgtcctaaatgtggatttaaatctaatgaatttaaattttgccctaagtgtggcgctgaacttaaaaaatctgctattaaaaaaccaaccaaaacctgttcaaactgtggacatgagaatgcaattaaccggaaatattgtgaaagatgtggaactgatttcccaagagaagaaaacagaagatttgaaacaaaaatagaacaacccaaaagaatacttttagattatgtgaataaattccaaatagaagaaaatattaaaaaagaaattataaatgatataaacaatgaaaaaatcactaccaaaactgaaataactataagagtaagacaagctcaaaaagaaaaaaaagagcaagacaaaataagaaaagaaaaagaagaaaaagaaagaatgttagaaaacgaatattatagaaactccgaaacaaatactcaatatcatacatatgatgataaacctgacgttttttacggaggaaatgaatatcgtgaaatagaagaaaatacattaggagaatacaattactatcgagaatattga

SEQ ID NO: 780 - DNA, 540 bp, Methanobrevibacter ruminantium
  source 1..540: mol_type = genomic DNA
atgactgaatacaccatatgtcctgcatgcaaaagaaaaaacagcataaaagaaaaatattgtttagactgtggacagaaactaatagaagaaaaggaaaatgaaataatcagagatgataaactcgaaattccaaaggataagatcatccttttggatttgaactatactctcatttctaattcctggaaaataagacatgaggaattgcctcaaaagattcttaaacgccaatatgaagatgaattggtggaaaaaattaaggacaattatgttattttaatcacagcaagtccttataagacctcttttgattcattgaagcatattgaagagaatactgacttgaaaatctctgaatcctattggaattttggcaaacgtcctcctgagctaaaggaatactggcttaagaaagcagttttgccaagtcatggagatgattcaagcaaatatcttgcactcgaatccaacaaggatacaagagaaatgtatgcaaggtttggaatagaggcaagaccgaaaagtgattttatataa

SEQ ID NO: 781 - DNA, 837 bp, Methanobrevibacter ruminantium
  source 1..837: mol_type = genomic DNA
atggaatattatctccagcagttaacaaacaatcacttggaatacttatttgaattaaaatttgttacatcagaattcgaacttccaggattggctgatgatattgactgcaaaaaactagaggaatgtggtaaaaaatcagaatccttaaggattgatggtttaggatttgataataaaacaaactcatttgttattatagaatataaaaatcagtatgataaatgtgttatagatcaagctaaatgttattataaaaatctactagacaaaaaagaagcatatatcgaaaaatattatgaaaaatttggtaaagataaagaagttgaatttgactttgataagacaagagcaataataattggccctgaattttcagagcaacaaaaaaacagaaaagatcctgattttgattttgaactttacacagtatctttatgcaaatacaataataagatttatcgagctttatacaaaaaggttgattcaaattttaaaagagaattatatttcagctcagaggatttgaaaataactagatgttcactgttagagaataaatcagataaagtgaagaaattatataaggattttgaaaatatattatttgaacgatttgatgatgatttcattttagatataaggtatattgttgatggagtttccattacagcagaaaaatcttctatatgtcttttacgggttaataaaaagtcaattaagatacatttttatactgatgaacttgaagatgaaacattaaatcatgaaaatatatgtgatgtgattgataatattaatacaatttataatcaaaaaaggagaaataaaaaatga

SEQ ID NO: 782 - DNA, 561 bp, Methanobrevibacter ruminantium
  source 1..561: mol_type = genomic DNA
atggaaaatcctgtagatattactgccattgacggaatcaagagaatctcaaagtcatatgacattgatacatcagaatactatgatgatggattatatatctcatggataagccttataaagtccaaaaacgatactgtatgtccagactgcggaagcaaactgatgccgcttacattatgtcctagcgaagaaatgatggaactggatgaaatgggctttgatctggagaatcataattattactgcaggaattgcgattatgaactctatatcgatgttttgaatatagactgcgaaaatcatccgatagaatgtgcttatctatattataaacttgatgaaattacaaaatatattaggcataatgaatatagtgatgaattgaagtcaaagatggattactttgatgatgaggagttcaatgcattcatcagtaagctgaaggaagttgattacatctatgaagatgaagaagggtatgtgaaacttgtggatgatgtggaaaaccattggtttaggcattacataaaatataagaggctttgcagagagctttga

SEQ ID NO: 783 - DNA, 120 bp, Methanobrevibacter ruminantium
  source 1..120: mol_type = genomic DNA
atgtcaattgataaattacttttagaaatatacgaattaatcgaatctgaggattatgaaaaatccttagagctgtgcaatcagattttagaatttgatgaaaacaataaagatgcttaa

SEQ ID NO: 784 - DNA, 1500 bp, Methanobrevibacter ruminantium
  source 1..1500: mol_type = genomic DNA
atgagaatgacaccaagttctcatagcagcttgaaaaaagctttttttaaaaaaaatacatacggaggcatcaccatgaataaaataaaacttactagacaagacgaacctgattttgacgaactttacagaatgattggagaacttaaagacttcctaaaagaggatatgggctctcgaaactggatgaagaatctagagactattcttgatttccaggacaccgatggcagcttcaagctatttacaagctacgaaataccatctgatgcaagagtggacttctgccatatgccaacatacatatgcacagccattctaatgaaatcatatctgattggagattctaaattatctaaaaaaatagataggcctctcagaagaggattgaaggcctgctgcatgagaaatcttatggggcatggatatgaagcacttgaaggccagattgaagcattgaatatctttatgaaagcggggcttcgtgaattcattgatctttatcctgacatgagtagaaaattctccaaaatgattagcaatatttgcggatccaattttgaaatgcttgaaagcttgaggaacgctttacttggcccatggggagaggactataaggaagacatccttaagataaacaaatacttcaatacaagaagagtatttgtatacggaaccctcatgaatggagaatcaaaccatcatttccttgaaaacagcaattgccttggggcaagcactgtagaaggctaccagatgtataatgtgggatggtatcctgcaattgtacctggagatgggatgatcattggagagctatacgaagttcctcaagaggacatggctagaatagacatgcttgaaggggaaggaagcctttacattcgcaaatgcgaaatgacttcttctaaatccttggcttatatctatgaatttctggaggatactgaagggcttgatagaataagttcctggaaggattacatctggtatgtgtcctatggaagcaatatgctttatgacagattcatttgctatatagaaggaggatcctatgaaggaagttcctcttatagaatgccttgcgaagacacttcagcccctgttgaagtgagagcagtagagattccacatgacatgtactttggaaattattctgggtcatggcatggaggaggagtgtcctttttggataccgagaaagatggccatgcgttgggaactgcctatcttataacaagagagcaatttgagcatgttgcagctgaagagaatggcggacgctacccagatggaacaggcaattggtatgaggatatcataagccttggagatatggatggctttgagatgcttacagtcaccaataagaagcctagggaacaaaatgagccttctgaggaatatctggagaccttaaaaagaggaattagggaaaactggcctgatatgtctgaagaggacataggtaggtatcttaatagttgcattagggaatag

SEQ ID NO: 785 - DNA, 843 bp, Methanobrevibacter ruminantium
  source 1..843: mol_type = genomic DNA
atggttaattatggtgatgatagtttagagaatccggatgatattactctacctttttttgcatatgggatatttaaacctggagaaatagcatactctaacattaaaaagtatattggcaagaaaaatgaaaaaactattaactatgctatgaaacaaagggacggagttccaatattacttcctgaagagaataatggaaaaacccatggttatatattcaaatttaatgataatgaaagagcttatgatacaataaaccataacctatcaaataaattatatgaatggggcacaattgaacaaggaaagattaatgttttatttggaaaagaccctgatattggaagtgatgatattgggccggactttgatcgagagaactataaagggaaagatgacccattttttaaagaagcgcttgcaataaaacaatatgtcgaatcaaatgatttcacttcaaaagatgatttttatgatttacagaggtattacatattattgtggtctgcaattgaaagatgctgtaaattaaaatacaataaagagagtgatggtaaaaatcgtgaggaattttcaaaagaaaaggaatttatagatgcattagacaaatgtgatgaaacaaattatagggaaatctataaaacagatgatttgactcctagaaaatttgacacagatgaaccaaaatggtgtataaattattattatactcttagatgcaatattgtacatagaggcaaatcaaatgttaatagagatatgggattgcttttacaagcaaccaaggatttattaaatatatttgaacacatacttgatgaaacatttaaagaagaataa

SEQ ID NO: 786 - DNA, 414 bp, Methanobrevibacter ruminantium
  source 1..414: mol_type = genomic DNA
atgaaaaaaataattcttggaacatgtatcttattcttgttgattagtgtcgcatatgcaggaactgtcgatatattcacagccccttccccattgcaaccattaggcaatagtggtttcggagatggacaaggccataatattcaaatttttgagtttactgaaaacctttacaaaacctggtttgaaaatgataccgactatgttgtagaaaagtatgaaggaaacaatggtctttatttatatgccgatgatgaaaatgactgcggtattttagagattgttgaaaaggatggcaaaaaatatatcgtaaattcctggactcctaaaggtcctagcgaagctcaaacagttgtggaaaacttacatgactttaatgagttaaaccatctgactccaataacaacattataa

SEQ ID NO: 787 - DNA, 954 bp, Methanobrevibacter ruminantium
  source 1..954: mol_type = genomic DNA
atgaatattgattatgacggccacaacagtaccaatccaaacaataattctatagttgaaaacaacaataataatcaactatctcttcaagttcctcaaaaatatgaggattatgacataatagaagaattacaatgctttaattgcaatcaacatacttttatccaattaaataaaaaatctcttttgtcaaataaggtggtttactactgcactaattgtggaatgtcctttgaaaagcaaggcaatggattcaaattagtggacatatccgataaaagcaatcgcatgtgggagttatataacttaaaaaccttaacttggcctgaatgggaaagaatagcaaatggaggattatctgataaggatcaagctgaaaaggataagcagctagccatagaaaaacaaaaggaattggaattgcaacgcaaaaaagatttggaaattgtagtccaggaattggctaaaggagaagttaatttaaagccagtaagctctccagttattttgaaaaagaatgaaactgcttatcttagtttaccaaacattacattaagcgagcctcgtgccgttagagtgtctaaaagtgggggttatggaacttcatataggtttgctaaaggattcagtgttcattctggtgttggggaaagcagaagcgtttctcatgatgaaattatggcaatagataccggaacatttgtcataacaaacaaaagagtaatatttgtaggcaataagaaatctgtaaatatagatttaaagaagatattgtccatgactgtatataaggatggcatttccattcaaagggaaaataagcagaaaatagaatatttcacaaaaacaaatcgtcattccatggactttactattgatggtaggacacattctttgcctttggaaggttattttataaaagcaataatattaggtcagattgctaatttataa

SEQ ID NO: 788 - DNA, 849 bp, Methanobrevibacter ruminantium
  source 1..849: mol_type = genomic DNA
atgagaaaggaacgtattaaatcctatttgggaattatatttgatcttttggtaattttagacttgattctaatatttatctctttgcctatacaaggccttcacttgattgactatgcaggttttgtaagggcttttgacttaacaatctgttttctcctattaatcgaattcttttatggattatataaatcagatgctaaagccaaatatttcaaagaacatttcctagatttaatcgcttcaataccattcgatttaatcgtatttgccttattcggttcaagttccattatacttaatttggctcgtttcttacgtttggtcagagtcgtcagagtgtttagggctgtaaatatagttaaaaaatatggtttggaaaaggttattaggcgtactcatgcagataagatatttattgtcatagctgttatagttgtcatattcactattctcttaactctttccggtcatgaaaacatatccgacagtttttattttgttgtgatcaccttaaccactgtaggctatggcaatgaaggttttaatgagcctttagcgaaatttgtgacattatttttaattattgtcggtgtattggtcttcagtactatcactggtgtaacctcatccttctttatagataagatgctggaagagggcatcagtgtggatgagaacttacatttcataaatcaaaagttaaacttccatgaaagggaaatggaaaaaacaagaaaagaattggctgaaattaaaaaggaattggaaaagtctaatgagaattcagaagaattaaagcaagaaatatctgaattaaaagagttaattaaagaaaataataagtaa

SEQ ID NO: 789 - DNA, 1044 bp, Methanobrevibacter ruminantium
  source 1..1044: mol_type = genomic DNA
atgttttgtcataactgcggaagtgaaataagtgatgatgctaatttctgcgtaaattgtggagctaagctaatacgacttgatgaagaaaaagctcagccttccaaatcttccagtagaggcttatccaacaagaaaacagacgaacaaaaggaaacatcctccggcagaggattattcaacaagaaaacagacgaacaaaaggaaacatcctccggcagaggattattcaacaagaaaacaaaggaacaaaaggaagccataaaggaaatcaagtcttacactaagggtaattataagagattcaggcagatcattccaagatatggcatattagcaatggaagtttcacatactaaggttttcaatggaataatcaaaacaatcagaaaagaaattgaaaacgagaatctgactgccgatcagattgaaggaagagtctttcagcttctaactgaagagtatggagagcctatgagtcaggaagaagctgatgaattgttcaatcaacaaaatctccaaacaaaacttgaaaatgaaagaaagttggaacaaaagttcggcgttccatttcaaaatagggtatggttcaaatgcactgttgaagagatgaggcattccactttcaccaacactaatgacagagacattgttgacggatatgtctttgttgaagacacttttttggagatagttaaggaatcagttttcttaaagtcaaaaatggggactagaaaaatattctatgacaacattgcaagcatagaccatgatgccaaaggcaggcttaacttaagcagcagtctagaaatctatttaaagtcatctgacagagttcagctaaagcatgtgaacaaagggatggtagaccttgtcaccggcaagtataatgagtatatggagaataagattaatgacaatgctgaaaacgtcaccaatggcaccaatagcaatgttgatgaactgatgaaatatgcggatttatatgaaagaggcttgttgacccaagaagagtttgaacagaagaagaaagagttattatag

SEQ ID NO: 790 - DNA, 678 bp, Methanobrevibacter ruminantium
  source 1..678: mol_type = genomic DNA
atgaaaattaatttaaaaagagttattttgggaattattttgattttgatttgcatttcctcagcaagtatcatttcagcatatagtattgattctatggaaattcaaggaggatgcatttcaacaggaagcggattggaagataagacttatgcaaccatttatgtgggggaagaatacactggagcagatgttcttatacagatttattattcccgtgacggttcacagttaaaccctggaaataaggttccaaaaactgttgattctttaggttgcattgaagttcctagtgcaaatgcatttaaatattatccagaccttgctgagattaatctatatgattctgatggatatctgattgattcaagggatgtatccttatcaatccatagcggagaacaaacttttggagacttttatggttctagttcatcatcaagttcctattcaagttcttcatcaagcggaagttctagttcttcaggtgatggaagtacaactacctatcatagcggaacctctaatagctatgttggaaacagtaacactggaaaattccatgctcccggctgtgatagcgttgataagatgaagccttcaaataaggtttatttctcaagtcgtgatgaggcaataagtaggggttattccccttgtgggcgttgtagcccttaa

SEQ ID NO: 791 - DNA, 732 bp, Methanobrevibacter ruminantium
  source 1..732: mol_type = genomic DNA
atgagattgaaaattatattaaaatctaaaaagaataggttgaagattccttttaattataatcatattgtttctgctataatttataacaaaattgcggatataaaatatgcagaggaattgcattcttctaattcttataaatttttcactttttctcaattaaatattcataaatttaaaagaattcattcaggatttttatctcaaaacggcaaaatagattttttaatttcatcacccgatgattatctgataaaaagtttagttgaaggatttttaaatgatttgactattaatttcattggggaagatcttcttatagagaaagtagaacttctaccagttcccgattttgaagaagaaattaatgtaaaaacattatctcccataatatcaagaactaaaaaagaagtggatggtgaattgaaaatttgggatttggctcccggtgatcatttcttcaaaaatttagaaaatactcttatatacaaatatttggagtttaatggattagaatcaaatgataaaaatataaaaattttttcagaaatgagaaatgtgaaacgtaaacgaataattattgaaaaaggtgataaacaaacgtatcatagggcatatatgatggatttaattctaaaaggtgataaagaattgttaagatttgcttatgatgcgggtttaggtgaaaagtctggacttggttttggcatggttaaggtgattaattaa

SEQ ID NO: 792 - DNA, 2160 bp, Methanobrevibacter ruminantium
  source 1..2160: mol_type = genomic DNA
atgatatctgatttagttgatttcggtaaatggttagttgaaaataacgaagacggtattggatatatggttaaggaagatgattatcttctaaaaataacttataataatgaaattgatgattttgttatagatggtatatttgagaatgacaatgaaattgttttaggtttttatgaaaaatctatatttaatgatattttaccgactcctagaggatcatctgatcaaaatatcactattgcaaataatactaatttaatgggattttcaccttttttacttaatttagatagtgattttttagggcgaaaaattaaaccagagaattatgataatgaaagtgattattataaagtcggttctgagagatttttgaaaaaaaaggcagggggtaagtttaaattagaaaaaactcttgacaagtttactcgatcattagatgataataaaaataataaacaatttaataatgatataattactaaactatttgataatcccaatgagctttttttaaagaatattccttcacaatatgaagatatttttattcaggaattttttaacaatctttcaaaagaagaatatattaaaattataaataaattttataaattcttggatatgaataaaaacgacattttggatagggtcataaaatttaaattagaagaaaatgttagcagtagattttttatagtgggcgtttttggagactatagggatttaataaatgatttatgttttttatattgtaaattaattaaaaccagaaataaacatatagagaattatgatggggggatttgttctatcccaaattgtaataatcattcaataacctatccttctatccagttttatgctgccgataaaaaattttattttaattattcaaataatattgaaaattctagtttaagattatgtgatttatgtaatagatatatgctttttgcatttgaaaaacttaaagctaattttaaaggaaatatattagttatcccaaagacttatgacggagattatagtgaatttttagagattattcaggaggataatgattttgaagtaattaatgaattacttgaagagaattctaaaaaatttacttatgatttcttaatatatactccttcaaatgctcttttgaaaatagaaaaatatattgataattatcaagctttccttactaaatttgatgacatcaatctatataattatggaaatttaaattatttgtacaatgaagttctagttaatgatgaaagttccttagatgaagatagaattattattaagatttctaatctttttgattttcaaattatttttaaagaattattttatgaagttgatgatgggagattaaaatatcctaaaatgaattatttttatcaaatttataacaaggagttaactggagagaatggtatatttaatggttttagttcaaaaacagttaatatattttcaaaatataaagataatattttcagttttatttatgaagcgaattttgatgcattaaataaaaatatgattaatacaattgttttaaattcattaaccatttttcaaaaaaattctattaaaaaatctattagatttgaaattgttaaaagattaaattattggtttatgtttaaaaaagaatttttaggagatactatgttattaaatgaaaatgttttaaagttaagacaaatatttggacatcctaatattactactggtgaaaataataatgaaaaaattgaagtagtctttgacgatgttgagaaaaaacaagttttagatttaattaaagaggataatgccattaaatattatttgataggtcaattaattgcatatattgatgatttcaaatatagttctggcaaaaaaagagaggtttttactaattttattacaaatgctcataggaataatattaaaaaactttttgcaactgaaatattacaaaaaaatgttttttatattaatcaaatgaataaaaaaggaaaatttttatttactatgctagaatctgattatgggtctttatttaatgaggaagatttatcttatgaagattatattttgttgttatttactggatattacacaacaaaatttttgaaaaaaaattatgtatacaatggagatgaataa

SEQ ID NO: 793 - DNA, 960 bp, Methanobrevibacter ruminantium
  source 1..960: mol_type = genomic DNA
atgactgaaggaacacctgtaagaaactattaccaaggaatttacttaactgaaactataatgggcaatccaaatggggattttatagataattctccaagaaatgttgatggtgcggtatttactactgataagtgcattaaatataatgttaggaaatatattcatgatactttagaaaactttggtgaaaaagaaaatattgttttctttttcccacgtcttattgattcaacaaatgaagaagatatgaagtttaaaactagagatcaggttttcgaacattttaaaaattttgaagaaattttaaaagtatctcctgatgtaagaatgtttggtggaacatttagtgttgataataatgctaaacaaatctatgggcctatacaattaagttatggtttagatattaatggagcacaaatcatccgtcatcaaattggcgccccattcgctacaagtgaaggaagccaaaaaactgttggttctgaatcagttgttgatgatgcaattattgcttatgacattactatcaatccgaataattataaagatttattattagaggatgatttagaactatttaaaaaagcattatgggaaggcactaatttaagaaaaacaactagtaaaaagacagattccaaattattaattttaattaaatttaaaaatgattctgaaaatgataaagttgatgcaataaatatgggagaattgaaacagttaatttccataaaaggcggcaaatctaaaaaaatggatgaaaatactatttgtttggattgtgaaaatctagttaaaaaaattaaaaagtatgaaaagtacattgaatgtattgatatttattgtgattctgatgatgttgaattgaattcattagaaattgatggagaaaatttaaaagacactaatattaaagtcaacatctatgaacctttatcattactttctgattaa

SEQ ID NO: 794 - DNA, 864 bp, Methanobrevibacter ruminantium
  source 1..864: mol_type = genomic DNA
atgaaaattattgaagttgatatttggagtagttttggttgttttagcaaacatttctccaacactggaggtgttttgactcatttaattcctccaaaaacatcaattattggtattattggagctattttaggttatgatgtaaatgattatgaagataatgatgatgggacaaaaacttataaaattgagtctttaaacaatataaaagtatctatttatccattatttgagtttaaaactaaaagagttatatttaatctggttagtgggactaatttagacttggatattaaaaatattaatcaagatgttttaatatccccaagatataaattatttatttcattcccttcagaattagatgaagttgaagaattatttttaaatagggtaaaaaataataaaactatttataatttatatatggggagaaatgaattccctttgaatttggagtttgtaagagaaattaatgctgaaaaacatatatttagcaatgacaattcagatgagttaaaatccattaaagtttatggctcattaaacagatcttccattaaatcattaaatttatcttatgaagataatgattctaaagttgattctgatgcactcagtttaataagttcacttttaatttctaattctgctgatggtgtgagacatttaaaaagttttcatgagtttactattaaagattatcctattaaaagagaaaattttacagatttttcttattctccagtatctttttacagttcaaagaaatttggagagtgttttttctctaatttgcaacttaaagatggtgaaattgaattagttaatattggtgatgataagtggttatctctcatttaa

SEQ ID NO: 795 - DNA, 2826 bp, Methanobrevibacter ruminantium
  source 1..2826: mol_type = genomic DNA
gtggttatctctcatttaaattttaatgaaaatgagtctgtaattgagattaatagcgattattttaaagtatatgctcataaaaatgaattatttaatgagcatatctctaaaactttaaacatttttaaaacaattaaatcagagaatattttaatcaatttctatgattggtttaaagatcaggggtatattcatttaacttttgaggagtttaattttttaattgaggaatgtgtcagatttcatgatgtggggaagttatcatttaattttcagttaaaaagattaaataaaaacaaccctgctaaaaagaaggaacaaattaatgttttaaaaaaatttggattagattctattttgaatcaatttgaaggaaatcactccttgtctggtgcattatcttttttatcaaaatattatgatgttttaccaaaaaatgaattattttttcttattttagcttatgttattataggacaccatacaaatttaaaagacattgtaagtcaggatgattttttttataaggaatttgaagaaaatcaagctcttagcactactttaaaattttttgcattgttttttggtttaaatcaatccacaattaatcagaagttttttcaagaaattaatgatataggatttgattttttagagaatactataaatcattatgattcttccttttcatttttttattcatacatttattctttattaattagtgcagattcactagccactagtgaatataaaaactctacagaccaaattgattattcaaaatttaatcatagaatatcagataagttatttgcccatatgtataaatcattttataatgttaaacataatagaaatcttttaaatgagacatttaatttaaatgatatatgcccggaggatattaatgttttaaggaaagcgatgcttttagaatcatcagaaactttaaataatgctttaatggatgatgataaaaaaatatttttcttaaatatgcctactggaggaggcaaaacaaatacttctatgaaattagctttagatatggtaaaaaatactgatgctaatcgtattatttatgcaatgccttttattaacattattgagcaaaattttgatgtaatttgtaaatcctttggtttaaatgaagaagaggggaatatacgtcaaatatattccgcatctgagactatttttaataaaagtgatgaagagacattagaaataattttatctgatgatttttttaattatccggttatttgcactacttttgttagtttatttaatcctataataaaaaataataaaaaatataaatatcgtttaaatgcgttatctaattcagtaattattcttgatgaaattcaatctttacctttgaggaattgggtgagtttatattttatcattaatgagttatctgaaaaatataatatttattttttaattatgagtgcaactttacctagttttgataagttaaaattagaaaatattagggatgatgataattttttaaactataataatgtttcattaattaacaatcctgaaaagtattttaatcatgatttgttctcaagaactaatattaatggaggaattaaaaaacttggaataaatgatgattgtagtatagattactttttagaaattattagagaaaattttagtcaagattataataaaggacttatcgtcttgaatacaattaaatcatctagattgatttatgataaattaaaagacttttctcaggaatataattttgatattgacttattaaattcaagtattttgcctaataggcgaaaaaatattattcataaaatcaatcaggaagatttatcaaattatattttaattagtacccaaagtattgaagctggagtggatgtaagttttgattttgtaattagggatttttcgattttagattcaatagaacaagttcgaggtagatgcaataggagtagggaattaaatgataagtttcatgattctaatattaaaggtaatgtttatttaattaatttggaggatgataatagtaatctttataaatatatttataaagatgtggaacttaaaacaagaattaaagaaacaattaatctttttaatgaaggttttgagttaaatgatgatttaaattatcaatatagtaacatattaacttattatgataatgtttctttagatataaatgatgtgcatgattctatggatcaatcattcttgcgtaatgatagaagaaatatcgtgttttggaataaaatgaagtattctaaaattcaaaaaaagaaaggcattcatattatattaaatgatttaaagcaatattctatatttattccattagatattaaaatttatgatgattctttaaatttggataaaacaatagaggatatggatttgaatgagttaagagagatttatgacgaatttgggaaacattttattttttcattgaatgagattttatttatgaaagaaaatagtgattttttaatagaaggagattatgttataggggaggaggtattaaaccattttcaaactatggttgctagagtaaaagatgattataatcaaaaattattagttgaaaaggtattttcatctattttaagcaattttattatgaatatttcttttaataattccgatcttgaggaacaaattaaagaattagataaagaaagttatttctatattttagagaagaatatgattggtgattctgaggagcatttctattctgaagaatatggttttaattttaaacctactataacaaatatattatga

SEQ ID NO: 796 - DNA, 507 bp, Methanobrevibacter ruminantium
  source 1..507: mol_type = genomic DNA
atgagtgactatatgaaatcaatcaatggaacccaaataaactactatttcatatgtaaaaccaagctttggctattttcacacaatatccaaatggaacaggaatcagataatgtttctttaggtaaacaactccatgaaacatcatataaaaaagaaaaagagtttttaatagacaatctaataaatgtagactttattaaaaacaaagacccaattgaaattcatgaggttaaaaagacccaatctatggaaatatctcatgaatatcaattactatattatatgtactatctaaagaaagaaaaagacatcagcaatacagtgggctatttaaattatcagaacatcagaaaacaaattgaaatagaacttactgaagaaaaagaagaagaactggaaacagttcttaatgatattaaaagtattgtcgattcagatgttccaagtcctaaaaagtcacgaatttgtcgaaaatgtgcttattttgaattttgttttgcttaa

SEQ ID NO: 797 - DNA, 969 bp, Methanobrevibacter ruminantium
  source 1..969: mol_type = genomic DNA
atgtctaaaaagaattattacttattatcagaaggtattctaaaaagaaaagaaaacaccatatactttgtaaatgaaaaaggttcaaaaccacttccaataaacaagatatactctatgtatgcctatggccaaataactatttcttcacaagtgattagtctgtttgcaaaagaaggaattccaatccatttctttaactattatggctactacaatggcagcttttatccaagagaatcactgttatcaggcgatttattaatcaagcaagcagagcacaatattgatttttcaaaaagattaaaattagccaagctttttgttgaaggtgcggctaaaaacatcttaaaagtgcttgcatattataaaattgaaaacaatattaaaaacaccttaacagaattgaatgaatcttcaaaaattacagaagttatgaatgtagaaggtcgaatccgtgcagagtattatcagtattttgatgacatacttccagatgagtttaaaatggaaggtagatcaagacagccccctacaaatatgataaattcgttaattagctttggaaattctatgatgtatgctagcgtaattactgagctgtacaatactcaattaaaccctactatctcttatcttcatgagcccgctgagagaagattttcactcgctcttgatttaagtgaaatatttaagccaattattgtagatagagttattttttatttagtcaataagaaaatgataactgaaaaggactttaatcaagatcttaactgctgtcttttaaatgataagggaagagccacttttgttaaggaatataataaaagacttgagactaccatcaaacataaagatttaggcagaaaagtttcttatcaaaggttaatcagactagaagcttataaacttaaaaaacatgtttttggtatgaaagagtatgatccatttgttatttggtggtaa

SEQ ID NO: 798 - DNA, 267 bp, Methanobrevibacter ruminantium
  source 1..267: mol_type = genomic DNA
atgtatgttataatagtttatgacattaaagtagaaagagtaaataaggtaaaaagtttccttagacaacatcttttttggatacaaaattcagtatttgaaggagaattgacaaatagtgaatataaagcagtaactgatggtttattgaatattattgaagaagatgaagattctgttattatttatcaattaatgatggaagaatctttaacaagaaatgttttaggggttgaaaaggcatcagtggatgatgttattttgtaa

SEQ ID NO: 799 - DNA, 702 bp, Methanobrevibacter ruminantium
  source 1..702: mol_type = genomic DNA
atggacgaatggaaagtaggagacccttctgattggggagaccatgttggagtgccagacattccctatatgggatacataaatgatgatggatatgaagaggactattccacattccctgaggaaaatggtggcagcaagcctaaaagcctgggctctccagaggaagatcatggaaagatattgttagtaaaggcaaaggtatatctgaaatggggaaatcttgatggtgccatgagctgcataaatcaggcaatagacatattcaagaatagcagacggatcggttactatgagaattcattgcatgtaaaaggaatgatttatgaaaaaatggagcaatatgcaagagctctctttttttatcacaaggcatttaaagtcggagaatgcgtgagcaatgcttttgatgacagaaataaattgattgatggagacaagatagacatcttgaaagagcagttcaaggattatcgcactgcctatccctttggaagttctttaaagagggatgatttcataatctattgggatttggcatggcgcataaacgaggatagtagcgacactgaaaaattggaattggcattggaagtgattggttttgtcaaaagaatggcgccgagtattgaatttgtaggaagggaaaaggaactttatgaaaaccttgaaaaggagattctagagaagatcaataaataa

SEQ ID NO: 800 - DNA, 180 bp, Methanobrevibacter ruminantium
  source 1..180: mol_type = genomic DNA
atgggagaatgtccttattgtggtaaagatgtggactttacagaagtctgtcctcattgcggggctgatttaagtgaatttgatgaccgatgtcccttttgcggagtacttataagccgtgcagcattgatctgccctcgctgtgggtcagatgtatacgaattttggtatggtgattaa

SEQ ID NO: 801 - DNA, 480 bp, Methanobrevibacter ruminantium
  source 1..480: mol_type = genomic DNA
atggatagaaaggacatcataatcataatactcgttctcataatcatatcactattggcattgggccttcataatcatcaagtaactgaccaaggcactgacctatatcgcactgtaaaggtatctcctagcttttcgctggatgttccactctcaagcaaccttacaagggaaaacgtcagcgaaaacatgtatattgtaaacgactaccaaaacgacattcaaataatctcattcaatatgaagaatgcctctaagatggaccttatcgaggacggctaccaatatctcaagagagaggagtcatataagttcggtgcagaggagatcattaagatatccaatcataccgtatggcacaataaggatgatggcagctatattgcattcttttcacctaacaatacagaggacaatataatgcttgtaactcatgacaatatcactatggctcgcatattatctagcgcaaggtattga

SEQ ID NO: 802 - DNA, 1206 bp, Methanobrevibacter ruminantium
  source 1..1206: mol_type = genomic DNA
atgacatctgagattatgattttaacaccaactgcagtggttttagcggcggacagtgcagttacaataagcgatataaaaacttatgatggagcaaataaattattttaccttagcaataaacctccaatgggagcattaatatataatcttgcagattttgtagatattccaatagaaacaatcattaaggaatttagaagaaagattgatggaaaagaggatttaagccttatagaaataaaagatgaattcgaaaaatatttgcatcagataatttccaaatcaaggtctactttaagtttccaagagcaattggattattttatagaatttattcaagaagaattgtcttatgtagattttgatgaatttaaaattggtttaaaagatgaactttctgattttgatattggtcttttaggcgattttaaagatgaggttcaatcacagattgatttgtatgaagataaatttagtttagcacttccagatgattgcaatggtttggatgaagaagattttatatcggatttaaaaaaattgtttatctgtaatatgtttttaatgccttttattggcatagcaatatctggctttgagaaagatgaaatgtttccttcatttattcattttaagataaattatttgtatgatgaagaatttcttttaagggatgttgaatttggatcaataggggatgaggaagttatattaaaggcattagctcaagatgatgtaataaatacctttttaaattctattgattcaaaaaccgaaagggcattggaagatttttttatagagtttaaaaattttttatttaattatattgaatattgtattaaatctaatgaggatattagtgaggagaatgaaaatttcttattagaaaacatatctgatatggaattttctgatgaaaaagttagaaatatttttattggttttatagaatgtttgaaagcaaaacagaagaaaccaattttagactcaatttctgttttgccaaaaggagaattaagtaatttggcggattctttaataggtatcacttctttaagaaggaaaattgaagatgaagtagagacagttggaggacctatagatgttgctattattactaagggtgatggctttgtttggattaaatgtcatgatagttttgataaggacttaaaccctcagttttttgatagtaattga

SEQ ID NO: 803 - DNA, 177 bp, Methanobrevibacter ruminantium
  source 1..177: mol_type = genomic DNA
atgcattatttagaaaaatataaattaaaatcttttagaaggaaacctaaagtttttagaagaaaatacaatcccttccctgaaggatttgtagagaattttgttagaaaaagctttggagaaattttggattcaaaaatggataattcaaatcaactttcaaaagaagataaatga

SEQ ID NO: 804 - DNA, 333 bp, Methanobrevibacter ruminantium
  source 1..333: mol_type = genomic DNA
atgaatttatataaggatatattctatctggcaggctttatttgccatcagaagccagagagatcatttcacatatcccactgccaattgccattctgtgcaagatgctgtggaatcatcatatctgtcatcgcttcatttatcctcgctcagtttgtagcctttccaatgaatgccctggcttttcttctctttgtcccaatgattgtagatgggcttgtgcagaagtataccgattatgaaagcacaaatttcagaagattcataacaggcttcttatttggattcgcttatgtctatgtattttacatgtttggattgaacgctttatga

SEQ ID NO: 805 - DNA, 681 bp, Methanobrevibacter ruminantium
  source 1..681: mol_type = genomic DNA
atggaatatgaaattcaaggcggaaccttccctattgtagtctgcacattgcaagagggagaaacaatgaaaaacgaaactggcgctatggcatttatgacttctggaatgaaaatggacaccaatactggaggaggcctcctaaaaggtcttggaagagcattatctggagataccatcttcttaaactacttcactgcacaaagggacggcgagcaagtaggattctccgcatgcagtccaggcaggatcatgcctataagattggatggaaccaatacaatcataggccaaaagaatgcattcctcgctgcagaagacagcgttgacattgacatacactttagaaaaagccttggagcaggtctctttggaggagaaggtttcgtccttcaaaagttcagcggaacaggagttgcattccttgagattgacggagaaataatcaagaaggaattggctccaggtgaaaagctattgatagatccaggacatttggctgcaatggaagaaagcgttggatttgacatagaaagggtcaaaggagctaaaaacatcctattcggtgaaggactcttcttctcaagattaacaggtccaggtacagtatggctacagaccatgccaataagcagcttggctagagcattggttccatacttgccaaccactactgaatag

SEQ ID NO: 806 - DNA, 252 bp, Methanobrevibacter ruminantium
  source 1..252: mol_type = genomic DNA
atgagaagaattgatgagctgacaatagaaattgatcaaacaagccttgaacttgaacaaaccaaaaaagaactgagcatcctattcaaggagctgaggtcatttaaaaagaagattgaaaacggtatcgaaatcgacagaaaggaatatgaagactgtgtgttcaacaacaagctgcttcagatgaaaagaagacggctgattacacatctcaaattcctaaacaaggagttctatgaaatcctatattaa

SEQ ID NO: 807 - DNA, 861 bp, Methanobrevibacter ruminantium
  source 1..861: mol_type = genomic DNA
gtgaagatattgaaaacttggattgaaaaacttgatattattctatcaatactgattgtattggacatttcatttctaacagcttcatttttgttggatttgaacacaacctatatcaatttcatgcttttgttcgatacaacattatgttggatccttatagtctcattcatctttaagctgcttaattcggatgacagaaaggcatatatgagggaaaattatcttgattttttagcatcaatacctatggaccttgttttgctccctttcagttcattgcatatcagcttgataaacatagtgattctagtaaggttcctaaggctgttactgctatttaaggaatcctacaagtatgtcaagaagtttttcaaggcaacatcctttgataaagtcgtagcattattcatagttatcgtagtgggctcaacattcgcattggaatactttgatcctgcaatccctaacctatactacagcctatggttcgtatttcagacaataaccacagtaggcttcggtgatgtgattcctgaaagccctgtaggtcagctgattgcattgggccttttgatggttggggtactcatgttttcaatattcactgcaagctttgcatacctctttaacgaaaaggtattccgtgaggaaaatgaggatttccatgaaaagataaacacagtcagggaaaatcttgcagaaaacaaggaaagggtagaggaaatcaggcaaagcactttatccacaagcgaagagattgctgaagttaaggaaaagctaaacaaatccgaagaaaatattaaaaacctggaagagcgtatagattaccttatagatatgattgagaaaaaggaatag

SEQ ID NO: 808 - DNA, 579 bp, Methanobrevibacter ruminantium
  source 1..579: mol_type = genomic DNA
atggattttaattttcacagaattgcaaatgagattgcaaagataccagatgagaagataaaagacttgtcttgggaagatagagtaaaggagctcttaagctttagacaatactataatcaatatcatgaatcatatggcaaggattatttggactttttagaaaaagcgaataaggaaggggacttagagaaaaaggaggatctaatttacttctttaaaaaggagactctaacaaaggacataaatctggacggactgaactatctgtttgtaaacatattcttaaaatatggctttgaatatttggattataatgatacaataaacaatctaaaggacaaatatgatttgaattttaagcatgattggattagtctcctttcaaaggaggatttaagtctttttgagtcaataaatcttttgaattatattcagcgctctgattattgggactatgagcatatgccgttgtcatatgcaatattcgatggaacgattgataatattttaaagggcatggaaaacaatcttgatgaggacaatctagagcttttagatgttttattaaaaaaataa

SEQ ID NO: 809 - DNA, 1413 bp, Methanobrevibacter ruminantium
  source 1..1413: mol_type = genomic DNA
atggcagtttataaatgtagcgtttgcggatatgaatatgatgaagagaaagagggaaagcctttcagcgaattggaaagatgtcctgtttgcaagcaaccggcaagtgtttttgaaaaaattagtgataattcaaccgaatcagattctaattctaatgaaatatcatctaataatgaaacagccagtgaactgtcttatccaactgaaacttcaaggacagacagctctattgctcatatgtcagacatacataagatggctgtggaaggaacttccatcattgatgcgatgtccacaaggcttccaatgcctagctgggatgatattctaataatggcaaaccagcttaatccatttcctcttgaagagcatgcagatgtgagcacaactacagttatcggcaagaatgccttaaagccaatggttcttgaaagcccaatatacatctcccatatgtcctttggagcactctcctatgagacaaaggtggctcttgcaaagggttccgccatggcaaagactgcaatgtgcagcggagagggaggaatacttccagatgagatggcaaacagctataaatatatttttgaatatgttccaaaccattatagcctgactaaagagaatctgatgaactcagatgcaatagagataaagataggtcagggaacaaagcctggaatgggaggccatcttcctgccgagaagataactctagagatagcagagcttaggggaaagcctatgggggaagatgtgataagcccgtccctatatggggagataaaatcaaaggaagacttaaaagaccttgtaagtcatctaaggaaagaatcagaaggcagacctattggcgtaaagatagctgcaggaagaatcgaggaagacttggagttcatttcatatgcagagcctgatttcattacaatagacggaaggggaggcgctacaggtgcaagcccaaggcttataagggatgcgacatcagttccgaccatctatgcattggcaagggcaagaaagtatctagatgaaaataatctggatattgatttggtgataacaggaggccttagagtctccagcgactttgcaaaggccctatccttaggagcagatgcaatagcgattgcaacaggggcattgattgcagcaggatgtcagcaatatagaatctgcggaagcggcaattgtccagttggaatagcaacacaggatgaggcccttagaaaaagattggatatggataaggcttcaaagagagtatttaattatcttaatgtttcaaatgaggagttaaagacctttgcaagaatcacaggtcatgatgatgttcatgatctttctgtggacaatcttgcaaccttcaatagcgaaatatcagattacacagatattaggcatgtatga

SEQ ID NO: 810 - DNA, 3894 bp, Methanobrevibacter ruminantium
  source 1..3894: mol_type = genomic DNA
atgggctttaagagattaaaaagacttttttcatcagataatgataatgaaatggaaaagaatgaagaaaaaaataaatctggtgaagaaactttttatgaggaatctgatgaaaaggctttttatacagaatatgatgatagtggctttattttagataataattctgatgattcttttaacaatggttctgatgatgacttatctttgaatgatggtttaaaagaggatttaaatggttctgatgataatttatctttaaataatggttttgaagaggattcatttggttctgatgatgatttgaccttaaataaccaaccgtcctcaaatagaaacttcaattatttaaataatctaatacatagccaccaaaatgaaatcaatctggactcagacattgtctttgatagccaaatggacaacacctaccttgaaggaatcaatttggatatggataatcttacaattgacggcaatggacgtacaattgacgctcaaaagaaatcacgcatctttaatgttttaggagaaaacataagattcacaaacatcaccttcaaaaacgcctattctaacgaggatggaggggccataagcataggcaattattcatctgtctattttgaaaactgccacttcatatccaatgatgcaggagagaatgatggaggagccatatcaattggagaaaattccatctgcacaattaaagattctgttttcaagcaaaacaaggccgattccggaggagccatagtgaatgaggggactttaaagatcatgagttccaattttgaatataactcctctcaagtctttggaggggcaatctacactcatcattcaaaagtggaaattgcctattctgtctttaaaaacaatatctcctcttcaggagggggaatatatgtcctctttgattgtgacatgattatcgaagagtccctttttatagataatgcttcaatgtctgaagggggcgcaatggccaatgaatatggcggcaagattaggatacacgaatccctatttcgcaacaaccatagcttgattggcggcgcattatgcaataagggctccccagtggatgatggtaagaatttagtgagtgtatctgattccaagtttgaatataactcttcaatagagaataatgacacaatatatagcactggcgtattgaagcttgaaggcaataccttcaatgaaaatgaccgtattcttgcctcaaataatcctgaaatcattaactccaaatatgtggaagccactgaagacattattgacttggcaaaatcaatcgattattcgattgcaggggaatcaaatctctttgaattgctggattcagacattagaaatttcaattatcttgaaaatttaatccgatcttcaggtggagagattatattggattcagatatcatattaggtgatgatgaggattacactgatggaattcgactttcaaatgagaatttaagaatcgatggaaacggatattcgattgatgcaaaatcaaggtctagaatattctcaatttcacaatgcaatatcacttttgaaaacctaagatttaaaaacgcttattctgaaggcaatggcggagcaatctattctgtaaacagttttctcacctttaaatcttgctcttttgaaaataactccagcgataatggaggaggaatctcaactgaaaacagcacaaacgagtttaagacattgtcaacagaaaacaacagaaatgagttcaagacattgctttttgaagattgcagctttgaaaataactccagcaggagtggaggagccatttccactgagaacaatgatctaattcttaaaacttgcctctttgataggaacgaatctaacttaggtgcagccatcatctgccaaaacggcaaggtcagattggataactgcggattcaaggaaaacattgcaagcgacggagctgcaatttattattcttcacttccaataggcacttatataaatgacgattcagtcaattttttagagataaatgactccgtttttgaagcaaacagattaaccggcaccaatttgactgtaagcattatagactgtgactgttcaatcagtttcaactcactgtcctttaaggacaataagtttgattatggggatttaatcaatcaaaagtatttggaaaataaaaatagcataataaaatcctccaaattcataggaaacggtggaggaataaccgcttctaacttaaaagtcatatcttgtgaatttattgataatcgctccaatgcattctcatcacaggaatacttctatgatggatcatctgaaattgaggactgcacttttaaaaacaatcattgtgcaatctcaagccatgaatcaagcttgaagattaaagacgcaaggttctatggaaatgattcggcaataatgaataggggcaaagcgtatataaatgattcccgctttagagataactctatggcaatagagaactctgcaaattcatatatgtttgcctcaaatctgaatctcttggataatgcttccggagagtcccatgatatgataaatcaaggtcatttaagcgttatcgatagcgactttataaattgcaataagactttaaacctgatttgtcaagaggataacgaagatgcggttttggatattgaaggctgcagcttcaagacagattcaaaaaggccaatatccataaatggaggttcatctagcattctatattcccgctttgaattggaccagtcaaaaattgcaattttcaatgattcaaaattgaatattgatgcattgagcttcaaggattatgagggcaatgacttagagggaaaactgatatacaacaacgattatcttaaaagcaagacaagggatattctagataagattgactcaagcgaatcagcaattactaaatatgcctatgaaacacttccagcggattggaaaggctttgactatctgataaatctaataaaagaatcaaatggggaagtgaagttggattgcgatatccttattaatgacattgaggaagactattacggcggaggaatagagctctttgaagacggcttgacaatagacggccaaggacacacaatcgatgcagataatctctcaaggatattctatgttgtaggcaatgacatagtcttaaagaatatcaagttcataaatggatttgagccattggatcaattgttcaacagaggggccggagctatctatattgttcatggagcatccttaaaaatcgtcaattgtgaattttatcaaaacagttctaagtcatttgcaggtgtaatcgccaataagggggacttgactgtcattgattccatttttaggaataacttttcaaatagggcaggagcattccttgaatcaaggggagagtcccatttcatcggatgcaggtttgaaggaaacaatgcaaaaagcgctggaggagccatagcggtttcacaaaagggcaagacaattgttgaaaaatcatcctttaaggaaaatgagcttagcttgaaaggaagttcttcaggaggggccatttcaaattcaggagagttggatgtgattgatagtgaattcattaaaaataaaagcgcagcttcaggaggagccataaattcaagctctcatgctatcttaagtgttaggaaatcagtatttattgaaaatgcctcttttcttggaggtgcaatcaatgcagacagatatggtgatttgattgtgatggattcatgctttaaggcaaatgcggctgcttatagcagtggagccatttatgacagcactgatgagtctggagttcatggatgtgaatttttaactgaaagcgataaggtcaagtatgcattggaggattga

SEQ ID NO: 811 - DNA, 1527 bp, Methanobrevibacter ruminantium
  source 1..1527: mol_type = genomic DNA
atggaagaggaatatttaactgtaactaaactgaattaccacataaaaagattggttaactctgattcatcacttaaaaacgtttatgttcgtggtgaactctctaattttaaacgctatcccagcggacatttgtatttcactcttaaggaccaaaacagtgaaatcggcgggataatgtttaagggacctgcaagcagactaaagtttgagcctaaaaatggcatgaaagtgctcataaacggctatgtagatgtctatcctaagcaaggaaactataagatatatgctcaaaagcttacagaggatggaatcggcgatttatatatagcatatgaacagcttaagagaaagctatctgctttaggctggtttgatgatgaacataagcaggaaatacctaagtttccaaaaagggtaggtgttgttacagcttcaaccggagctgcaatcagagatatagtcataaccattaagcgaagatggccattatgcgaaatcattctatttccttcattggttcaagggaatatggctccaaaaaacattatcaagcagataatacttgcagacaatgagtttgatttggataccctgatcataggaagagggggaggaagcatagaggacctttgggccttcaatgacgagacccttgcaaaggtgatcttcttttcaaaaactccaataataagtgctgtaggccatgagatagattggacaatctctgattatgttgcagacttaagggcagccacaccaactgcagctgcagagcttgcagtgcctgacattaatgaaatagaatcaaacattaagaatctggatgataggctaaacaaggtgattgacaagcagttcaatgaaaataaggattcatttgaaaagctagtcaacagaaacctctttaaaaatcctgatttattatacaataagaagatcatgtatctggattctgcaaagtcccgtttggcagtatgttcaaagaacatgatttatgataataagattcgggtgtccaatgtaaaaagttctcttatatttaagaatccaaaaatgctctttgaatcaaagtcaaacaagtataatcaattgaaatataatttaaactccagcggaaaaatattaattggcaaaaaggaaagcaaattggataagtataggaattcatttgtcttcaagagcccaaacaggctgtttgaatccaaggcaaataggtattttaaggttaggactaaccttgaatacagttcaataaacctgctgagagataagaaagacaatctgaatgagattaaaaaatccaatccaattaagaatcctcaatccattttagagcctaatgaaatcagattggataagtatattgataagttggatgttttaaatccattgaacactttaaagagaggttatactgtatctagagttgatggaaaggttgtatccaaggcaaaggatgtaaaaaaggatgacattttggaagttgaatttgatgatggcaatgtaagcactaaagttttatga

SEQ ID NO: 812 - DNA, 252 bp, Methanobrevibacter ruminantium
  source 1..252: mol_type = genomic DNA
atggaaaatatagaatatgtggaaagcaatattgaaaatttaagttttgaagaaagtttagcagaattagaaagaattgtaaacagattggaaactggtgaagttcctttagatgatgcaattgatgaattcaataaggcaatgaagctagttaaaatatgtgatgaaaaattaaacagcgcagaagaagccattgcaaaaatagtaaatgaaaacaaggaagttgttgattttgaagtagaagaagaataa

SEQ ID NO: 813 - DNA, 735 bp, Methanobrevibacter ruminantium
  source 1..735: mol_type = genomic DNA
atggttaaatttgaaattaaaagtcatgacgggcctggaagatatggcaagcttgatggtatggaaagcccagttattttaaaggaatctgatttgaatatggctccagatgaatcatcagcctatgacattgaaagggaaatcgctgaatggagcgttaatgaaacattaaagcttgctcgggaatatgaagataaggatattgcagttattcatggaagcaaatatattgatttgagagtcaaatgcttgaaggaattggaagagatgggatattccggatttatcatagcaaatgcagatgaccttcttcttcatccaagagaccttgtggacttgattgtagagcttagaagaaatatgaaatcaagcagcatacttattttcccacatgctgaagcacagttcattcctcttcttgcttatatgggaattgatgcattctttgatgacattggagagtattacagctatttgaatgtattgatgagccctacaaagaactatgacttaaaggtctatgaattatatgatttaactagagaagagcttgaggaatataataagaatacaattgactttgttttaagggaagtcagagagcatatgaaaaatggaagccttaggaatcttgttgaagagagatccgctacaagtccgcagtatgcttctgctcttagaatacttgataaggagtatgctgattacttattagagtatagtcagttgtattag

SEQ ID NO: 814 - DNA, 447 bp, Methanobrevibacter ruminantium
  source 1..447: mol_type = genomic DNA
atggttgataaagatttagtggtgccacgatatttaaatcaattgatggatattgtaaaaagctatgaaatgtacattaggtctaacatcaaagatttagacattactatgggggaagtaccgattttactggctatttatgatgatgaaggtcttaatcagatagatcttgttaagaaattccatgtgactgaagctaatattagtaagactacaaaacatttattgcaaaaaggatttattattaaggaaatcgatagtgacaacaacactaaaaaattattatatgttacagaattcggtgaagagatctgtaaggaattgattgaattctatgaagtttggaagaatgaaattatttccgatgttccaaatgaaaatctatcaatcttttcacaggtattggatacttttacaaacaattcacagaaatattttgaaaaatag

SEQ ID NO: 815 - DNA, 1077 bp, Methanobrevibacter ruminantium
  source 1..1077: mol_type = genomic DNA
atgtctgtgttagatcgacttaaatccctaatcgatggggcaaaagaggatatcgatagtagtttaactaaagaagcagaatctattaaggaagctgctgattcaatgcagacatcttcagaagaggaaattgagaatatatctgattctgaaactaattctgatgaagaaacttcaaaagtagaagatgctgaagaggaggtaatcattcctattcatgcagaagaagctgaagatgctcctgaagaggaagctgaagaagttccagaagaagctgaagaagctcctgaggaagttgaagaagctcctgtagaagaagctgaagaagaaactgatgaagaagtttctgttgaagaaattaccgaagaggctcctgaagaagaagctattgaagaagttcctgaagaggaagtttctttagaaactgaagaaattattgaagagccttccgaagaagactcaactgaggacgaagagccttccgaagaagaagcttcagaagaaaacgaagagagcgataatatgactttattaaaagaaaatgatatatattcaatggatgatattgataaagaatttacccaaaaattcattgatgctggtattgaaactgtagaccactgtttccaatgtggtacttgtggtggaggatgtccttccggaagaagaactccttacagagtaagacaaatcgtaagaaaatgtttattaggactcagagaagaagtagtatccgatcctgcattatggatgtgtactacctgttacacttgtcaagaaagatgtcctagaagtgtcaaaattgtagatattattaaaatggcacgtaacgaagcagctaaagctggatatatggctgacgcacacaaagctactggttctttcgtaattaaattcggtcacggtgtaccaatcaacgacaaaaccaaagaattaagaaaagctattggacttgacgaattacctccaacagtacattcttacccagatgctttagaagaagtacaaaaaatctgtgcagcttgtgaatttgataaattaatcggcttcaacatggaaaccggtgaattagaatag

SEQ ID NO: 816 - DNA, 885 bp, Methanobrevibacter ruminantium
  source 1..885: mol_type = genomic DNA
atggagattgcatatttcttaggttgtattatgaacaaccgttatcctggtatcgaaaaagcaactagaattttattcgataaattagacattgaattaaaagacatggaaggagcttcctgttgtcctgctcctggtgtattcggatctttcgaccaaaccacctgggctactattgcagcacgtaaccttgctattgcagaagaaatgggcgcagacatcatgaccgaatgtaacggatgtttcggttccttacgtgaatgtgaccacttattaaaagaaaaccccgctaaaaaagatgaaattaacgctatcttagctgaaactactgacaaacaatacaaaggtgaaaccaaagtaagacactttgcagaaattttatacaacgacgtaggtcttgacaaactttctgaaatgttcaccaaagacttaggtattaatgtagctgtacactacggatgccacttcttaaaacctaccgctgaagtaggtattgaagaatccgctgaaaacccaaccatcttagatgaattagtagaaatcacaggtgctaaatctgtagactacaaaaacaagatgatgtgctgtggtgctggtggaggtttaagagctagagacattgacgtaaccttaagttacaccaaagaaaaactcgacgctatggctgaagctggtgtagacgctattgtagaagtttgcccattctgtcacttacaatttgacgtaggacaaactgaagtaaacgcaaaatacggaactgacttcgcattccctgtaatgcacttagctcaattatacggattagctatgggattaagtgctgaagaattaaccttcgacgcacaattaatcgacgcagctcctgtacttgaaaaattagcataa

SEQ ID NO: 817 - DNA, 270 bp, Methanobrevibacter ruminantium
  source 1..270: mol_type = genomic DNA
atgtttattgcaattttaggtggaatatttagattcaaagatcttccagaagaatatggttcttatgtacagtttaaagcagctattgaaggaagagatgaaatcaaggacaatgatgaaatagctattttagacattacaggcactggaagtcaccatgttctattcttagacagatataataacattaatgaaatcaagaaagaattgagagaagcggatgcaaaagttaatgtcactactttaaaaatattggaaggacatttatga

SEQ ID NO: 818 - DNA, 528 bp, Methanobrevibacter ruminantium
  source 1..528: mol_type = genomic DNA
atgagcgatttgcctatagatcaatcttggttagttattgctaacctttcaaatgatctgcataagagaggaattcaaattcccaaacagattaacagtgatttaggtttggtaaagtcccagattggattttataagaaagaccctactcatccagacatgatcaatgagatggcaagggctgaaatgtcattgaatcagattcaaggcatcttattgtcatttgctgaaaatattggggaagactattataatgaatggctggacaagctaaacagagctaatctgggagagaagatatatgagactcctagcacccaatccaaattccttattaatgcacctccaggattttcctatgcaaagatgactttaaaaaagccacttgctgaagatagggtacaggaaatcgctgaatattatggtcttattcttgaattcgattcagatgtcactatagcgctatatggtgataagcctgacattcaagcggcattaaaggagatggcacctttcttctctgaatag

SEQ ID NO: 819 - DNA, 717 bp, Methanobrevibacter ruminantium
  source 1..717: mol_type = genomic DNA
atgaaaattttagcaattagtgatatacacggtaaaagaagtgaaaatttaattaattaccttaaaaaagaagacatttctttagttttgattgcaggagacattacagactttaaattggaaggttacgatgacccattagacttcgtcaaaccattcattgacgaacttgtagaagaagcggatgtagatgtatttgcaattccaggtaactgtgaccctgctggaatatgtaatgcaatcaaggaaagcggtccggatgaaaagcctgcattctgtttgcataatcaattgattgcttatgaaaatgtggttataatgggttacggaggatctaaccctactccattcaacactccaggtgaaatagatgacgataagatctatctccacgtttatgagcttttagctgagtatgattatattggaaacgattccattcctagagtaaccatcttgcttacccacgcacctccatatgacactaaggcagacactattgaaagtggagctcacgtaggcagtcaaggtgttaaaaagcctattcatgaattccagccaaacattaacatttgcggacacgttcatgaagcttgcagcatagataaggttggcaatacaaccattgcaaatccaggtatccttgaagaaaatcatgctgtcttgatagaagtcaatgaagacgcaagctacaatgtagaaatcgttgaattataa

SEQ ID NO: 820 - DNA, 1152 bp, Methanobrevibacter ruminantium
  source 1..1152: mol_type = genomic DNA
atgtcctatcaagaaaataatgcatctgacaagtctcttcaagataaagatatgaaagcgaagcagcgccaagatagaattgttaagacaagcataataggtattgttgtaaatctaatacttgttgccttcaaggccacaatcggaattcttgtaaattccattgcaatcactttggatgcagtaaacaatctaactgatgccttatcctccataataactattattggagctaagcttgcaggcagggctccagataaggagcatccttacggatacggccgtattgaatattttgcatctgtaattattgcagctatcgttctttgggcgggaatcactgcattgatggaatcatggccaaagatctttaatcctgatgttacaagctatactacagtttcattagtcatcgttgcagtggcagttgctgtaaaattcatattggggcgctacgttaagaatgttggagaggaaatcaattcacaggcattggttgcatctggaagcgatgcgttctttgatgccatattgtcattttccactttgattgcagctttagtctccatattcttccatatttctctagaagggatcttgggagtgatcatttccattgtaatcattaaggcaagtatagatatgctaaaggaaactgttgacagcatgattggagaaagagtggattcaaagcttagtcgcgatataaaggaggcaatttgtgaatttcctcaagtctatggagcatatggcttgagcctgcataactatggtccagatagcatggagggttctgttcatattgaagtggatgacagcctaacagctttagagatacataatctaactcgcttgatttcaatgaaaatatttaatgagttttccataatattgacagtaggaatctatgctagaaatgacgattttaaggatattagaaatgacctttatgaaatcacctccaaatatgatgaggtcatagaaatacatggatttttagcctatcctgaagagaagctgataacctttgacataattgtggattttgatgctgaccgtgaggaagttaaagataagattttagatgaaatcaagtcattgcatcctgattttacttattgcatgatagatgattatgatttgagtgattaa

SEQ ID NO: 821 - DNA, 915 bp, Methanobrevibacter ruminantium
  source 1..915: mol_type = genomic DNA
atgattatcgttcgcggttctgtaaacagaaaagagtacaccagccgtttttcaaagggcattctctctcgatcacttattcgttctgaattaagcccagataaggcatatgaatttgcctctagaatcgaagaggatttgaaaaacaagggagtcactgaaataactacagatgagattgctgatattgtagttaagctccttgatgaggaggaagaaaaatcagtctctgaaagatatctcaattggagaaaggtccgtgaagctaaagatcctctaatcatattgattggaggagcatctggagttggaacatcttcaatggcttttgaaatatccaacagattgggtattaagaccatgataagcacagacatgattcgcgaagtcatgcgaaagattgtatctgaagacttgagccctgtaattcatgaatcctcatttttagcctatagatctatgaaagtagctcctccgccagagtttgactttgtattggctggttttaaagaccaggttgcaactgtaagcgtcggtgtggaggctgttatcgaaagggcattaaaggaaggaataagtattattatagagggagtgcatatagttccgggatttattcgaaaggaattgatggaaaaggataatattgtcatgtttacattgaccttaagcgatgaggagatgcataagaacagattctactctcgttgcggagacatttggaataacaggcctcttgaaaagtatatgggtaactttgaggcaatcagaaagacaaatgcctatctggaagatcaggcaagaaaggaaggcactcctataattgacaatattgatgtaataacaactgttgactttataattgaaacattgactgaaacatatggaggaatgaaacatgttagaaaagactaa

SEQ ID NO: 822 - DNA, 369 bp, Methanobrevibacter ruminantium
  source 1..369: mol_type = genomic DNA
atgagcaaggatgttcttacagtggaattggatgaagctactgtatttgcatttgagaaactgatgaagcataagataagcgcaatgcctgttgtcgatgaagacggcaagatggtaggaattgtaactgcaaccgacttaggacataacttgattttagacaagtatcaatatggtactaaggtaaaggatgttatggtaactgatgttgcatacgtttcatctgactgcacaattaaggaagccatttctgtaatgtttgaaaaggctcctggagacagcatcatcaatcaattgcctgtcttggacaatggcgagcttgttggaatcatatccgatggggacataattaaaatccttaaggaataa

SEQ ID NO: 823 - DNA, 2028 bp, Methanobrevibacter ruminantium
  source 1..2028: mol_type = genomic DNA
gtgttattaatgaggaaaaagatccttttcctaactttgatgatactaatctgttttactttaaacagcgtttgtgctcaaagtttggataatattaactacgctaatgatggatttgacagtgatgagatgattaattgtgatttacacaaagattcaagtcaaaaatccctgaaatcaaatgctttaagcaataagaaaacaaccaatactgttaagttaacagatatgaaaaaagctgaaagcaatgatgttaaacagacaggcgctgcaaaagcaagcaatactaaaagcacaagcaaaagcacaactaaaacaaatgctacaaaaagcaatactactaaaagtaccgctacaaaaacaacagcaaatagttctagcactaagaaagccactcaaaacacaactaccataaacactcagactttagcaaaaagctcaagcagttatatggcttatgttgagaaaaacgctaagctacaggaaccaattacaatcagcaaaaagaaatacaaatctccggaatatttgtatttggtttctaaggctgtaagcaatatttccaaaacaaaagtggaaattaaagataagctaatcacaaattacagcaatactgactgtaaatcagttaacggaactataaataaaactgaatatgtacaagtagctaagaaaacagttagcttcattgaaaagaatcatagagctcctaattggattgcatcatctaaaggcaatataccacgtaaccaattgattttggtatttagcaaatgcttagaccaatataacaaaagcggcaaattacctagctccattaagttaaatgacttagatttaaacaaaatgaagcaaaagattgacagcagtaaaaaggtaaacagtaccagcactaaaaaaaccaacacaagcagtactaagacaaacagtacaagtgctaagaaaaccaacacaaccagtactaaaaagaccaatcctactgcaactagcactaacaataacaaaagcttagtcgaaagcactttagattcaataaaatctattttaaacaatatagaaaataaattgaatcccactaacaaagttctgtctacaaccggcactaaaaagaacacagttaccgttaattctagcaaggtaaatgttcaaataagcagttcttcaactgtaaatgtgaaaatcagtgctaaagacaatacaaatagtggaaagaacactaattctggaagtgctaaaaaaaccaacactacaagcacaaagaaaaccaacactacaagcacaaaaaagatagatacaaacagtacaaagaaaactaacactactagcactaaaaacaacacaagcagtgcaaagaaaactaacactactagcactaaaaacaacacaagcagtgcaaagaaaactaacactactagcactaaaaacaacacaagcagtgcaaagaaggtaaatacaagcagtagcaaaaccaacacaagtgctaaaaacaacacaagcactactgcaaaaagttcttcaaatagcaaatatctgagtacttctgtattaaacgataaatatcttggagaatctctaaaaaagtatttggctgttggtaagaattgtcaagtaaccaacaaagcaattaaaactttagcaaatactcttacctctaaacttaaaagcgattataagaaaggagaaaagattttcaattgggttcgtgacaatatcggatacgaaaagtacagaaacactaaaaaaggtgcattaaaaacactgcaaaccagaggaggaaactgtgttgatcatgcacacctgattgttgcattatccagagcagcaggacttcctgcaagatatgttaatgcaaacaactgtaaattctcttcaggatatgtttcagggcatgtttgggctcaagtattggttggcaatacatgggttgtagctgatgcgacaagcaatagaaataaatttggtgttgtaaagaattggaatgtgaatagctataaattagttggaaaatacagttcaattagtttctaa

SEQ ID NO: 824 - DNA, 1674 bp, Methanobrevibacter ruminantium
  source 1..1674: mol_type = genomic DNA
atgttttatgaaaagaatttaatcaagaaaaatccattaagagtggatataaggtttggattagtctatccaaatgtatataaaactgctatgagctctttaggctatcaaatcctttataattatgtaaatcttagagaaaacacatattgtgaaagaataatctatccctcctatcgcagtttggaaaccaacagccccttaggggatttcaacatagtatcattttcccttcaatatgaacaggactatttcaatattttagaaattctccgtgatgcaaatattcctttaaggagggctgatagaactttagaagacccattaataattgcaggcggaccatgtgccactgcaaatccgcttccattgtctgactttatagacatttttgttgtcggtgaagcggaagctgtcttaaacgatctaatagataactataatgaaaataaagacaaatttacaaataaaaacgaattcctatccacttttttagacattaagggcctatatatatctgaattcaataacaaaacagatattgccttgcttgatgagatgtctgatgcctaccatataacatgtcctataattaccgaaaccgatgataaggaccttattccagtcttttcaaattcaattctattgaatgtatccagggcctgcacaagaggatgcagattctgcatgtccagctatctctataggccacttagggaaacagatcttcaacagttgtttgatatagcagaagaagcccgtcaaaacacaggattgaataagatatccctaataggtgcagcggtttcagactattccaaggtcaatgagcttactgaagggttgaaggatatgggatttcaggtctccacaccctcaatgagaatagaatcaatcacaagggaaacattggtatcgcttagagaaagcggccttaagaccttgacaatagctcctgaatccatctaccaccttagaaaaagaatcaataaggacatttcagatgatgatgtattcagagtaatcaaagacgctgtggatttaggttttaatcttaaattgtattttttaattggtttgccctatgaggatgaagacgacattaaagaacttgcatgtctgatgaagcagattgattccatgaagtatttaattgattcaaatttaaatgaatccattaaaaaggaggaagttttaactaaacataagtcaaaatcctctggaaaaaaatccaagtcaaagcaaaggaaaaaggccagggtttcaataaagttcagcgtcaatcctgttataccaaagcctcacactccccttcaatgggaaggctatgacatgaagagaatcaagtcaaagataaaatatcttaagaagaacttaaagggattggacattaagtttgacagcggaaagatgggattgattcaatatgtcctatcctgtggggatagggatattggagatcttttagaagagtcattaaatagaaagataagcattaaggagtggaaggaaaatgctccaagctatgagattggggataacttaccttgggattgtattaatgtaagtgtgagcaaggagtttttagagtctgagtatgagaagatgaaaagcggagagcagactccatggtgtgaggatggctattgttacggttgtggggcttgtaattag

SEQ ID NO: 825 - DNA, 1116 bp, Methanobrevibacter ruminantium
  source 1..1116: mol_type = genomic DNA
atgttaaatccggctaagagagttgaagcaatagaactgtctcaaattagaaagatgtttgaagtgaccaatgagaatgcaatcaatctgggaatcggcgaacctgatttcaatgttcctgaaaatattcgagaggctatgaagaagtcaatcgatgatgggttcaccaaatacacttcaaacaagggaatcatcgagcttagagaatccattgttgaaaagctatcaaaggacaataatatcaagacagattctgaaaacattatagtgactaccggtgcaagcgaggcattgtactgctgtgcacaggccctatttgaaaagggagacaatgtattggttccaaaccctggatttctctcctattactctgttgtgaatctggctgaagcaaatattgttgaagtcacaactccaatggaaaatgagtttaagatgaaggttgaggatgttcaggaaaaattggataagaataccaaggcattgattataaactctccatccaaccctaccggtgcggtaatggataaggaggatgtcaagggaattgcagatttggcaacagaccatgacttctatatcatttcagatgagatctatgaaaagataatctttggaagaaagaactattctcctgctgaatattgtgacaatgtaattactcttaacggattttcaaaatcctatgcaatgactggccttaggataggatatatggcagcaaatgaggagataactgaaaatctccttaaggttcatcaatattgcgttgccaatgcaacttcaattgctcaaatgggagctcttgaagctcttacaggtcctcaagactctgtagaaatgatggctaatgagttttcaagacgaagagacttgatagtctccagcttgaatgatatgggttatcctactgttaactgtgaaggggcattttatgtcttccctaaggtggaaaggcctatggactttgtaaagaaggcagcagaggctggagtcatttcagttccaggtgcaccattcggaagccttggagagaatcatgtgagaatgtcttatgctaattcctatgagaatattgaaaaggcaatggacatcttaagagatttggagtattag

SEQ ID NO: 826 - DNA, 915 bp, Methanobrevibacter ruminantium
  source 1..915: mol_type = genomic DNA
atgaatagagaagaacgagatagaataggaacacgtgcatctgcagttgcaattattggaaacatcctccttactgtattgaacatctcagtgggactgatgtctggaagttacgctcttatatccgaaggggctcatacaatttccgatatagcaacatctgtaattgcatatgttggattcaagatagggagcaggcctgcagataaggagcatccattaggccacggaagagcagaagcaatctctggccttatcatagttgtattcttatcaatagttgccattgaagttattcaaggagctttccataagctcttctttggaggggctttggaagtgccagatcctatagcagtggtaatggcctttgtaggtattttggttaacctcttcatgagcagctatatcattcgcttggggaaaaaggctagaagccctgcgattgtagcagatggaaagcatcagagggttgatatatttgcatcattggcaatattcattggaataatggtttcccaatatggctatcctatgctagacccaataataggtattttcattggggcattgattgctaggactgcagttattgtagcaatagacaatctaaacaatattatgggtaaattgccttcagatgagttaatcaaggaaataagggatgttgccaattcagttactgatgtatgcagtgcccatgatattaaggtgaattattttggctcttatgcaaccgttgccctccatgtggagcttccgcctgatatgagcttgagggaggctcataaaatcacccatagggttcaggataagatactggaaaatgtggatatggttcaggcagtgcatgttcatccttgccctgaaggggtgcagtatgatcatagtcaattattggatgaggattcttaa

SEQ ID NO: 827 - DNA, 2349 bp, Methanobrevibacter ruminantium
  source 1..2349: mol_type = genomic DNA
atgctatttgtcatgatagcgggggtatctgcaagtgatataatggatgcatcagataatccaaataatgatgattctattaatctagtatctcaagagtctggtaatgatcaaatatctaatgaagccatttcagtttcaaatagtcttagtgctaatgatgattcttatagtccggaatctgaaaagataagctctaaaataaagacttcaaataatttaagtgcttcaaacagcacaaaaaccactactaaggccgctgcggctaaaactactaaaactggcactagtctacaaccatctagcaccagtatatattcaggccaatatcttgtcatcacattaaaggacaagaattccaaggctttaagtggtcagaaggttttaattaacatttccaaattcaaaaacacatatacaaaaactacagattccaaaggccaggtcaaattggctgtaaatcctgttggaagctttaagttagttgtttcatatgctggaaatggaaattattcctcttcaaagtattccggaaccctaaaggtttcaaaaagtgatacaagtctaacggttgcaagcacttccgttactatgactactcccttagttgttacattaaagaataaaaagaccaatgaggccttatccggcaaaaagataaagttcgttatggatagagtaagctattcaagaactaccgatgccaagggtcaggcaaaacttaaggtcaatatgaaatatgtctttaatgtcacagttaaatttgacggaacaggcaatcttaaatcttctaaggtgaccaagaccattaagcctaccaagattccggtaagctttgtctattcagcaaactctgtgaaatatggccattccataacagtcagtttaaaaaataatttaaacaacaagactctctctggcaaaaagattgtagtcaagactagcgactctaaaaagtcaacaacaaagactacaagttcaaaaggaacaatcagcgttcctatcaattctgtcggggatgtcactgtaagcctttcatatgctggagacagctcctataaggctgcatcaagcagcaagaagatcaagggacttaaggattcaagtaaaatcactagctccactggtaccattcctgttggagacagctatacagtgactttaaaggattcttcaggtaaggccttatccaataagaagattgtcttcactttcgatggaaagtcatacacaaagacaaccaactctaaaggacaggccagcttggctatctctaaaggtcctggaacatattctgtaaatgtgagttatggaggagacagttatcatagcggaagcaagctaagcaagaatgtcaagacatccaattcaatgattagcattgccaatgtgattaaggctgcaactaccttaagggctcatgttgactatacaaacaggtttaacaagtcctatgtggtaaccatcaatggattgaagtattctcctgatgaatttgcatatatgatgtctcaggctatagtcaagattaacaatggccaaaaaagcggttatgtgaccttcaagaaccttactggagattatgattctaaaggatcttccataaacggcaatttgatgaaaaagaattacatcagcctagccaatacactcattagcagcgtaaataagaacaataagatacctgctaacatatctaccaatttaggcaagatcgaagcaaacctttatatcttcggtttggctaaggcattgcagttctatggagaggaaaaatacttgcctaagtatttgattcttaaaaacagtttcataaaaggctcatcctcaactactgtcactcaaaaggcaaagattctaaattgcaaggaggcattcaatgccactgaatttgagaaataccttaagacaggaggaaagtctgcccttaactcagcgattgtcgctaaggcaaaatccctaacaaaaggattgaccagcgataaggctaaggcaaatgcaatattcaagtatgtaagggataaggtttcctacagctactattcagacagtaagaaaggagccgctaagacatataagacaaagtctggtaactgctgtgacaaggcaaacctaattgttgcaatgtgcaggtctgttggagtatatgcaagatactcacatgctcagggctgtaccttctcaagcggattggttgcaggacatgtatgggctcaaacatatgatagggctacacagacttggtatactgctgatgctacaagctccagaaacagtttgggaaaaataaacaattggaatactaagaaatatagtcaagcaaagaattatgtgcttattccattctag

SEQ ID NO: 828 - DNA, 453 bp, Methanobrevibacter ruminantium
  source 1..453: mol_type = genomic DNA
atggcaaagtataagagagtggcagttggcggaacttttgacaagtttcattatggccatagaaaattaatttccactgcatttgaaattggggaaagcgtagagataggagtaacctcaaatctatttgcaagcaataaaggagatgtagactcctgcaacacccgtatggctaatcttaacgcttttttaagcaagagccatgacaatttccatatatcccgtttggatgatgcttacgggccaaccatttatgatgaaaactttgatgccatagttgttagtgaagagactgagccaaatgcaataaagatcaatgaaatcagggaatctaaaggcatgaagccattagatattgttgtggtgagctttgttttggcagatgatggaattcctatttcttctacacgtatccgtcaaggtaagattaatcaaaagggtgaattgatttaa

SEQ ID NO: 829 - DNA, 975 bp, Methanobrevibacter ruminantium
  source 1..975: mol_type = genomic DNA
atgatttttattcaaagagatggtgcagaatctagaaaattatcttatgataataaagtatgtttggcatgtggtatttgtgcagacacatgtccaacagattccctagccattgctgatgttttggcaattgctagaggtcaagctgagggaaataatattgtattggaccaggatacttgcgtattatgtggtttatgttcatttgcatgtccattcggtgcattggaatttgatataggcggacaagatgcaagtgaattgccaaactatcctaaatggactcatgaatcctcaatcagtcaggatgactgtgaattctgtggaagatgctacacagcatgtcctcaagatgcaatcctattcaaaagagagttgccagatagaaatgcgcttctaaagggtgaaatctccataaatgaagatgactgtatctattgtcaggtatgtgctgaaatctgccctgcaggagctataagtctcactgcatctgacggcaagatattagacacaatcgaagtggatgaggataaatgtgtatattgtggagtatgtaagagagcatgtcctcaagaggcaattaagactgtatgttcaacttgcatgtacagcgatgagattgaaaagatcgctatcaccggtgacatattcattacagaagactgcattaactgtggatggtgtaaggaaatctgtcctgttgacgctgcagaagtcactaaaccgtttgatggtgaaatctccgtcactgaagaggactgtgtcgcttgcggatcctgtatagacatttgttcatgtaatgcagtaagccttcaagacaatgttgctgtattcaatcaagactactgtgtcttatgtggagcatgtgcaagactctgtccacaagaaagaattgctattaatagaacagatatgaaattgactaatattagctctgcttcctggaaagctaatttagaaaagctacttaattag

SEQ ID NO: 830 - DNA, 204 bp, Methanobrevibacter ruminantium
  source 1..204: mol_type = genomic DNA
atgaaagaaacactgattaaggagtttaaagatttaaaagaagaaactggacaagccagcgttgaattgattttattgattggttctattttagtaattacaattatttgtggaacttatgtatttaatgttaattctaagataaacggccagtttaatcaaacaatgactaaggccaggttatttcttttaaataaggtctga

SEQ ID NO: 831 - DNA, 237 bp, Methanobrevibacter ruminantium
  source 1..237: mol_type = genomic DNA
atgaatcgacttccaagggaaactgtctttgagcaaatcaaaaggaactttgtccaattgaaggatgaaacttccggccaaggagctgcagaatatattctcctattcggaggagttattgtaattgccttagcaggtcttttaatctatagatcctacttcagcaataacaccagcggattgaatgcgactcaggacatcaactccatcagagacaatatgagcaatgtcttatag

SEQ ID NO: 832 - DNA, 2094 bp, Methanobrevibacter ruminantium
  source 1..2094: mol_type = genomic DNA
ttgtctgattcattagatttatttacaggagttttattgacagccattggtttagttcttatttatggaagtataatctaccgtctaatcgatctagttttaatattaggtgttttagtcaccctattcggtttatacaaattgcttccagcattctttatgagattgctaagttcaagaaaatcaagctcaaggaataagctttcaaaagccaatgtttctcaagattctcttttaaaggcaggaattgaagagataaacaatttccttgacggcgaagacaataaggaaaattcaaaatctgtcttaagagctccaagggaaagctctctagatgctcctaatcaaatgacctttgaagaatatatgagcaagtcaaaaacagattatgcaaccaattactcacctaaggaagtaaagcctatctttaaggatagagacgttgatgaatccaagcaggttcttagaacaaagcctgtcaaagaggaaaagtctaaattcaagcttccgtcatttaagagaaactcttccaaaaagccaaaatcaagaaatttcgctttcagaaaggataaggacacagagcgatctccagacaagctctactttactccaaattatgaaaatccaatgatggtaagccctaaacctaaaaagaaatctgaaaataaattaaggctatctgactctccaaagagatctaaagaaatctctgaggcattggcaagtgttggcactacagaaacagtctatgacaataatgcttcagatgacagctatagctatatgcctaaggaaatggatgatgaattaatcgtgcctattgatgagattgatttggatggccctcaagaggctcctatatacactctttcacagtctgagaacaccctttataataatgtaatttatgatgacgtcgattcagacttctatattactccaatccatgcagaaagcaatgaagacaactctcctgatgaagaaggggattatggtgaaggaggagacttatatttagaagtagaacctgaagacacctcttatggtaatgatctttacattgaaacagagcctgaagataattattacggcaatgatctttacattgaaacagagcctgaagataactattatgatgatgaagacatttatatagaatcatatgaagaagagcagtcatatgaagatgatgatggctatataaccgttgaagcaagtgatgatgacttgcctattccaaggccaaaggagatttcaactcctcaaagtcttccaagacctacttcaattgcttctacaaatcctatttctaaaaaggaagttggttcaaacttatccagacctcataagaaggtttccacacttccaaggccaagcgtatcttctaatctgcaaaggcctcataaaaaggcagaatctactgatgcagtttcagtgaaagatgaatctaaagctgcagaagcaagtattgctaaacctaagcctatagctaaacctaaacctgtagctaaacctaagcctaaagaggctcctaaatctgatgagcttatatctaaagaggaattggatcaaatcatccaagatccaaaggataatacaattcaaattgatccaaacaatccagaatccttgcctattccaaagctcttaaacagttatgtcgtatgtgaaaaaggaatattgacctctcaggaagcctttgaagaggttgcaagtcattccagtcaagagattttattggaagcacctacaattaaggatatgggtgaaagattcctctcaagcattgctgatattaaaacaagaattatcgttcaggaatttgatttagctgacatttcttatgttcttctattaagctctcttattaaaaaaggagttgaaataaaaacattgcctatggtaaattcatttaacttaatcggcgatgattctcatgctttaatcatttccaatagtatggatgaagatgactttgaatatggtgctgtatatactgataagccttccattgataatattaaagagttatttgaatcctcttggtcaatagcaaatgatttggatattggcaatttaaatgaaagcgaataa

SEQ ID NO: 833 - DNA, 714 bp, Methanobrevibacter ruminantium
  source 1..714: mol_type = genomic DNA
atggaaattagatggttaggtcattctgcatttgaaattataagtgatgaaggagttaaaatattaatagacccattcataagcaataatcctacttgccctattcctgtagaggattttgaggcaaatatcatctgcataacccatggtcactctgatcatttcggggacgctatggaaattgcaaacaatactaatgcaacattggtggcaaatcatgaaatctccctctttttaggggaacaaggatttgactgtgttggcatgaatactggaggaaccgtttccattttaggaatcaatataaccatgcttgatgcaaggcactcctcttcaatcgactttacagaggaagtccgtcctggaggagaccctggaagctttttaataacccttgaggatggaactaaaatcttccatgcaggagatacaggattattcggcgatttggaaactgtagtgggaaacatattcaagccagacattgctatggttcctataggggacagatttaccatgaatccattccaagcagctttagcaagcatgtggatatctcctaaggcagttattccaatgcattacaatactttcccagctattgaacaggaccctgcagtattttctaattttgtatatcagctaaatcctaatatagatgtagtgattatgaatccgttagaaacttatgctccagactttgataaagaataa

SEQ ID NO: 834 - DNA, 687 bp, Methanobrevibacter ruminantium
  source 1..687: mol_type = genomic DNA
atgagagaattgaatatggatgaaataaaaaacgctgaaaagatagaatcctttgaccaagtcagcgcaaagcttaataaaaccgagaaagaagaaatagttattgatgaaatggacatagttttccttttagataaaagcggatcaatgtttggtatcatagatgacactcttggaggatttaactctttcattaaaagggaaaaggaaaaggaagtgaaaactcgtgtaactcttgttctttttgatcataagtataaggtcttatacactagaaaaccaattgaagaagttgaagagcttacagaagaagactattacgcagacggatgcactgcacttttggatgcaattggaactaccatcaatagaatcgagaaggaagtctgcgatgaggtcctttttgtaatcactacagacggacttgaaaactattccaaggaatacagtagagaggacgttaagaagcttataagaagccataactggaatttcatattcattggagcggacatagactcttatgaagaagctgcaagccttggaattcctagcacacgttctgccaattatgaaaaaagcagaagaggagttggttctttatataggagcgtttcctatgcaaaaagactacgttccagtggagaatctttagataaagttaattggaaaagaggtttagattaa

SEQ ID NO: 835 - DNA, 663 bp, Methanobrevibacter ruminantium
  source 1..663: mol_type = genomic DNA
atgacaactgtagctgaaacagtatataaatgtccactttgtggatttgcacatacaactgactgcatgacaagcacaagtgcttttggagctccagatttagatggaagaccttcccctatggcaagactaacaatctatctattcattaaggaatgtccaaattgcggctttacaagctatggctttccagagcatacaagtgtctctagagagttcatccaaagcgataattacctaaactgtgataatattgatttcaaaacagaaagggctaaactgttttatagggtctatctaatatcaaaagaagaagggatgatgaatagggcacttacagatcttgtccattgcgcttgggtttgtgatgatgacgatgatgaggaaaattccatcaagctaagacttctcataaacgacttattcaatgagctatatgactttaaaagtgatgaagaggactacgcccatttgattaagcttgattttatgagaagaggacatctattcgatgagcttattgaagaagttcgccataagacctttagcaaatccttttataataaggttaaggactttcaaatggaaaaggcaaaaaacagagatgccggtaaatacacctttgatgatattgaaggctatgaagagtataaatatggttaa

SEQ ID NO: 836 - DNA, 2010 bp, Methanobrevibacter ruminantium
  source 1..2010: mol_type = genomic DNA
atgaaatcaatgaccaatgtagacataaacataatatgtcaggaattaaatgagttattagctggagcaagagtggacaagtccttccagcctacaaaagacacagtggtaatgagattccacaaggcaggaacaggaagaatggatcttgtcatacaggcaggtaaaagaatccacataagccaatatcctcttgcaaacccacaaagtcctccaagctttcctatgcttcttagaaaaagggttaagggtgcaaatgtagtgagcatccaacagcacaactttgaccgtgtagttgaaataaaaatgaaaaaggacattacatacaccctcatcgtcgagctctttgcaaagggaaacataatccttcttaatgaggaaaacgaaatcctccttccacttaagcgtaagcaatggagcgatagggacataagcagcaaaaaggaatatgtcttccctatcgaacacggaataaacccaatgacaatcactgaagatgagtttaaggaaattatcaagtcttcagatgatgagattgtaagaatccttgctaaaaatggacttggaagcctttatgcagaggagatcatgcttaactgtgagataaacaagaaaacactttcctcagaacttacaaaggaagacatactggagatatatggagccttgaagaaagtctttgaaggccttgagaaaaaagaattcactccaatgattgtaaacaacagaaaggaaatcgaagagcttaaaaaacaaaacccagacaagcaatacaaggtcaaggaagatgtagtggccataagacttcaccagtatgaaaacttcgaagaggaatcctttgacagcttcaatgaggcctgcgatgagttctactcctcaaaggtaaagcatgaaatcacagacatccaggaagccgtatggaacaagaaggtagggaaattctccaaaaggcttgaaaaacaggaagaaacattaagaggatttgaaaaaacaatagaagattcccaaaagaaaggagagctcctatttacaaattatgttcaggtggaaaacatattaaatgtaataaaggacgcaagggaaaaggactatggatggaaggaaataggaaagaccctaaaggatgcaaagaagtctggaatggctgaagcacagatattcgaatccatggatcccctcggaaacatcacattaaatatagatggaatttcaatagcccttgattcaaagaaatctattccggacaatgctgaagtatactatgaaaaggccaaaaaggctaagcgaaaaataaaaggggcaaaaatagctattgaaaacacaaaagcccaattgaaggacatggaagagaagaaggaaaaggcaatggcaaatatcatggttccgcaaaagagagtcaagaaaaacctcaagtggtatgagaaattgagatggttcgtctcaagcgacggaacattagtagtatgtggccgtgatgcaggtagcaatgaggcagttgtgaagaaatatttagaacaaaatgatgtttatctgcatgctgatatacatggtgctccttcagtggtagcaaaaatttcatccgataaattaaataacaatttgcttaaagaattaggcatctttgccgcttccttttcaagtgcttggtcaagaaattacggaacacaagacgtatattgggtggagccagagcaagtttctaaaaccccggtttcaggtgagtttgtgccgaagggtgcattcataataagaggaaaaagaaactatatcagaggggctaagctagagatagcaattggaattgttgattatgatggtgaaaagagaattatggcaggcccggttgatgcacttaaggcatatactgaaaagtatgttacaataaagccaggatatactaaaaaagagaagatagctaaagagatactctctagaataaatgaggacaatattattgaattggatgatgttgttagggtattgcctagcggtaaatgtgactttgtctaa

SEQ ID NO: 837 - DNA, 273 bp, Methanobrevibacter ruminantium
  source 1..273: mol_type = genomic DNA
atggatacaactgttaaaactgtatcaatccatcttgttgcagcagtagtggcagctattatctctactgcctttacattaggatggtttggttttaaaaataacgtatttgcgtttgttattggtgtagtgattctttatttcattggacaatattgtaaaaaggcatttggcgaagagataagtggattttctacatggctatgggatggaatccttccattcggatttttctggttcatattatggactatattgactaattatttataa

SEQ ID NO: 838 - DNA, 8640 bp, Methanobrevibacter ruminantium
  source 1..8640: mol_type = genomic DNA
ttgaatcgaaatagcaaaatcatattaatttcattatttacactgctattgcttgccattccagcaggatttgcagcagatattgaatcaaatagccacaataatttagatgattcaaatacagtaaattttgaaattaatgcaaattcaaaggatacaaacttagagagtaatttaaatactggcaatttagaaatgaattcaaataatactaatttggatatgaattcaaataaggcaagattagcaatgaattcaaatgccagtgatttggaaacactaggtttgacaagaggggaatttgaaaacggatcaaacaatccaagcctagaatattcaagcaattcactctcagacaattcaaataataaatatatatccccatctagtgataaaaacacatatggctccaacaaggtaggtgacggtaacgtaaacatatactactttgatgctagtgctagtgacgatacaggtaacggcagcttagaaaggccttataaaacccttaaaaataatagaattgtagaaaactccataaattatcttgcaaacggagtatacaacctagatgctacaataaataaaaataatataagctttattggtgcagactcttcaagaacaataataagctacgcttcaactgcatttatcacaaacaatatcctaaactttgaaaacatcacattgaaaggattaaacattcaaaatagaggaaacctaactgctagaaacaccattttcataggtggaaaaggatattgggatagatcttacaacaatattttcggaggggcaatatatacaccccaaaacgaaaattacactacaataatcattaactgcagcttcataaacaatacagcagattatggaggagcaatctatgcatgcggcggaaacgtgactgtagaaaactccagcttcataaacaacactgccgaaaggtttggaggagccattgcctctgaaaataccttaacaaacaatataagaaatgtcgaattcatccatgacgtttcactaaacgatgcagggggaggactattcatatcattcacccaattaaacggcactgacttgcacttttacaattgcagcgcagactttggaggtggaattaccgcactttactccaacgtttccctaaatagattcataggaaaagacaataaggcaagatacgatggaggagcaatctatcaattctactgctcattgctcattgaaaactccctatttgcaaataactctgcaaacaatggtggaggattatatgtcgacaattcaaactccctaaaggtcacaaagtccaatttcacacagaacaatgcaacagagaagggaggagcaatctattcattatggaataccttagcagaaggaaactccatatccaacacccgcttcaacaatagcttcagcaacaacaatgccaagaattattctaatttttatgaaggcaaggatgtcaatatgagaattggaagcggcaatgtcaccctataccatcgtaacgaaactgaaatcgatgagattccaagctattacagtcttatagatttaaatcaggtcacttccataaagaatcagcaaagcggtggaaactgctgggcatacgcctcaattgcagcccttgaatcagcaatcataaaggcaggaggcgaggcacttgacctttcagaggaaagcatgaaaaacctgatagtcctcttttcagattatggatacccatggctaaccaataacggaggaaatggggacttcgccaacgcttatttgacctcatggctagggcctgtctttgaagatgacaatccaggagatgacagatcatacctctctccagtcctaaacagcagaatacatgtgcaaaacatccagtatctaggcagaaacaactatacagacaatgaccgaatcaaggaagcgataatgaaatacggagcagttgcaacaagctattatatggataacagctattacaattatagaacttccgcatattattgtccttcagccactagcagcaaccatgcagttgcaatagtcggatggaatgacagctattccaaaagcaacttcaaaaccaccccacaaggagatggggcatggatagtgaaaaacagctgggatactaattggggagacaatggatacttctatgtttcatattatgacattttgatctttcctttagggtctatggactggggacatgcatatgtcttaaacgatacaatcaagcttgacaagaactaccaatacgacatttcaggactcacagactatttctataatgcatcctctacagcatggtataagaccaagcatactgcagatgaggatgaatacttagctgccgtgtccacatacttcctgacaacaactgactatacaattttcataaaagtgaatggagaagagctatataatcaaagcggaaacagcgaatatggctatcgtacaatttatctaaatgatttcattccactaaaagcaggagatgtctttgagacaatatttaagataaatgtaagtggagaaactggaattccagtatctgaaggctctgccttcaacaaggtcttatatgatcggaaccagtcattcgtaagctatgacggcattaactggctggacatttatgatatttattggacatataactccgatgtttacggatcacactattatgtatctgcagcactctgcctaaagtcattcagcttcataaatgaaatcggaacaaacctgaccttggaattcaattatagcctagataatgaaggagatagaataagtccagtgaatataatcgctcacgtcattaacgaatacggtttcaatctagacaacggacaggtaaaattcatcattaacggtacagaaacaatagcagacttaatcaatggatatgcaaacataagctggaactttacagatattgaaaatgaggtttatgcattatttgagaaaacaggatacctctcaagctccgctaatgagacagcaacactttccgaaaagtatgtcacacttgatttgaatactcttttaagtgaagacaagctcacaatcactgtagacagctcaagaaagattaatgaaactttaatactagagataaatggagaaaagcacccatttaacctttcagaaggccatgttgtatacgacttatacgatattgaagatatagactacttaattagagcctatctgaatgacactgggttctataactgcgaagagaaaagcacaatatttagattaaatacagaaattacagagataattgcttcaaattttacaacagatgattatagcaatgccatctatgagataagtttagttgattcacaaggtattggaatagccaataaggaaattttatttaatatatctggcaatttaactaataataacaacaataataacaattttaacaatataatatttaatttaactacagacaatgatggaaaagcaaggattccaatcaaccttccaggaggaaatttcacaataaatgtccaatccaaagggaattatctatattcatcagctgaagttgcccttaagctaaaagtcaaggataaagtaagactagacattgatctcaatttgaacttcaatgatttggaagtgattattgaattaaacagatcattaaacgaaacagttaacttcagctttgcaggagaaagctcaatcatcagattagaaaacggaagagcttcagttaatttcacaggattaagcaacaataattatacagcaatcgcttatttggaaaacgacattgattatctttcaaacattgctcaaaaaacaatagaaatcaatataagaaacttaataatccaagcagatacaataaacactacaaaccgttactatggcaattatacaattcttctaactgatgaggaagttaatgaagtagccaacaaaacattaaatgtaaaaataggtgaagaaagcttcaataaaactagcgataatgatggaaaagtaatcatccctcttgatttaggaattggagaatatgaagtaattattagcttcaatggagataaggatttctttaaagcaaatgcaactagaacaatcaccgttttagaaaagctatttgcaaatatcacagtttccacattagtggatgaggccacaatagacatcattatcgataagaagattaatgagacacttaatatcagcatagaccaaagcgaatatccagtattgtttgaaaatggaacaggacagttaatcctagacggattggaagaaggaaaccacatagtcaccatagatcttctcaaatacctattatttgaaagcaaagagttcgaaatagataaaagcataaatctaagctctgatgactttaactgctatgagcacacaaacagcacttataccgtgcttttaaccaacaatggcaaagccttagcaaataaaaccataagattcgtcctaaatgacacaacaaccataagaaatacagatatggaaggaaaagccagcattgacattgatttaagcccaggagtctatgagctgaacattacttattatgatgatgagagaagcgtgattaatacagtctatgtattgtccaacataaccaatagcacagatcctaaattcaatgtgacacttgatatggacacagttcttagtccagacaagctaacaatcaatgtaaactgctccaaaaagattaatgaaactttaattctcgaaataaatggagatcaacactttataaaccttacagatggattcgtaagctttgacttatatgagcttgaaaagatagaatatgtgattacagccaaactaaacaacaccgacctttacagatttgaagacaagtcagttaattttgaattaaaccaagaagcaacagacataatagcttcaaactttacaacaggtgactacagcaatgaaagatatgaaataaccttagttgactccgaaggaattggaatatccaataaagagatttcatttaacatttcaaacagtttaatgagcaatgagaattatatcatatttaatcaaactacagacaattcaggaaaagcaagcattccaattaatttggctagaggaaattacacaataaaagtccaattcaaagaagattacttatatttagcttccgaatctactgtagatttaaaagtaaaagaaaatgttaaaattgatattgaattcaaacaaatgatcaatgacttggaagtcattattgaattaaacaaaactctaaacgaaacagttaacttcagctttgcaggagaaagctctatcatcagattagacaatggcaaattctccattaattacacaggattagcaaacaataattacacagtcattgcatatattgaaaatgacaccaattatcattcaaacattgctcaaaaaacaatagaaatcaatataagagaattaataatccaagcagatacaataaacactataaaccgttactatgacaattatagaattcttttaactgatgaagagggcaatggaatagcaggtaaaaccttagatataagaatagctgaaggaaactatattgaaactagcgacaatgatggaaaaatagtcattcctcttgatttgggaattggagaatatgaagtaaatattctatttaatggagataatgagttctttaaagcaaacgtaaccaaaacaatcactgttttagaaaagctatttgcagacatctccatttcaactttagttgatgaagctacaatagacattataatagataagaagattaatgaaacacttaatgtaaatatagaccaaacttcatatcatgtaatatttgaaaatggaaccggccaattgactgtagacggattggatgaaggaaaccacatagtcaccatagatgttctcagatacctattatttgaaaacaaagagtttacaatagatagaagcataaatttaacttcagatgactttaactgttatgaacacacaaacagcacttacactgtatcattaagcaacaatggcaaagtcttagcaaataagaccataaaattcatcttaaataatcaaatcattttaaggaacactgacagcgaaggaaaaacttcaatcgacattgatctaagtccaggagtctatgacttgaatatcatatactatgatgatgaaagaagcagaaccaatacaatttatgtactgtcaaatataacccatagcacagatcctaaattcaatgtgactttggatatggacacagttctcagtccagacaagctaacaatcaatgtaaactgctccaaaaagattaatgaaacattaattctagatataaatggaaaagagcaaattttaaaccttaatgatggattcgtaagctttgacttatatgagcttgaaaagatacaatatgtcattacagccaaactaaacaacacagacctttacagatttgaagaaaaaactattctatttgaattaaaccaagaatcaacagacataatagcttcaaactttactacagacgattatagtaatgcgatatatgaaatacgcttagttgattcctacggccttgcaatagccaataaggagattttatttaatatttcaaacagtttaatgagcaatgagaattatatcatatttaatcaaattacagacaattcaggaaaagcaagcattccaatttatcttccagggggagattacacaataaaagtccaattcaatgaagatgacttatatttatcttccgaatctaacgctcacttgaaagtcaaggacaaagtaagaatcggcattgaattcaatcaaaacatgaatgatttagaagtgatgattgaattaaacaaacccctaaacgaaacagttaacttaatatttgcaggagaaagctccaatgtcaaattagaaaatggaaaagcttctcttaaattcacaggattagcaaacaataattatacagcggttgctcatcttgaaaatgatagggattatatttcaaatatcggcgaaaagacaatagaaatcaatcttagaaacttaataatcatagcagactcaataaaaactaaaaatcattactgggacgattatacaattcttttgactgatgaagaagggaagaatgtagccaataaggcattaaacattaaaatcgatgcaaacagttttataaaaactagcaataatgatggaaaagtaattatccctcttgatttaggtcttggaatgcacgaaatcaatattgcatttgatggagacaatgaattcttcaaatcaaacattacaaaaacaataaatgttatagaagaaatctctgtcaatgtcaatatttccactttagtagataatgcattaattgaccttaaattctctaaagaccttaatgaaaaaattgatgtccttatagatcaaaacttatatccagtatctttagagaaaggtgccggacaaataagggtcaatggattagaggaaggaaagcacattctaaccgttgatcttccagaatacctattattagaaagtgaagagtttgaaatagataagacaatcactcttatttcagatgactttagatgctatgagcattcaaacagcacatacactgttgttttagagaataatggcaaagctttagcaaataaaaccataaaatttgatttgaataagattgtgaccataagaactacagataataatggaaaagcatatttgaacattaatttaagccctggaacttataaattgaatattgcctactatgataatggcagaaataagattcataatatttatgttttagctaatactagtggtgataataagacaaatgaaactaattcaagtagtaatactaacccaataaacaatcaaacaaataatactaatccaactaataatacaaaaccaataaacaacgaaacaaacaacacaaacccaaccaacaatacaaatacaaccaacaatacaaatacaaccaacaatcaaacaaataacacagacccggttattgttagaaaaggaacaaatatactctgtcaaaacatgattacaactgcatttgacagcaaagtagatggcagaataggtaaatacttcgttgtaactttagttgatgcagactacaagcctatggccgataaaaccatttatattggttttaatggtaaaaaatacattagaaccactgattcatcaggtcaggcaaaactgcagataaaccttgcttatgaaggaagctacacctttgcaatagcattcttaggagacgatgactataagggcagctttgttgttgcgaatattaaagtaaataaacaaattcctcaactaaaatcatcagataggacttatagatcaattgcaaagacaaaaacattaactgcaagcattaagacagcccaaggaaatgctatcaccggcaaaaaggtcatatttacaataaatggtaaaaaatacactgcaataatcaacagcattggtattgctagcgtaaaagtaagtctttctaaaaaaggaacctatagatttacagttcaatccgaggcaagttctacttatgcaagcactaaagtcactcataaattagttataaaataa

SEQ ID NO: 839 - DNA, 1818 bp, Methanobrevibacter ruminantium
  source 1..1818: mol_type = genomic DNA
atgtccagtatgagcagtgttgcaggattatccaaatacattagaacattgcctaaagccaaaagcacttttctaatgataatcgtattgagctttatcataggcgcagttctctttttagtaaagcctatgagccttggaagcggtttggagaatttcttctacggtggtgcattcggatttgtagtttatgggcttcctgctattatcactggtgcaaccgatcagaaatgggttagcaccctaaaggggataaacctaaagatgaagcattccatgttccttgcccttgtatcaatgaccatggcaggggtaataagcatcataggaacaatcataggaaatatcctccacttcgacctgtttataaactcaattctttttggaatagtaattgcatttgcattcaatatccttgtaatatggagcgttacacggattaggctcatcaaatccgttcttgttgcaatcattcagccattgctcatgattggagtattgattatcacaagctttttaaacaacctagaaagcgtctttgagcttggaatatttacaaccttcttcaaggtaataatagcaagtgcagtcttcttgcttgcaatctattcattcatttcaattgtagaatccccaatgaaaaagaacttaggattcggagctttggaaatcctcagtttcttcatttcacatatgaacgaaggttccaagtcaattgaagagcttttcgacaatgctggagaagcaattgacacacttgttggggtctgcagcttcagaaagccagacggagatattaaggcattgttcattagcccttgcgttcacccaggacctcttggagacattggaggttcaaatatgcctacaatccttgcaaacagatttgattcatttgcaatggttgcacatggaccatccacccacgacttcaatcctgtatcaagcgatgagatcgttaaaatcgagtcatcagtgagaaccgcattggaaaatatggaatactcatcaaaggcaagcagattcgtcagatactcccataagaaagcaaacataggcacccaattcttcaataatggatgcgtcatgctatcaacattcgcaccttccggaagcgatgacatcgagtttgcagttggtcttgcaacaatgattgaaagtcagaaggagttggaaatcgacaatccgattcttgttgactgtcataactcattcaatgcagagaagggaggagtgcttccaggaaacccagagctcttccagctattggatacaatcaaattgattgaaaaaaaagacttggagcatgagataaaggtaggatgctattccacagaccttggaggctttggcaagcatgaaggaatcggtgacagcggacttaagacaatggtcattgaggtagacggccaaagaactgcttatgtgcttttcgactccaataacatggaacttggctatagggagaccatattcaatgcagttgaagatcttgagattgatgagatagaggtcatgaccacagacacacattcagtaaacaccttatcagcaggatacaacccagtgggaactgtagaaaaggaaaagatcattgaatatgtgagagaatcaatcattgaggcgattgacgacttggagacagttgaagccggaacaaggacagaaagaatagaaaaccttaagacattcggccctaacaactcaacagagcttatctctacaatcagctcaatcgtatctgtaagtaagatagctgctcctttaatatttattatggcaattatctttgtattcatttggatctacttattttaa

SEQ ID NO: 840 - DNA, 531 bp, Methanobrevibacter ruminantium
  source 1..531: mol_type = genomic DNA
atgatagaattaaaaactccaattacagatgatgacattgataagctgaaggctggagatgttattacaatctctggacagattttaaccgctcgtgaccaggctcataaaagaattctagagcaaggagctcctttagatataaaaggtgctgtactcttccacgcaggccctattattaaggaagaatcagatgacgcccagactaaatatgagatggttgctgtaggtcctaccacttcaatgaggatgaatccatatgaggcagatgtcttggatatgggtgcaaaaattattataggaaagggaggcatggatgatacagttagagaagcccttaaaagaaacaatgcagtctatgtggttgcaactggaggctgtgccgcattgtatgtggataaggtaaaagagattaaaggagtggactggttagatctgggcatgcctgaggccatctgggatttggatgttgaatcattcggtcctttgattgtagcaatggacagtgatggaaacagtctttatgactaa

SEQ ID NO: 841 - DNA, 3978 bp, Methanobrevibacter ruminantium
  source 1..3978: mol_type = genomic DNA
atgagattaagatattttgcaataattagtttaattcttttaatatttttagttccagttagttttgcaagtgaaactaatctggattcaatagaattaaatgatttagctgattcttctactgaaatagatgattctactgatttaaatcaggattatagttctaatcaagatttaagtcttaatcagaattctgattctaatttaagcaatgaacaagaattatattctaataaacttagtgaaaactctctagattcaaattcacaaagttcaaatgatttatcaaactccttatatttgtcttcaaatggagtaaggctagctgatttgaattcaagctttgcccagttcaatacaagccttaacgattcaaatacgatctatgtaaactcatcctatattggttctgatgagtttggaactcaatctaatccatataagacagtattggctggaataaatgctgcaactactgatttaaataatgtctatattgcaaatggggtttataatataaatacaacaataactgttttaaaatccataaatataataggagaaagtcttaatgttatattaaatgcttccaacgaaaacaatatcttatcagttaaaggaagctctgtagaggtctcaatattcaaccttacattcaggaatggctatgcaaataagggaggggcaatatatgtggataaatcttccctaaacattattggaagcctttttgattcaaacattgcatatgtcacaagcgataacggatatggtggggctatctacaataatgcaggctttttaaagctctataacaccacattcaaaaacaataaggtggtagcagcatacaacatagtctctgaaggttttggaggtgcaatctataatgagcttggtgaaatgactgttcttaattctaagttctataataactcaatagacataagaaacatatcaaaatcatcatatggtgctggaggagcaatattcaaccgtgcaggatttgtcacaatattcaactcaagcatcagcaataattcaatctatacaaactactcacttggaggggctatctccatctgggcaagccgcaatgtctatataatcaattccacaataaacgacaacataattagcggaagttacggcttcgcttcagtgatttcaaataagggaaccctccttcagatagaaaactccacaatctcaaacaacaatataaatgcaagctctgtggagaattcaacaatctacaatataaacggcaatttcaatctgataaactctaagatggaaaacaataagataaagacaattaagaccaatctccttatgtgtcttgaggatcagcttattgtaaacagcagcttcaatctggcaaacgagttaaaaggccttaatatgacttccttaccttcccattacgacttaagggaggaaggattggttactgcagtaaagaatcagggaagctctggagcttgctgggcatttgcattctactctgcaatggaatcatatcttttgaaggtggaaaacataagctatgacttctctgaaaacaatatgaaaaactgtatgggagacggcagcgaaaacagtaccgactgggatgacggcggagcatatgtggttgcacttgcttatcttctccgttggagcggagcgataaacgaaacagacgatccattcaatgcccgctctaaagtttcccctaccaatctaactagggtcaaatacctcactgatgcattatacataccattgcgtcttggagcattggacaatgaccaaatcaagactgctatcctaaagtatggtgctatatttgtgccagtatattcaaatatcattaaagcaaattccaaatcaggatattccgatatccaatatatctgcaatcatgcagtggcaattgtaggttgggatgacaactattcagcaagcaactttaaggacactccacctggagacggcgctttcatcataaaaaacagctggggaacaagcgggggagaacagggatactattacatttcctattatgacgcttcatttgcagcttcaatagagacatctgctgcagttgctgtgacaaatgttgtaaatacaacaggtgaatacagaaacaactattactatgacacattcggcaatacatttgaaaccataggatacaattcagatacaatatggtttgcaaatcagtttactgccataagtgacaatcctttaaatgcctttggcctttatacctatggagattccacatatacagtaaacatcactgtaaacaacaagtcagtttacacatctagcggaaagatagtgggagcaggcttccatacaataaagctaagcagatatgttccattaacaaagggagacacattcagaatcatagtaaagcttacaaccccttccactttattcccacttgccgttgagacaaactacagcggatttaccccaagggcaaagtccgactacaaccagtcattcataagcccagacggtaagacatggtatgaccttagaaatagctctaacaacagggctgtaaagttctatgaggatatgtatttctatacattaaagaatgcaagcgtttgccttaaggcatatactgcatttgccgatgaattggaattgaacttatcatcaaacagtcctatttactacacgggagatacaattaaacttaatctcactgtcactaaccgtggggatttggcaagcaattcatctatagcggttcctttagacaagtcttatagcatcgtgtcctataagatatctgaaaacaatgggaataagtcatatgatattcattacaatggttcaagctttaatatggctagtggaatttggtccattccttatttggaaaatgaggagtctgtaagcttaatcttaagtcttaagatgaattcaaataatgatgttaacattaaagtatcagcaaacagctcttcatgcagcgtaaaggacaatgtatatgcaaatatttctctaaaatataagattccaagcaagtttgcaaatattccatccataaatacaactgcaaggtcttatgggctcttaaactttacattgttggatataaacaataagcccctagcaaataagaatgtgaatcttttgctcttaaagttagatgatgaggaagatgaagacttaagcttaaatgatactaatttatattattcagattcaagcatttctaatgcttcggtaatatccaatctgaccttaaaaaccaacggcaatggaattgtacagtacaaattgaatcttacattgggagaatacctattcaagcttgcatttgatgaggacaagaattatcaagcttcagactacaattattccttaaacataacaaagagaaagtcaactaagatcctttgtaaggacatggtaacctattcagtcgttgcagaggtggatggaagaagcggagaatacttcaatgtcacattgacagactgtgacggatacgctatggcagataagtttatccaaattggattcaatggaaggatatataacagaaccactgattccgagggcaaggcaaggctccagataaaccttaagaatccaaatgcttacacatttgcaatctgtttcctaagcgatgatgactattatgcctcatttgaagtggctaagataactgtaaataagaagaaaatgtccttgaatgttccgaataaggcttataaggcctctgaaaagtcaaagattctaacagccacactgatagaaaacaataagaagacagttgcaaacaagttattgacttttacagtcgatggaaagacctattcagctaagactaattcagcaggagtcgcttcagtcaaggtaagcttgtctagcaagaagatttattcattcacagtcaaattcgctggagatgattgttatggttctgctaccaagtctgcgaaggttattataaaatag

SEQ ID NO: 842 - DNA, 6198 bp, Methanobrevibacter ruminantium
  source 1..6198: mol_type = genomic DNA
atgaaattaaaatacttaatgtttattggcttattattaataggtctattaatcatccctataagttttgctggtgatgcagacagttattctgcatattctggtgattctattagtttagaggatgataattcttatttagaatcaaatacagttttaaaggattctaaaaattcattacaatctattgatgatgattgtttgattggaaataggactttagatgatacaagttattctgattcaactaattcagaggatttaacaaatcctgattcaactaatcccgattctactaattcagaagatttaactaatctagaaagttctgcaaatacagactcatcatctgaaatcaaaacaataacaaagagtctaaatgaccaaaatacaaacataaaaagcttaaattatgatgagtacgcagactacatcaatttaaacaatcagcttataaactacgactttgcaatttcagactcaaatacaatattcgtaaatgcatcctatacaggttcaacagagaatggaagtcaagcaagtccatataagtcaatctactctgcctacaattatgcatttggattgtcctctgatacaagaacaaatgtgtatatagctaaaggggtttacacagtaacaagaagaatgaccatcaacaaaaatctaaatctcattggagaggattccttaaatacaataattgattgcaatgggaatggtgcattctttattagtcctcgacggtcttatactacagtatatagcccattgctaaacatattcaatctcacatttacaaatggacgctattccagtggaggggcaatatacattaacgaaagtacagttaactttgtaaatgttatttttaaaaataaccgagcggaagcttcctattatggttcagtagaagggggagccctatataacaataaaggatttgttcgaatctacaactgcttatttgaaaataacactgcaaacgatacttcagatgcatgtggaggcgcaatatataacgatatgggtgagatgacaataatgggctcccaatttataaacaacacagcaaaaggagagaatgctgccggaggagccatttatgatttttcaggaattcttgtaatcttcaactcaacaatctcaaagagttcacttctctccaactattcaatgggaggaggacttgcaagctggtcaagccataacatattcataatcaattccacctttgattcaaatgagggccatggaaaatacgtctttggctctgcaattgcaaataaggcaatcatgatgtatattgaaaattccacattctcaaataaccttgcaaatggaaccagcgataagaatggaacatttttccatttgaatggggtccttgactttgacaatgtgaatttcacaaataaccgtgcaataaatccaaaagaggatatcttgatttgtcttgaagatcaatttatcatatccgaggcatttagccaagaggatatagcagaaatccttagtgaaatggaacttagccagttgccttcatcctatgacctaagggactacaatcttgtcacttcagttaaggaccaaaagaattccgggtcctgctgggccttttccactcttgcagcccttgaatcctatcttttaaaatatgaaaacacatcatatgacctttccgaaaacaatatgaagaatcttattggagcctatggtttgaatggaaccgactggtatgacggtggaaaccactatatgtctcttgcatatctccttcgctggagcggacctgtaaatgagtctcaagatccattcaacgatacaagccataattcaagaacattcacaaatattgtaaagcaggttgaggatgtcttatatgtcccattgcgtttgaattatctagatatcgatcagataaaggcagctatcttaaaatatggcgcattgtatactacattatgttcagatgattcctttgataataatccggattattattgtgatgtcatttcaatttccaaccatgccataaccattgtaggttggaatgacagttattctgcagataattttgctgtaagacctccaggtgacggagcattcattatcaaaaacagttggggtcctagtgaaggctatgatggctattggtacgtctcctattatgacaagacacttgcaggctatggctatgatgcaatcgctgcaatggcatttacttcagttgcaaatgcctccacctataagaacaattatcagtatgacactttaggaaacacctttgagtcaatcggatatggctgcagcactgcatggattgcaaatcagttcactgctttaaacaacaatccattggctgcatttggattatatacctatggaagcagcagctatttagtaaacattacagtaaacggcatttcaagacttgttcaagagggaaatgtcaaaggtgcaggatatcatacaatcaagctggatgatgttgttgaactcctttcaggtgacatattcaagataattgtcaagctaagcactccagattccaattatcctgttgcaatagaatctaaaagaagcgactatagcagtcgtgctaattcaaatcctggagagtccttcataagctttgatgggcaaaactggcaggacctttatgaagtgggagatatccttaagttctatatgtatatgaataataagacttttactgaacctaatatctgcttgaaggcctatactatcggtccatctgatgtgcaccttcatgctagggcaaatgcaaccacttatacacaaggggatactgtagagattaagataaccgtatccaatgaaggagctacagtaaatgacttgaatatcagcatgaagtggaacagttcatttttcttaaagagtttcactaagcttaatggtgaatttgatagcacaaaaaagatatggcattttgacacattctccgaaggccagtcaagcacccttacccttgtatttactatgaggggaaataatgatgtggccagcttgtcatatgactataactattcaggattcaatccaggtgatgccaacactactcaagtattaaatctttattatggaagcctcaccaaatttgtagaagtccctaatgtctcaacttcagtgaaatccggagacgttgttgacattcaattgactgaccttcagtctattggaatttcagataagcaaatcgttatatccttgttagaaagcgacaacgaatatctatttgagaatgtcactttaataacaaatggcagcggtcaggcagggtttgtattggatttattggaaggaaattatgttttcttagcctcatttgcaggagatgactcttatatgtcatctaacgtgacatttaatgtttcagtatcaaaatctaacacttcaattagcttggataatctggacccttccaatataactgtattttcaaaatctggtgatgtaatcaatttcacactctctgatggaatcaataatctttctgataagaatatagttatttcactcattgaaagcgataatgactatctatttgagaatctcaccttaattacaaatggcagcggtcaggcagggtttgtattggatttattggaaggaaattatgtatttttggcttcatttgcagaggatggatattataaggcatctaacttgacattttatctaaatgttttaagaagggcttcatcaatggaatttgattcctctagcctaatttacaatggttcaaattggatcagcttgtcccagtcaaatgatctgatagaatttatcttatctaatcaaaccggtcctttagcagataaaactatcatcttaacagttgaagatttaaattcagttgatttggcagaaaatccattgatttataatctgactactggcccaaatggaattgcatcatttaatttaaatctaactaaatccaattatgaaatcattgcaagctatttgggagatgaatgttactctccttgtgagtttggatttaatttaagtgttttaaaaagaaatgctcctcatatagttgctgacgatatagcaataaactcttccaatccatatcaagctcatctattggatgatgatttcaatcctatagcaaatcagtcccttttatttgctttcgctaaaaaggacagtcaggatttattcaattattctgcaataactaatgaaagaggaattgcaattatcgatctttcagatattgaaagcggagattacaatcttttaattgcttttgaatcaaatgacttatatgatgattctattttggagattgatgtttctgtagtgaatgattctttaaatggcgataatggcactaatgatactggcaatggtactaatggaacagataacagttcaaaaatcaatacattatttaaaatagacatgtctgatttaacagtatctgcaaatgtggataagacaattgaatttgctttattggacgaatcattaaatccattggcggataaaactctcaatttgactatagttgatttggatgaagatactgaattgattacagattctgatggaattgctagttgcgttcttaatttggatgagggagtttatgaatttgtccttagtttcagtggagatgagaattactctccatctcgcttgattttcaatctttcagtttctaaagcagataacggtacaagtcctggtggagataatggtactagccctggtggtgataatgctactaatggcaccgaccctagcggaggcaatggaactgctcctataaatgataatggcactaatggaactgatcctagcggaggcaatggaactagccctggtgataacggaactgaatcatctaaaatcaataccctatttaaaatagacttgtccaatttgaacatctttgcaaatcttgaaaaggtcatcgaatttgaattattggatgaatcacttaatcctctttcaaataagacagttggcttgaccataagcaatttagatggagtcagtctgattacagactctaatggaattgcatcatgccctattaatttggatgagggagtttatgaatttgctctaaaattccttggagatgacgattactcagagtctgcaatgattttcaatctttcagtttcaaaacgcattgcccaattattatccggagagactttaatcaatctttcaagtgagaagagggaatatgatgtttatctagtggatgataaattaagtccattggcaaatgagacaatattgtttgccttaagttcaatggatggccaagtcttgtttaattatgtggtaaagaccaatgatgaaggtaaggccagcttgtcaggcttggctaaacttaatgagagcaattatattgtcaagaccgaatttgcttcaaatgacttctttgaaggcgctgaactaattaagacaataactttaatcaaggatgctccaaatggagatgatgctaatgacaccaatggcacaggaaatcaaactgataatggaacagacaccggaaataaaacagataatggaacagatacaaatggcacaaacggttctgatgttcctgtttcaaggaaagccacaaagatcatatatgaggatatggtgacccaatcagttgttcctgatgtggatggaagaataggagactatttctatgtcacattagtggatggaaacaacaatcctttggcaaacaaggaagttaaaataggatttaacggcagaatctataacagaactaccaatgccactggcggagtgaaattgcagataaaccttaaaatgccattcacttacacctttgcaatctgcttcctaggtgatgatgactataatgcatcatttgaagtggctaagataactgtaaataagaagaaaatgagtcttactgctccaagtaagacctataagtcaactgccaagacaaaagccttgacagctaccttaaaggacaataataataaggcagttgcaaataagaagatcactttcactgtaaatggaaagacatattcagctacaacaaactcaaaaggagtcgcttccgttaatgtgagcttgtccagtaaaaagacctattcatttacagccaaatttgcaggtgatgcttgttatggtgcagttacaaaatctggaaaaataactattaaataa

SEQ ID NO: 843 - DNA, 318 bp, Methanobrevibacter ruminantium
  source 1..318: mol_type = genomic DNA
atggcagatattggcgaagcagcagaaaagaaattaaaatccagaattagaaaattaaaaaaatgcaataaggatgaagaggaaaaggtaaagttcttcaatcaattaggtctttcattcactatcagtttacctactaaaaatcctgaaaagcaagaggacttcataatgctatacaccactcctgaaggacatatagtacatgctgaatacagctattccgaaggagaagagtttgcttccatggatattcctgaaaaggatttgaaggtaatcattgaatcattctctgattatgaattgaaacttttagactaa

SEQ ID NO: 844 - DNA, 1143 bp, Methanobrevibacter ruminantium
  source 1..1143: mol_type = genomic DNA
atgattgtaaacaattcattagatgagcttaagaaaagggaatcagcccttaagattataaggtcaattgtggaaaatgagggcagatcatctttatatgatgtcactggactttcaggtggcttcatatcaagtgaagaggagttggatctccttgaaacctatgtaggtcctgccatctttgaggatgagcttcaagttgttgcaaaggagcatcttggcggtgagaaggcacttgcagtaaacaggacaagttcaggcatccttgcaagtatactgtccttggtgaaggagggagagcatgtaagtcactttttagcccaataccctgcccatccgtcaattcctcgctcatgcaatattgtgggggctgactatgatgaatatatagatctaaatgaatttaaaatagaggacaatacaagtcttgttgttgttacaggctctacaatggaccatcaggtgatagatgaggatacatttaaggaagtaattgatatggctcatgataaggacattccggttttagttgatgatgcttcaggtgcaaggcttaggactgcagtattcaatcaaaagagggcatgtgacttaggggcagaccttgttgtaacaagcacagataaacttatgccaggtcctcgaggtggattgatggctggaaaagaggaattgatcgataaggtaaaggtcaaggcaaaccagtttggccttgaagcacagcctcctctcattttagccatggtaaatggaataaaaaactatagcgaagacaatcttataaatgcaatctctagaaaagacaagttctatgatatggtttcgaaggactatgaaatgtttgaaaaaacaccaactggtgttatggtaactgaagatgctcttaaaaaacaagtggacgctttagatattgaaacagagctatctgaaaaggacctttctttcctatgggctatgattttattgaaggatgaaggaattattacaatacctgctgttgggatgccaggggcatctgctacagttcgatttgacctgtccacccaagatgttattgatatgaatttaggtatcttgcatgataaggtggatgattcatttaacaagttttttagacagttgtcaagatgtggaaaagtctag

SEQ ID NO: 845 - DNA, 912 bp, Methanobrevibacter ruminantium
  source 1..912: mol_type = genomic DNA
atgaaaagagaaatgattaagctcttagttagctatgacataatttccaaagaggaagctgaaaagattgattcaatcaatgatgaagcaattgaagagtcaatcaaggaattaggatttggaaaaactgaacacattacaaaagaaaggatatctgagtttttagaaactgaagaactcggagaagagattctatgtttccgtaaggtattctctacaaacagcatttccaaattcttggcaaaccatggagcaaaggaaggaactgtattgatttccgaaatccaaacaaacgctagaggaagatccggcaagaaatgggaagctccagacggcggagtatggatgagcatgattttaaggccagatgtccctccggcaaagataggattgatcacacttgcaacaggtgttgcaatagctagagctatccgttcatttgacgttgacgctaaaatcaaatggcctaacgatatcttaatccatggaaataagatatctggagtattgactgaagtaattgctacattcaatcaaatcgaatatgttatcgtaggtgttggaatcgacagcaaccttaaattggaagacttctctgaagacataagagaaggaacaaccaccttggaagaggaaatccctgtaaaagtagatgaaaatgaactcattggaatcttcttaaatgaatttgaaaagatttatgacatctacttaaatggagatgttgaagagattcttagcgaatggagagccctttcagacaccataggaaaatatgtaagcattacccaaacagggggcaagacaactcaaggatatgttgttggaatcaataaggaaggaagcttaattattgaaaaacaagacggaaacttagagaaaattatttcaggcgaattaagaactctttaa

SEQ ID NO: 846 - DNA, 1494 bp, Methanobrevibacter ruminantium
  source 1..1494: mol_type = genomic DNA
atgtttgaaaaagtacttattgcaaacaggggagaaattgccatacgtattatgagagcatgccgcgaattggatatgaaaagcgtagcggtctactcagatgcagataaaacttccctttacactaactatgcagatgaaagcgttcctttaggaaacccatctccaagccaatcttatttaaacattgaaaagatcattaatgctgcacttgatacaggagcagatgccattcacccaggatacggattcttggctgaaaatccagagcttggaagacaatgtgagaaaaacggcatcaagctaatcggacctaaaggggagcatattgaaaagatgggagataagatcacttccaaacagcttatgaaagaggctggagtccctgtaattgaaggaacccctgaaggaatcgatgacgttgaagaggctaaggaaatagctgaagcaatcggataccctgtaatcatcaaggcttccgctggaggcggaggtatcggtatgcgtgcagtctatagtgaggaagagcttgtccgtgcacttgaagccacccagtcagttgctcttaaaaactttggagacgctacagtattcattgaaaaataccttgaaaagccaagacacatagaattccagatattggcagacgaatatggaaacaccatccatgtgggagacagggaatgttccatccaaagaagacaccaaaagcttttagaagaagccccttccccaatcatgactgaagaattaagggaaaggatgggtgaaagcgctgtaaaggctgccgaatatatcggatacaacagtgcaggtactgtggaattcctttacgacaatggagactactacttccttgaaatgaacacacgtatccaagtagaacacccaatcactgaaatagtaacaaacactgacttaatcaagcaacagattaaaatagcctgtggagaagagcttgaatacagtcaaagtgatatcacagtaacaggacatgctatcgaatgtcgtatcaatgctgaaaacccacttgcagacttcgctccaaacccaggaaaaatcacaggttacagatcacctggaggacctggagtacgtctggacagtggtgtttatatgaactataccattcctacattctatgactcaatgatttccaaactggttacaagcggaagaacaagaaacgatgcaatcaatagaatgaaaagggcattgagcgaatatattatcttaggcgtaaagaccacaattccattccataaggcaatcatgagaaatgagtcattccttgcaggtgacttgaacacccacttcgttgacgagcataagaaaggaattgaagaggaaatggaaaaggtaattttagaagatttagaaagagtaaatcgtatgaaatctacttttatgcctggtaaaaagatagctgcaatttctgcaacagttggaacttatttcaatgctgcacaagcacagcagatgaaaaagaaataa

SEQ ID NO: 847 - DNA, 120 bp, Methanobrevibacter ruminantium
  source 1..120: mol_type = genomic DNA
atgattagtattaaaatcgttataaacccttcatttgacatggtgaaaagcacattaaaggaaatgattaaattttccttagaattaatgaaaattttcatcatggtattgttcgcttaa

SEQ ID NO: 848 - DNA, 831 bp, Methanobrevibacter ruminantium
  source 1..831: mol_type = genomic DNA
atgatttttaattattcaagtgttattatgaaaattagaaaaaagaaacagcttgagatgatcctgcaaaatgttccatctcatccaaatccaaaagttgagcttgagcagtactcaacaccatcctctattgcatctgatcttatatggaatgcatatacattaggagacattagcgacttaagcgtattggaccttggatgcggcactggcatatttgcaattggctcttggcttatgggtgcaggctattcattaggccttgacattgaccctgaatcaatcgctcttggggaaaaaacaataattgatttaattggcctaaatcaaccgagtgatgtagatgtatttaatattaatttcatagttggagacatcaatcaatataattcaatatccgaactattaaatgataagagtattcaatctgatgaaaaatatgataagttaatagaatattataatagcaattctcttggtgatgattctaatcttaataattccaatgatggtttgatgaatggctcttttgatgagaaagatttcaagtttgccactttattccagaatcctcccttcggttctcaggagagaggaacaagacatgcagatagaaaattcatggaatttgctatggccagtgctgaagtgatatattcatttcatatgaaaagcacagaagagtttgtgattgattattataatgatttaggtggggatataagccataagttcgtctataatttcccccttccaaagatctatgactttcataaaactgagtcaagggatgtaaaagtagttgttttaagggttgaaaactttaaataa

SEQ ID NO: 849 - DNA, 816 bp, Methanobrevibacter ruminantium
  source 1..816: mol_type = genomic DNA
atgcaaaatagtaaagtgtctgtctttataccgaattcatttctcgctgaaaccaaggatttaaagctaaaaacctctaaagtaggtttgattggccgtgccttggctgtatttgaagtggatgaagtggtgatttataaagatctttcaattccagacagcgaacagactgatgatggagatttcattgcagaagtcctcaattatatggacactccacaataccttaggaaaaaggcaattcctatcaaggcagaattgcgtcacgttggaatattgcctcctttgagagttcctcatcatccaactggaaagcctgaattaggtgattacagacaaggattcactgtaaaaaggaataagaaaggtaccttcgtagatataggtatggataaactggcgttttgcaaagagcaacttacagtaaataagattttttcatttaaaattactaagtttgctaaagaggtaatagtcacacctgatgaaccagatgacatttactggggatttaagacattatctacaaataaaagtcttaaaaatagcttaaaattagttaatcccgatcttgttgtagaaacaacaaggtacgcagaaacaatcgattctatttttaatgaattgaaaactaaagtggaaagctctaatcatatagcgattgtctttggaggcccttactcatctataagtgagaatgtcgaaagttccaaatgggaaacagttaaaatcaatacaatcccaaatcagggaacagagactgtcaggaccgaagaggctgttatttcaactttagctattttcaatatactttaa

SEQ ID NO: 850 - DNA, 1011 bp, Methanobrevibacter ruminantium
  source 1..1011: mol_type = genomic DNA
atggtaagacatcaccaaccaagaaaaggttcagtggcatttagccctcgtaagagagttgctaaagagaccccaagaatcaaagcttggccaagtaatgaagaaccaaaacttttgggtcttgctggatataaggctggtatgactcatgctatggttgtggacaatgataaaaactctccatcccatggaatggaagttttcactcctgtaaccgttttggaagtaccaccccttgtaattttggggataagatcatacgaaaaaactgctcacggacttaaggctatcactgaagtaattgcagataatttggatgaagagctctctaggaaaatcacccttcctaaggactacgaccaatccgaagctattgcaaaaatacaagatgctttagaaaagactgaagaggtaagagtcttagtacacactaatcctaaaatggctagcgttcctaagaagaaacctgaaatctttgaatgtgcattaggcggaagctctgcagaagaaaaattaaactacgctcttggaattttaggtcaagaaatcagagccagtgatatctttagcgaaggacagtatgtagacgcaattgcaaccaccaaaggaaaaggagtccaaggggttgtaaagagatggaacatcagaattcaatatggtaaggcaatgagaagtggaaaaggtagacacgtaggttctatcggtccatggtctccggaaagaaccatgtggactgttgcacaagcaggtcagatgggataccataagagaactgaattcaataagaaagtcattaagattggagacgtatctgaagttgatgctgttaaccctgctggaggattcattagatatggtttagtcaaaaacgactatgtccttgtaaaaggctccgtaccaggtccaaccaaaaggttagttattctcagacaagctatcagacctaagaaagctgacgatgcagctcctcaagtgaactacataagcactgcttcaaaacaaggtgtatag

SEQ ID NO: 851 - DNA, 765 bp, Methanobrevibacter ruminantium
  source 1..765: mol_type = genomic DNA
atgaaagttaatgtttattcaattcaaggggaagtaaaagaggaaatcgaacttcctgctatttttaatgaagaatacagacctgaccttatcaaaagggctgtcctttctgctcaatctgcaagaatccaaccatggggtaatgaccctatggcaggtaaaagaacctcagcagaatcctggggttccggtagaggcgcagctatggtgcctaggataaaaaccggcgctagagcagcattcgtacctcaagctatcggcggaagaaaggcacaccctgtaagagctgctaagaatcatcatgaaaaaatcaacaataaggaaagaagatttgcaatcagatctgctgttgcagctaccgtaaatgaagaattggttgctggaagaggtcacagaatcgaaaatctcgaacaagtacctgtaattgttgaagatgatttggaaactgtcaagaaaacaagcgaaacccgtgaaatcttcaaggctttaggggtttacgatgatgtaatcaaggctaaagacagcaaaaagataagagcaggcagaggaaagacaagaggacgtaaatacaaatccggtaaaggacctttagttgttgtatctgaagacaaaggcattggattaggtgcaagaaaccacgctggtgtcgatgttgttgctgtagacaacttaaatgctgaattattagctccaggtactcatgcgggtaggttaaccatttacactaagtccgctgttgaaaaattaggaggattattccaataa

SEQ ID NO: 852 - DNA, 261 bp, Methanobrevibacter ruminantium
  source 1..261: mol_type = genomic DNA
atggatccttatacaattattgttaaacctcatgtaactgagaagactatgaacttaatcgatcaaaacaacgagctaaccttcgttgtaagaagaaccgctacaaaatctcaaatcaaaagggcattcgaattcctttacgatgaaaaggttgtaagagtaaacactcacataacctctaaaggattgaagttagcctatgtcaagcttgctgaagaaggcgaagctgaagatgtagcagttaaaatgggagtattctaa

SEQ ID NO: 853 - DNA, 726 bp, Methanobrevibacter ruminantium
  source 1..726: mol_type = genomic DNA
atgggaaaacgattaatacaccaacgtagaggaagaggaactcctgctcatcgtgtagcatctcacagattcaaggataaaatccaatacagggcttacgatgacttagagaaggaaggaagcttaaaaggaaaagtcgttaaaatcattcacgaccctgcaaggaccgcccctattgctcttgtcaaattcgaaaacggtgaaaagagacatattttagctcctgaatcaattcaaattgatgatgaaatcgaatgcggtatctcagctccaatcagctttggaaacactttgccacttgctgaaatccctgaaggtactcctatctacaatattgaaaacagaccaggagacggaggacgtttcgtaagatcctctggaacttacgcttctttaattactcatgatgcaagtcaagctgttgtggaattaccatctggtgaactcaaatccttcaacccaagatgccgtgcaagtatcggtgttgtagctggtggaggaagaaaagagaaacctttcctcaaggcaggtgtcagatggcatgcttataaggctaaaggtaagaagtttatgactgttagaggagtagcaatgaacgctgtagaccaccctcacggtggaggtaacagacaacacccaggtcgtccgaccactatctcaagacacgcaccacctggaagaaaagttggttcaattgcagctaaacgtactggaaagagaagataa

SEQ ID NO: 854 - DNA, 411 bp, Methanobrevibacter ruminantium
  source 1..411: mol_type = genomic DNA
ttggctagaaaaatatttaaatacagaggatatactattgaagaattaaaagaaatgtccttagacgaatttattgaacttttaccagcaagacaaagaagatccttaaaaagaggattcttacctagacaacagtctgtgttggataaaatgagaaagatgcaaaagatggataagaaaggtggaaaaccgctagtagttagaactcactgcagagacatgatcgtaattcctgaaatggtaggaaccactttcggaatctacaacggcagagactttgtggaagtaaccttcacccctgaaatgctaggctgcttctttggtgaattcgcaccaaccagagctagagttcaacacggtgacccaggtatgggtgctaccagatcatctatgtttgtgccacttaaataa

SEQ ID NO: 855 - DNA, 468 bp, Methanobrevibacter ruminantium
  source 1..468: mol_type = genomic DNA
atggcaaaaaacaaatacgcttataacaatcctgatgctgacgaatctaagacagcacgtgctatggcaaaatccattaaggtttctccaaagcattgcgttgaaatctgcagtgcaataagaggcatggatgttgcaaaggcaaaagcatacttaaatgatgttattgatatgaaaaaggctgttcctttcaaaagacacaacagagatgtaggtcacagaaaaggaatgaaaggctgggctgctggaagataccctgtaaaggcttccaaagcaatcttaactgttatagaaaacgcagaagcaaatgctgaatacaaaggtatggatgtagaaaacctcaagattgagcatatctcttcccacagaggaatggtaataagaggagctagaccaagagcattcggtagagtcactccattcaacactccaaccacccatattcaagtagttttagtggaggcttaa

SEQ ID NO: 856 - DNA, 756 bp, Methanobrevibacter ruminantium
  source 1..756: mol_type = genomic DNA
atgatagaaaaagatttcgttacagaaggtctcagaagaaccagaatagatgaatatttagaaaaagaacttgaaagagcaggttacggtggaatggaaatccaagtaactcctttaggaaccatggtaattgtctatgcagaaagacctggtatggtaatcggtagaggtggaaagaccgtaagggcaatcacccaaagccttaagaccaagtttgaccttgacaacccacaggttgaagttaaggaagttgctgttcctgaactcaacgcaagaatcatggcttccaagattgccaacatgctccaaagaggaatgcactttagaagagtggcttattccacaatccgtaaaatcatgggcgctggagctcaaggagtggaagtaaccatttccggtaagatcagaggatcaagatctgctgttgcaaaattcaccgagggatacatcaagaaatgtggtgaacctgcaaccagattcgtaactgaaggttttgctaccgcacctttaaaacctggtgttttaggtattgtagttagaatcatgcctcctgaagcaaccttacctgataaggtggatatcattgctcctgttgaagtagaggaacctgttgtagaagcagctgaagaagatgtcgaagagatcgaagaggaagtcactgaagagattgaagaagtcgaagaggacttagaagagcttgaagaagagcttgaagatctcgaagagcttgaagctgctgaagaagatgtcgaataa

SEQ ID NO: 857 - DNA, 207 bp, Methanobrevibacter ruminantium
  source 1..207: mol_type = genomic DNA
atggcaattttaagaagtaaagaaatttgggaaatggaaattgaggacatcgaagaaaaattggtggaactcaaagcggaactcgctaaaaacgtttctaaaagtgctgctgcaggtgttaatgaaaaccctggtaaaattagagaactcaaaaggactattgctcgtgttcttacaattatgaaccaaaaacagaaggagaattaa

SEQ ID NO: 858 - DNA, 345 bp, Methanobrevibacter ruminantium
  source 1..345: mol_type = genomic DNA
atgtcaaaaatctgtgatgtatgtggacttcctgaagagctttgcgtatgcgaagaaatcgcaagggaagtacaatctgtaaaagtttttacagtaagaagaagattcggtaaacttatgactattgtcgaaggaatagatgaacatgatatagatattaaggagcttactaaaactcttaaagccaaatgtgcctgcggaggcactgccaagaagggtcaaattgaacttcaaggagatcataaggcaagagttaaggaagtcttatctgaaatgggattctcttctgacactattgaaatcagagactctgataagaaatacaataagaggagaagacactag

SEQ ID NO: 859 - DNA, 336 bp, Methanobrevibacter ruminantium
  source 1..336: mol_type = genomic DNA
atgataagctcaaataatatattctatcatgaattaattgggttagagcttaaagttgttgacagttccaatccctctttgatagggctttgcggaactgttattgatgagactaaaaagactctcttgattgaggttgaagaaaaagtcttaagtgatgacttaggttctaatcaacaaaatcattttaatttaatttataaggaaaaattaattcagaaagatgtttctgtatttcaattcaaggttccagatggaaccatagttgaaattgatggtaaaatattattgaatcgtcctgaagataggataaagaaaagatataaaaaaatttaa

SEQ ID NO: 860 - DNA, 321 bp, Methanobrevibacter ruminantium
  source 1..321: mol_type = genomic DNA
atggttggtcttaatgttaaggaaccagaaactaaatgtgatgatcctaactgccctttccatggtaatttatctgttagaggacaagtccttgaaggtgttgttactactaataaagcagaaaggactattactgtagaacgtagtttctacaagttcattagaaaatatgaaagatacgaaaaaaggaaatcaagaattaacgttcacaaacctgattgtattgatgttgaagttggcgacgctgtaaaaatcgcagaatgtaggcctttaagcaagactaaacactttgtattagttgaagtaaagggtgatgattag

SEQ ID NO: 861 - DNA, 399 bp, Methanobrevibacter ruminantium
  source 1..399: mol_type = genomic DNA
atgaaacctactacctcaagcgtaactaaggctttgccaataggcgcaagacttcaatgtgttgataacaccggtgcccgtgaaatcgaaattatttccgtaaagggattcaaaggtgttagaaggagacttgacgtagctggagtaggcgacatggttgttgcttcagttaagaaaggaaccgctgacatgagaagagaagtcgtcaacgccgttgttgtaagacagaaaaaagaatacagacgtgctgatggtcttcgtgtaaaattcgaagacaatgctgcagttatcattactcctgaaggagtattgaaaggttctgaaatcagaggacctgttgctaaagaggcagctgacaaatggcctagcgtaggcagtgcagcaagcatattgatttaa

SEQ ID NO: 862 - DNA, 342 bp, Methanobrevibacter ruminantium
  source 1..342: mol_type = genomic DNA
atgtcaattcaaccaagaaaacaaagaaaagctctctacactgctcctttacacattcgccgtaaaatcatgagcgctaacttaagtaaagaattaagagcagatattggcaaaagatcattgccaatcaaagtaggagacaaagttcaagttgttcgcggagactttaaaggtcacgaaggaaaagttgaatctatcgacgctaaaagatacaaagttaccgttgaaggcgttacattaaacaagcctgatggaaacgctgtatttcttccaatccatccgtccaacttgatgattattgaagctgatttaaaagacgaaagaagaattaaggaggaataa

SEQ ID NO: 863 - DNA, 735 bp, Methanobrevibacter ruminantium
  source 1..735: mol_type = genomic DNA
atggcaaaaatgggatctagaaagcatcttaaaagatacaacgcacctaaaacctggcctatccatccaaaagaagatacttggacagtaaaacctgctcccggtactcacgcaatcaatgactcattgcctttgcttgtaatcatccgtgatatcttaggtattgcagataactcaagggaagctaaaaggctcatcaacactggtaatgtattgattgacggaagagctaaaaaagattacaaattcccagtaggattcatggacatattatccattcctaagactggtgaaaattacagaatacttttagatactaaaggaagattaactttacaccctatctctgctgaagacgcagagttcaaattagctaaaatcgtaaacaaatctaccatcaaaggcggaaaaactcaattaaaccttcacgacggtagaaatgtaattgtggaagaagacaactactctgcatacgatgttgtatgtctcaacattccagaacaagagattaaggaaaacttcgaatttggcgaagacgtagttgtacttgttaccggtggtaaacacactggagagcttggtaaaatccaagaggtcattgtagaccaatcctctaaagcaaataccgtaattatcgaaaaggctaataaggacactttcttaactttaaaagattatgcatttgtaattggtaaggatgaacctgccattgacttattggaggttaatcaatga

SEQ ID NO: 864 - DNA, 522 bp, Methanobrevibacter ruminantium
  source 1..522: mol_type = genomic DNA
atgaacccaatgaacgaagtcgtcatagcaaaggcaaccatcaatatcggtgttggagaagctggtgaaaaattatccagagctatgacccttattgaaaacatgactggtcaaacccctgtaaagacctattccaaagtcactaaccctgaatggggtataagaaaaagacagcctattgcatgtaaggtcaccctccgtggggaaaaggctgaagatgcaatcaaaatggtattggatggtatcaacaacagattaagaccaagtcaatttgatgcacaaggtaacgtttctttcggtattagagaacatatcgacattcctggaatgagatatgaccctgatattggtatttttggtatgaacctttcaatcacttttgaaaaacctggttacagaatcaaaagaagaaaaatccaaaagaaatccattccaaaaagacacagaatcactcctgaagaaactatgaaatttatggaagagaactttaatgtaactatcgctgaggaagaagaatactaa

SEQ ID NO: 865 - DNA, 153 bp, Methanobrevibacter ruminantium
  source 1..153: mol_type = genomic DNA
gtgattgttttgccaagaaaatacggaaaagcatccaaaaaatgtagccgttgtggagaccactctgctatcgtaagcagatacggactcaacttatgcaggcaatgttttagagaaattgctcctaaaataggatttaaaaaatacaattag

SEQ ID NO: 866 - DNA, 393 bp, Methanobrevibacter ruminantium
  source 1..393: mol_type = genomic DNA
atgactcttatggatcctcttgcagatgccttaacaaacatcagaaataacgaacgtcaagtaaatgaccactgtactatttctccagcgtccaaattgatcggacgtgtgttaagcacaatgcaaaaagagaattatattggcgaatttgaatttatcgatgataacaaggctggaaaattcgaagtggaattggaaggtaacattaatcagtgcggtgtaatcaaacctcgtcatgctgtaaagaaagatgaatttgagaaattcgaaaaaagatatttaccagcaaagaacttcggtatcttaatcgtaaccactcctgaaggtatcatgacccacagggaagctaaggaaagaggtatcggcggacgtttgttggcttacatgtattag

SEQ ID NO: 867 - DNA, 534 bp, Methanobrevibacter ruminantium
  source 1..534: mol_type = genomic DNA
atggtattagctgcagctataagggaagaaattgaaatccctgaaggcgttgaagttataattgatgatgaaatttctatgaaaggcccaaacggcgaaatttctagaaaattcacttaccctaatgtgactattaagaaagaagacgatatccttgttcttgaaaccgctttcccaaaaaagaaagacaaatcaatgatcggaactaccagagcacatttaaacaatatgattaaaggagtaaccgaaggtttcacctatcatatgaaaatcgtatacgctcactttccaatgaccgtaaaggtcgaaggagataaggtaaccattgacaacttcattggggaaagacatcctagatcttcaaagattgtaggaggagcaaatgttcaagtaaaaggtgatgaagtaatcattaccggtgtaaacaaagaagacgtcggtcaaactatggctaatttagaacaagccactaaaatcagaggcaaagaccctagagtattccaagacggtatctacttaaccagcagggaataa

SEQ ID NO: 868 - DNA, 345 bp, Methanobrevibacter ruminantium
  source 1..345: mol_type = genomic DNA
atggtgattttgatgagtaaagattttaaaagacaggaatatgctcgttataaaaaattaggaaccaaatggagacgtcctagaggtaaaactagtaaaatgagaagatacgaagcaggtaaacctgcaatgccatcaattggttatcgtactcctagagctactagaggattacatccttctggttacaaagatgttcttgtttataacatgaaagatttagaagctcttgacgcagaaactgaagctgctagaatcagcgcttctattggtaaacgtaaaaaagcattgatgttagaaaaagcatcagaattaggtataaaagtattaaacagacaattataa

SEQ ID NO: 869 - DNA, 447 bp, Methanobrevibacter ruminantium
  source 1..447: mol_type = genomic DNA
atgaatcttactacacaaagaagattagctgctagtatacttaaagttggagtaaaccgtgtatggatagatccagaagaagtagaagaagtttctagagctattacaagagacggtgtcaaacaacttatagatcaaggtattatcaaagctagaccaaaaactggtattagtagctacagatctaaaaaacttaaagagcaaaagaagaaaggaaaacgaaaaggaagaggtagtgtaaaaggagcaaagaacgctcgtacacctaaaaaacaagtttggatgaaaaccatccgtgctttaagaagcgatcttaaagaaatgagagacactggtgaaatcgatcctactacctaccgcaaattatacaagatggctaaaggtggagctttcagaagtaaatcttacatgaaaacttacgctagagaccatgacttaatcaaatag

SEQ ID NO: 870 - DNA, 582 bp, Methanobrevibacter ruminantium
  source 1..582: mol_type = genomic DNA
atggcaagcggatcaaattataaagtggctttcagaagaagaagagaaggaaaaactgactttgctgctagagctaaattagtggatgtagacaaggcaagattagttgtaagaatttccaatgctaattgtattgttcaagtaatcaatgtaggcctaaccggcgatgagactgtcgtatctgcacacagtaaggaattaaacaagttaggctggaaaggcggaaacaaaaacaccagcgctgtatacttaaccgcatacttatgtggtaagaaggctcttgcagctggagttgaatacgctattgcagacattggtttaaaatcccctattaaaggagctaaagtatttgcagctgtaaaaggtgctgctgatgcaggattagatgttccttatggcgaatctatcattcctagtgaagatagaatcaatggtgagcacattgcagcatatgcagaaagcttagatgaagatgaacttaataaaaaattctctcaatatttagcaagaggtcttcaacctactgatttacctcaacactttgaagagattaaaaataaaattgatgaggctgaagtatga

SEQ ID NO: 871 - DNA, 642 bp, Methanobrevibacter ruminantium
  source 1..642: mol_type = genomic DNA
atgagctttaatatggatgattgggaacctaaaaccaatttaggtaaggaagtaaaagcaggtaacattaccgatattgatgaaatctttgaaaaaggtctccctataatggaacttgaaatcattgacgcattgctccctgacttggaagaggaagtaatggacgtaaacttagttcaaagaatgcacaaatctggtagaaaagtaaactttagagtaatcgttgctgtcggtaacagaaacggttacgtaggtttaggacaaggtaaagctagagaagtaggtccagctatcagaaaagcagtggataacgctaaatacaatgtaatcaaagtaagaagaggctgtggagactggggttgtgtctgcggaagacaacacacagttccattcaaggtaaccggtaaggcaagcagtgtaaaggtaaccttaagacctgctcctgcaggtgtaggacttgctatcggtgatgtaggtaaaaccattctcagccttgcaggatataaggacgtatggtcccaagcaagcggccaaacccaaaccactgtaaactttgctaacgctgtattcaatgctttaaaagaatcctgtaagatgaaagcttcagaacaagaccttaaaaatatgggagtaatccaataa

SEQ ID NO: 872 - DNA, 459 bp, Methanobrevibacter ruminantium
  source 1..459: mol_type = genomic DNA
atgtatttagttattagagtaagaggtactactggtgttattcaaggcattgcaagtaccttagaaatgttaagacttaacagaatcaatcacgctgtattagttgaggaaaacccaagctacaaaggtatgcttcaaaaggcaaaggactatatcacttggggagaaatcgatgctgaaactctcactgaaatcattgaaaagagaggaagattagttggcggtgctcgtatcagcgaagaatacttagctgaaaacaccgattattccagcttcgaagaattggctaatgcattacttaacggtgaacttaaagctcaagatattaatatgaaacctgtattccgtttacatcctccaagaaaaggatatgaaggaatcagacattctatcaaagaaggcggatccttaggttacagaggagaagatattaatagtcttgcaaagagaatggcttaa

SEQ ID NO: 873 - DNA, 444 bp, Methanobrevibacter ruminantium
  source 1..444: mol_type = genomic DNA
atgattagaaaaggcaaaaaaatcaacaagatgagaggttccagatctaacggtggaggctctgtcaaaagaagaagaggagcaggtaacaaaggtggtaaaggtaaggctggagctggaaagcaccactggtccaccactgtaatcgaaaacagatattactttggtaaacacggtttcaaaagacctcaaaagaccatccacagatcctatcctgtaaacttaaacttcttgaatgataaggctgaagagttcttggaaaaaggaatagcaactaaagacgaagacgatgtaattgtcattgatgtaaccgacttaggctacaacaaagttttagctactggctctcttgacattcctttagttgtaaagtctcctgcattctccgaagcagctatcgaaaaaatcgaagaagctggtggagaagcagttgaattattctag

SEQ ID NO: 874 - DNA, 1371 bp, Methanobrevibacter ruminantium
  source 1..1371: mol_type = genomic DNA
atgtttttagaaaattttaaaccaatatttcagttgcttcctgaggtaaagactcctattcataggcaggactttagggaaaagcttaaatggacagctatagttttagttttatattattttttaactcttattccattatatgggttgagtccagctgcagttgaccaatttgcacaattaagagctgttatggcaggtagtttcgggtcaattcttacattagggattggtcctattgtaacagcgtcaattgtattgcaattattagtcggtgcaaagatattggatttggacttgaccttacacgaacataaggctatgtttcaaagtactcaaaaattattagctattattttcactatatttgaagcaggagttcttgtattcacaggaagtctggttgctatcgacccatctttctatccaatcatgctcttgcagcttgttattggagctattatgatcttatatttggatgaagtagtatccaaatggggattcggtagtggtgtaggtttattcattgctgctggtgtagcagaaacaattattgtaggtacatttaacttcttgccagcttccgctgcctcaacaactgcttcaggtattcttcctgcatttattcaatcaataattggtggagcacctaatttccaaatcttgattccattgattgctaccattgtagtgttcttgatagcagtatatggtgaaagtatgagaatcgagattcctatttcccacggcagagtaaaaggacacggtagaatcagaggggctgtaggtaaatatcctttgaaattcatctatgcaagtaacatgccggttattttaaccagtgcgcttcttgtaaacgtatcccttattgcaagtctcttccagaaattaggattccctatatttggagaagtttcaggtggaagggctatcagcggacttgctttatggcttaccacccctaacagcataagcgtattgtttaccaatcctttaagggttttattctacgcaattgtatttttaggctgttgtgtactcttctcatggctatgggttgaaatcagtggttccttaagtgctaaggaagttgcaaagcaactctataactctggtatacagattccaggttttagaagtagtaaaagacaactttatacaatcatgaaaaaatatattccagctcttacaatccttggtggtttattcgtaggtattttggcatttattgcagaccttaccggagctttaggcggaggtacaggtgtattgcttactgtaggtattgtatacaagctctacgaagagatcgctcaagaacaacttatggaaatgcatccaatgttaagaaaattcttaggaaacgattag

SEQ ID NO: 875 - DNA, 558 bp, Methanobrevibacter ruminantium
  source 1..558: mol_type = genomic DNA
atgaaattagtagttttaacaggtattccaggttctggaagtactactgtacttaaaaaagctttagaagaagtagattatcttcatttaaactatggagatataatgactgaaattgctgttgaaaaaggtcttgttgagactagagacgagttaagaaaattgcctgcagacactcaaaaagagattcaaaaggcagcaggaattagaattaaagaaaagtctgaaagtgaaaatgtaattgtagacactcactgtaccataagcactccatctggtttcttacctggacttcctaaatgggtattggaaggtttaaatccagatcattttgttttaatcgaagcatatcctgatgaaatcagggttagaagaacaaatgatgacactagacaaagagatgctgaatcagctgaagctattcaattgcatcaagaaatgaacagagcagcttcaatggcttatgccactttaactggagcaactgtgaaaatagtttataatcatgacaatgagctagatgacactgtcgctggcttagttgaatttttaaaataa

SEQ ID NO: 876 - DNA, 609 bp, Methanobrevibacter ruminantium
  source 1..609: mol_type = genomic DNA
atggcgtatcaaggtagttttcttttaggtatttcctggcttcagccagtattcgatgcaatgaatgctgtccttaatcctttagttcaattggatccaactccaaataatcctgtacttactgtatttgtgatatctgctttaatatcccttttgacagttactgcacagaaattattagtggaccaagacaagatgaatgagatgcaagcaaattcaaaggctttgcagaaagaattaagagaagctcaaaaaagtggagatgctaaacaaatagcaaaagttcaagcaaaacaaacggatatgatgcaagaccagagcgaagttatgaaaatgtcattcagaccaatgattgtaactatggttcctatcttattaatattcgattggatgtggcaatccgctatacgttcacttattgttgtattccctccagctgtttattattgtactttaactccaattttccactctctaggacaaatgctttacggcggtaacataactaccattccatttggtgtaggttggttatggtggtatttcatttgtacttttggaatgagtcaaatcattaggaaatttatgggattcaagaacggtttctag

SEQ ID NO: 877 - DNA, 267 bp, Methanobrevibacter ruminantium
  source 1..267: mol_type = genomic DNA
atgcctgcaaatagatttagatcaagatcatataaaagaacaaatacaaagactcctggtggagttaatgttttaagatataaaaagaaaaaaccatctaagcatgtatgtgctgaatgtggtgctgtattacatggtgtaccaagaggacgtccttttgaggtcaacaaattagcaaaatctaaaaagagacctaaccgtccatttggtggaaacttatgtcctgaatgtactcgtaaacatttcaaacaagaggcaagaaaataa

SEQ ID NO: 878 - DNA, 519 bp, Methanobrevibacter ruminantium
  source 1..519: mol_type = genomic DNA
atgataattacaatcggtggcgtagctggcagtggaaccacaacagctgcaaaggtattatctgagaaattaggggttccgtatatttcagctggagctatctttagagagatggctgaagagcatgggatgactcctgtggaatttggcaaatttgctgaaaataatactgacatcgataaagagattgataatagacaagctaaacttgcagaggaagctgatgatcttattattgaaggaagattgtctgcatactttattgatgcggatttaaaggtttgcttcaccgctccattagacgttagagctaaaagagtatgtgaaagggaaaacaagtcagttgagactgctcgtttggaaataatcgctcgggaagaaagcgaagctataagatatagggatattcataatattgacataaagaacatggatatttatgatttgataatcaataccaatagcttcgatccggagagcatttcagaaattattataacaacattaaaggtgatatga

SEQ ID NO: 879 - DNA, 168 bp, Methanobrevibacter ruminantium
  source 1..168: mol_type = genomic DNA
atggcagctatagaagttggtagaaaatgtattaagactgctggtagagaagcaggtaaagaatgtgaaattgttgcaattattgatgaaaacttcgtagaagtaaaaggagacgaagttaaaaacagacgttgtaacattaaccacttagaacctattatggaataa

SEQ ID NO: 880 - DNA, 2514 bp, Methanobrevibacter ruminantium
  source 1..2514: mol_type = genomic DNA
atgattttggtgtttaagatgggcatatttgataaggtcaagtcagcttttgaatctagtaaaaactttaaatatttagatgatttaattcatagcgggctgaatgagattgttttggatgatgatatcagcttaagtaaaaatgaaaaaaacaagtattctaacggcattgaaatagaaattgataatctggttattgatggaaatggccatgcaatagatgcccaaggaaatggttctatctttttatgcactggtaaaaatatcgtagtaaagaatattcattttaaaaatggaatccattccaatggaggtgcaatagaaaatcgtggggaattaactataatggattccacatttgatggaaataatgcatcccttggaggggcagtttttaacgacggccctaaactaatgatagctaaatccacaatcactggaaacatagccaaagagggcggcggagcaatatataataatgatggcgaggtttatatttcagaatccatgattaacgaaaatgtctctagttttcatcagtattctggcggagcaatttataataagggcgagttgactattgaaaaatcaacactcattagaaaccatgcaagttttggcggagcaataggaaatattggtcagttaaacataatcgattccacaattagcaataatgaatccagtggtgatggcggtgcaatttttaatgataatgctagcttatcaatatccaattcaatgattgaagctaatgtctcagatggattggaaggcggaggggcgatatataataaggaaggcgagcttaacattactggatctgtccttaaacaaaacgaattggtcggccaaataggaaaagggggagctatatataataatggaggcaatctcaatattgcaggttcatcactttgcaatcattccataaacttttttgggggagcgatatataatgatggaggcaagattaatattgcagaatccaaattcaatgaaaattcctctaacaggaatggcggggcaatatataatgaaggtgaagtcaatattagaaagtcatccattaagaaaaacaagtctgatggcggagtaatagagaatataaatggagattttaagatatttaattgcgaatttttctcaaacgaatctcaaggaaatataatattcaatcaagattcattagaaattaattacactgattttaaggataatcgatcaaaatctatgctgcttaatgatggagtcaaatccaaaatgagccttgttaaaggagagattaatggtaatgatgttaaagatacattaatcctcaatgaaggaaattctttaaccatatctgaaactgtttttgaaaataatttgattcctaatggggatgccatagttaattcaagtaatttgatattgacaaatccaaagataaatgatgataatcaggaaataagaaatcaagggaatcttcttttaaaaaggtcatctctagatattaaaggcaaaatcaatggggaaggaaaaattgaaacagatgaccattccaatgaagataaatttgattttggatatcttgacagcctaattcatggaagtcccgataaggaaattgtgctggataaagatataaaacttgaaaattatgaagttgatttttatgaagggggcatagaactggatttcgatgatttgattataaatggaaatggcaaaactattgatgctagaggaaaatcccgtattttcacaataagtggaaaaaacatcactctaaagcacattacttttaaaaatggacactcttataaaaattacgacaaccctttaaataataatggaggggcaataagaattaatgccaatgcaaatctcacaataaccgattgtaaatttttagataatctctcagaggattatggtggagttatatattataatggctctggagacttagttctcactgcatcaacaatgaaaggcaatactgcagaaaatgatggcggtgccatattcagtagcggagaggtgaaaataaataaatctaaatttatcaacaatagcggaaataatggcggtgctattgcaattgtaaatagtaatgataaagcatctgtcactgaatctatttttaatgaaaacgccgcagattcgaaaggaggagcaatctggttccataattcaaatattgcattggcagattgcactttcaatgataactatgctacttgtggagcggcaatttaccaagaaataagcaagggaagcataagcaattccacttttaagaggaatttatcatcttatgcatattggcatgatggaaaattagttactaataaaaatcatgctatcttcattgatacaggttctggattaaatgacttcaatcaagatagagacaatatcatcaactgtgattttatagataataataataatctttatgctcagaaacatgatttaattaaatctagacttgatgagcacttggctctatggaaacgcaatttataa

SEQ ID NO: 881 - DNA, 834 bp, Methanobrevibacter ruminantium
  source 1..834: mol_type = genomic DNA
atgttagaagttagaaacattaaatattcatataataaggattatcaagcacttaagggagttagcctaaaggtcgaagaaggacaaatggttgctcttttaggaaaaaacggtgcgggaaagtctaccttgttccttcatttaaacggcatatacgaacctgatgagggacaggtcttcatcaaaggggaagagctaaagtatgacaagaaatcattgcttaaattcagacagaaggtaggaatcgtattccaaaaccctgatgaccaaatctttgcaccgactgtagaagaggacgttgcattcggaccgctaaaccttaagcttcctatggaagaggttcaaaaaagagtgacagaggcattggcaagggttggaatgagcggatatgaaaagacagctcctcaccacctaagcggaggtcagaagaaaagggttgcaattgcaggaatccttgcaatgaaaccagagataatggttctggatgagcctacagcagggctagaccctcaaggggttacagcattaagcaatctattgaaggaacttaatgatgaaggaatcactgtaataatctcaactcacgaggtaaaccttgtacctacctatgcagaaaaggtctttgtattggttgatggggaattagttgcagaaggaactccaaaagaaatatttgcacagcctgaaattcttgaacaggcaaatcttgaagttccgattgttacagagctattccaagaactagaaaaagaaggatatgatatgaatgatgactatcctttaaccattgacgaggcaaaggaaaagttcttagaattattaaataaaaattaa

SEQ ID NO: 882 - DNA, 693 bp, Methanobrevibacter ruminantium
  source 1..693: mol_type = genomic DNA
atgaaatttgatatggattatattgctcatcacaatgaacttagcgaagcaaatccttattataaattatttataaccataattctactgattgttacattggcattggacaacctgtactttgacattttcatgttcatactattctccatcataattcttggagttgcaaagataaacatccgctcttacataaaattcctgaccattccgatggcattccttataataacatgtctatttctgatattcttcttcggaagcggaaaggtcatctaccaaacaggattctttggaatcgtagtcaccgacgactcatggcattacggtctctacacattcttcagagtgttagggtgttttcctatcctaggattcctagcccttacaacacctattgcaaagatcttccactgtttggaaacacttaaggttcctaaaatagtgattgagatagggcttttgatgtacaatacaatcttcatattcctaaatgagattgatgtgatgcagaaggcacagaagacaagattagggtataattcctattggaattcattgcagtgcttaggatcgcttgtaagcaatatatttttaagatcattggaaaaaagcgaaacattgcaaaacagtttagattcaagaggctacgacggagagcttccggtttatataccgccaaaggaggaataa

SEQ ID NO: 883 - DNA, 288 bp, Methanobrevibacter ruminantium
  source 1..288: mol_type = genomic DNA
atggaaagaacaacattaattattttagcagtcatttgtgctataatcttcatagcaccattagttatgtacagcggtcttggtgaagatgatggatacttcggcggagcagacgatgcagctggcgaagctattgaagaatctggttttaaaccatggttctcatcaatatgggaaccacctagtggtgaaatagaaagtttattattcgctcttcaagcagctataggtgcaatcattattggttacttcttcggctactggagaggacaaggtaaagaagaatag

SEQ ID NO: 884 - DNA, 666 bp, Methanobrevibacter ruminantium
  source 1..666: mol_type = genomic DNA
atgcacattatggaaggatatttacctttgacatggtgtatcatatggttcgtcgtatcattcatcgttgtcgcttacggtatctatcaaataaaacaaattgtagatgaaacacctgactccaaggcattactcgctgtcagtggagcattcatgttcatcttatcatctttaaaactcccttccgttactggaagctgttctcacccttgtggtaacggattaggtgcagcattattcggccctgctgtaactgctgtacttgcaactatcgtactcttgttccaagcaatcttacttgctcacggcggattaaccactttaggtgcaaacattttctcaatgggtattataggcccattcgttgcttggctcgtatacaaagcttgcatcaaagctaatatttcatcaaccattgcaattttctttgcagcattcttaggtgacttattaacttatgtggctacttcattccaattagctttcgcattccctgctccttcttttggcagcgcattaacaaaattcttagttatctttgcagtaactcaagtaccattagctattggtgaaggtatcttaaccgtaatcatatgggacagattaaaagcttacaaaccaaaattattagacaaattaggtgtattagctcctaatgaagcataa

SEQ ID NO: 885 - DNA, 687 bp, Methanobrevibacter ruminantium
  source 1..687: mol_type = genomic DNA
atggagaaaggaaaattatatggtgtaagcattggcccgggagatcctgagctaataactgtaaaggcaatgaatataatatcaaaatccaagtatattgcaactcctcatactggaacaggggaatccttggcattgtcaatagtgtcccaggcgatagacttgtccaataaggagataatgcttttggagtttcctatgacaaaggataaagatatattgactaaaagccataatgaggctgcagaagcaattattaaggttcttgacagtggagaggatgttgcaatgttgaatctaggtgatgttactatctattcaacttttgactatactaaggataaattagtggaaagaggctatgatgttcaggttattccaggtgtcacaagcttttgtgcatctgcatctgagcttaagataggcctgacaactatgaatgagcctttgcatatcattccagcaagcggaatagacattaaagaagctcttaagatgccgggatccaaggtcttcatgaagattggaaggtcaatgcctaagctgattgaagcgattgaggaacttggtcttcaagacaatgtttatgcagttgaaaactgtggtttggaaaatgagaaggtttataaaggtctaaaagagtttgatgaaaaaatgggctattttactatagtcgttgttaaataa

SEQ ID NO: 886 - DNA, 1140 bp, Methanobrevibacter ruminantium
  source 1..1140: mol_type = genomic DNA
atgcaagataaacgattagtaaaccagcagttattgcgttgcggatatacaacaggaacatgtgcagcggcagcttcaaaggctgcaactaccatgctatttgaaaaggagagggtagattcagtctctatcacaactccaaatcagacaagccttaatatagatgttctaaatccacaattaactgataagaaggcatgctgctgtattcaaaaggatagcggagatgatccagacattacaaatggaatattggtctctgcagaagtgtccttaacagaatctaagggtatcaatatcgatggaggaaagggagttggcagagttaccaagcctggtctggaccagccggtgggaaatgctgcaataaactcagttcctcgcaagatgattgaagattccttaaatgaattggcaaggcattatgattacgatggaggattcaatgtcatcatttcagtccctgaaggtgaggagataggcaagaaaacattcaatccggaacttggaatcgttggaggaatttccatattgggcacaacagggatagttgagcctatgagcgctaaggctcttgcagattcaatcaaagtggaaataagcgtaattgcagcagagagcaatgagtcaattctaatatttttaggcaatttcggaaagaaattcaccgaagaagagttaaaattgtctacaagccctggaataatgtgcagtaactttatagatgttgctttggacagttctgttgagtatggatttaagaatattcttctgattggacatataggcaaattcgttaagctaggcattgggctcttcaatacacactcccataatggggacggcagaatagaagcattattgtcatgtgctttagaggcgggagctgatttagagaccctaaaggcaataaatgcttgtgtaaccaccaatgcagtattggatatcttgtatgaaaaggagctattggataagaccatggaaatattaaatgataggattcagcatagaattgataaaagggtgcctccagaggcgaatattggctttatttgctttgcaaatagtggagagtatgagggcatcctatttgaaagcgataatgcgaaagaactaatgacaatttggaaaactgattaa

SEQ ID NO: 887 - DNA, 756 bp, Methanobrevibacter ruminantium
  source 1..756: mol_type = genomic DNA
atgattcattttgtaggtgcaggaagcggtgctgttgatttaataactgtaaggggagctaatctcttaaaagaagcagatgtaataatctatgcaggttcattagtcaatccggacttattgaattacgctaaagactcctgtgaaatttatgacagtgctaaaatgactttagatgaagtattagatgttatgtttgaggccgaaaaggaaaataagatgacagttcgtttacacactggcgactccagtatttatggagctatccgtgagcagatggaccgtttggatgaggtggaaattgattatgatgtttgtcctggagtctcaagcttttgcggtgctgcagcatctttaaaggcagaatataccctgcctgatgtaagccaaagtgtgataatcactcgtatggcaggaaggactccggttcccgaaaaggaaagcattgcatcatttgcagagcatggagcaaccatggttattttcttaagcacagggcttcttaaggatctctctaaagaacttgtcaagggaagatacactgaagacacccctgcagctattgtctataaggcaacctggcctgatgagaagattatgcactgtactgttggaactttgtatgaaaccgctaaggagaataatgttacaaaaacagctttaataatcgttggagatgttttagacagtgagtattccctttcacgcctttatgccgatgacttttcaacagagttcagacaggctaaaaaataa

SEQ ID NO: 888 - DNA, 1023 bp, Methanobrevibacter ruminantium
  source 1..1023: mol_type = genomic DNA
atgaagatatcaatcattggatttacagataatggcatggaaatagcctataaattatcaaattccctatcagaggataataatataagtttcactagatgtggaaaaggagagttatctatttggacagaagaacatttttcagatagtgatgctcttatatttataggtgcgataggaatagccttaagggcaattgctccttacattaagaccaaaacaaaggatcctgccgttgttgtagtggatgaattgggacaattctccatacctattctatcagggcatattggtggagccaatgaattggcacttcagatagcagatatattaaatgcaattccagtcattacaactgcaactgatataaataatctatttgcaatagatacttgggcaaaaagccaaggattgaagattttaaatccagaatgcattaaactggtttcatccaaattgctgaagggggaaacaattcatataaaatctgattatcctattcagggaaacttgcccaagaaggtccaaatcaatgatttagaagattctaatagtgattatgatgtcataatcagccataatgattatagttatatggagaataaggatatattgttattaataccttcaataattacaataggtattggctgtagaaaggatataagttttgataacattgaaagatccgttttaaatatattggataaggagaattatcatatactgtctttaaatgcaattgcaagcattgataagaaggctaatgaaaagggaatattggaatttgcaaggaaatacaatctgccattcaatacttatagtgctgaagagctgaacagtcttgaaggagatttcacaaagtcagaatttgtaaaaagcgttgtggaagtggataatgtctgtgaacgttccgcagtcatagaaagcaatggaaacttgattagaagaaaggacacttgtgatggtgcgggagtgactgttgctttggcaatgattaatcctattctttcatgggattga

SEQ ID NO: 889 - DNA, 732 bp, Methanobrevibacter ruminantium
  source 1..732: mol_type = genomic DNA
atgaaatgtgtgtctgttgtaggtattggtcctggaaatgagttgtatcttagcattgcagctaaggaaactcttgaagattcagacttaattgtaggctataagaaatatgtggagctagtagaagaatatttgcctgaaaaggagtatctctacactggaatgacaaaggaagtagatagatgtaaaatggctttggaaaaagcatctgaaggcaattgcgtatctgtggtctgcagtggggatgctggagtatatggtatggcaggattggtttatgaattgtctgtagattatcctgatgttgaaattgacattgttccaggcataagtgctgtcttaagtggttctgcagttttaggagctccaataggacatgattttgcagtaatcagtttatcagatctcttaactccatgggaattgattgaaaagcgcttggccttggctggagaaggagatttctgcatttgcctttacaatccttcaagccataagagaaaggattatcttaaaaaggcctgtgaaatattattaaaacataaaaaggaagacactgtatgtggttatgtcagaaacattggaagagaaggtgaagaatatcatatattaagtcttaaagaacttaaagacactgaagttgacatgttcactacagtcttcatcggaaatgcaaatacaaaggtaattgacaataagatggtaactccaaggggatacaagggagtatag

SEQ ID NO: 890 - DNA, 759 bp, Methanobrevibacter ruminantium
  source 1..759: mol_type = genomic DNA
atgcacaagattgttttgtttggaggaactacagaaggacgtttattgactgaattcctatctcaaaataaggttccatccattgtctgtgttgccactgaatatggggagaaagtcttggattatgagcccccagtcatagttcagcctaaaagattaaagcctggccctatgagaaagctatttcaagaggagcagaccgagtttgtctttgatgctacacatccttatgcaactgaaataagcaagcacatcaaggaagcctgtgatgaaatgggcattgaatacatccgagtattgcgagaatccattgagattgaaggtaccactaaagtttccagcatggatgatttgattgattatttaaaccaaactgaaggtttgatattttcatctatgggagctaaggaggctgaagctttaaccgctctagagaatttccctgaaagggtctatttgcgaatgttgccttctcccgaagggattggccattgcctagatttgggatatcctatgaaaaacctttgcggaatgcagggtccattttcaaaggaatttaatatggctcaatttaaggaaattggtgcagacatactagttactaaggaatcaggcaatgttggaggatttttggaaaaaaccgatgcagctaaggaatgtggtatggaagtagttgttttaagcagattgcttaatgaagaaggcattagcgttgaagaggctaaagatgccataatgagtaaatgcttaaggcgttag

SEQ ID NO: 891 - DNA, 1188 bp, Methanobrevibacter ruminantium
  source 1..1188: mol_type = genomic DNA
atgaaggaaatcaatattattggaatgggaatgagtgaaaagacactcactcatgaagctttggaactcattcaccatgcagatatcttaattggtgcaaaaagattaatcaatgagttttctaaacttaataaacctagttttaatgcttatttatctgatgacatattgaaaataatagaagaaaccgatgcagaaaaaatagcaattcttgtttcaggagatgttggcttttacagtgctgcggaaaaactgacagatgtcctaaaggactataatcctaatttaattaccggaatctcttcagtttcctacttttttgcaaaatgcagtcttccttggaaggatgcaaatctgataagctgtcatgggatagatacaaatatagtttcatcagttcgaagaaacaggtatacctttgcattaacaggcaaaaacattccagaattgcaaaatgaattggttaaatatggctttggcgatttgaaggtttgggttggagagaacttaggttcagaagacgaattcatcaatgattgcaggattgatgatttatgcagtagggaatatggctcattaactgttttgattattgacaaccctgattttgattctaaatcaagaacaggcattccagatgaggaattcattaggggaaaagtcccaatgacaaaatcagaggtccgtgcagtatgcgcatctaaactctcaataggtcctgacgacatagcttatgacattggatgcggaacaggctctgtaacaatagaaatggctttatcagcatacaatggaaaggtctatgcctttgataagaaggaagaggcaattagtctcctaaatgaaaactgcattaaattccatattgataatgttgaagcaatttgcggattggcgccagactgcttaaagggtcttcctacacctgatgtggcctttattggaggtagttctggaaacatggatgaaatagttaattatctctatcaattaaacccaaatatgagatttgtcataactgcaataagcattgaaaatgcaatggctgcattggattcattaaaagatattggaatagaagctgaaatagttcaggtggctgtctctaaaggcaagaaaattgcagatttgcatatgctgattgctcaaaacccaatatttatcataagtggtgatgccaatgaatag

SEQ ID NO: 892 - DNA, 1362 bp, Methanobrevibacter ruminantium
  source 1..1362: mol_type = genomic DNA
atgaataggttcttaatatctggaacaagcagtaattgcggcaagacaacaatcacaatggccttgcttgcagcatttaaaaacagaggtcttgatattgcttcattcaagtcaggtcctgattatattgacccaatgtttcatagaaaggtctttaatgtaaagacacataaccttgatccctatttctgcactgaagagatgctttgtgagcagtttattagaaacaaaggaaatgatttaagcataatagagggggctatgggtttttatgatggaattggagttgaaggaagagcaagcgcttgggaagttgccaaatccatcaaggctccagcggtgctcattcttgatgcaaagggaatgagcaattctgcagctgcaatcataaagggctttaaggaattcaaagaagacagtatggttgaaggagtcattttcaataatatttctccaatgttatatcctcttttaagagacattgttgaaagcattggcataaaggcttatggtttcttgcctaggagggaagaatactcaataggaagccgtaacttaggattaatcactgcagatgagattcaggacataaaagataaaataaatggattaagtcaattggctgaagagtacattgatttagatggcttgtatgaattggctaagtctgctcctgaattaaaaactaatgattttataggagaagttttaactgattcccaaaatgaagaaagtgcagattcaagtaataaaccacgcatagcagtctctcgagataaggcattctgctttatgtatgaagaaaacatagaaatactagaggatttaggatgtgaagtggtctatttcagtcctttagaggataaaaaacttccagataatatttctggtttatatctatgcggaggctatcctgaattatataaggaggaactatccaataataaggacttatgctcttcattaaaagaaataatctctaatggaatccctacaatagcggaatgcggaggatttatgtatctgcatgattccattgagaatgtccctatggttggatttataaagggaaactgcattaaaacagataaattgcagcgctttggctatattgaaattaaggcattaaaggataatctattatgcagtgaaaacgatagtatcagagtccatgaattccattattatgacagtgagaactgtggagaggatttcatggcaaagaaagcatctaatggcttggaatatctttgctgtcatggttcggatagtctttatgctggttttcctcatatttatctacctgcaaaccctgattttgcaagatcttttgttaggaatgctagaaattggaaacattaa

SEQ ID NO: 893 - DNA, 639 bp, Methanobrevibacter ruminantium
  source 1..639: mol_type = genomic DNA
atgaaaattgaattggaacaggtcgagcctgctgaaattgaaaataggagtatggaaataatagaatctgaattgcctcatgaaattgaccctaaattggcacctatcattaaaagggcagttcatactgctgctgattttgattatgtggataacttatgcttttcagaggatgttgttgataaggcattggaagcgattaaaaatggagcttgcattgtcactgatactcaaatggcaaaggcaggaatcaataaggcagagcttaaaaagcatggcggtgatgtcttctgctttatgagtgatgatgatgttagggatatggctaaaaagaatcattcaactagagctagagcatctatggataaggcatcacagctggacaggccattgatatttgctattggaaatgctccaacagctttgataaggttgtatgaattgattcaggaaggcaagctcaaaccagaacttatcattggagttccagtgggttttgttaatgtggttcagtcaaaagagcttattatgcaatgtgatgttccttatatcgttgctcgcggacgcaaaggtggaagcaatgtagcagcagctatttctaatgcattgctttatatcttaagagatcaaatgaagtaa

SEQ ID NO: 894 - DNA, 789 bp, Methanobrevibacter ruminantium
  source 1..789: mol_type = genomic DNA
atggttgataaaattattttagtggttagttttggtacatcttataacaataaccgtgctcttaccattggagctattgaaaaggatattgatgaggcatttccagattatgaaatgagaagggcatttactagtcaaatggtaataaacaagcttaaaagacgtgatgacttggatattgacaatgttcaagatgctcttgaaagggcagtgaatgatggtgtcaagacagtcattgtacagccaactcatgtaatggacggaactgaatatcatttcaaaatcaaggacactgtagataagtacattgataaatttgataatattacaatcgcagatcctttattaatcactgatgaagactttgaagacttaatcagcagcataactaaagatgatgaatcaagtgatgaaacagctattgtttatatgggtcatggctctcctgctgagtctaatatggtttataccaaattgcaatccatgttaggagaaaagggattcgatcattattatataggcactgtagaggctaagcctgattatgatgatgtcttggctatggttaaggaaggagactataagaaaatcatcctaaagcctctgatggttgttgctggagatcatgctcaaaacgatatggctggagatgaagatgattcttggaaatccatgttccaagatgaaggatacgatgtggattgtctaattgaaggtctggcacagtctaaagacatcagggatgtctatatcaagcatgttcaaaaggcaattgatgatttgagttaa

SEQ ID NO: 895 - DNA, 393 bp, Methanobrevibacter ruminantium
  source 1..393: mol_type = genomic DNA
atggaacgagaaagttattattttttattattgctaattggacttgtcatctgtgcaggtgtcttttatttccaatttaactatgcaactcccacatatctgatattcaatgcaactgaagtcaatgagggaggctcatttacaggggtattgaatgatgcttatggatttccggtggtaaataagacaataacctatcataagccaggatatgaaatggggacattggtggatgttcaaacggatgacacgggagagtttgttatagaaaatgcccaatacctgccggatgccggtgaagacaattattatggtgcattcacctttgcaggggatggcaaatatcaaggatgttcctttgatggaaatataactgtaattccaaagaaataa

SEQ ID NO: 896 - DNA, 669 bp, Methanobrevibacter ruminantium
  source 1..669: mol_type = genomic DNA
atgtctaatcaagatgaagaaaactatatggatgatgaattattgcttaatgctcgaaagcctaaaggagaattaggggagaaactaattgagaacatgaatataaaccacgaatcccttgcacagtggagcctaaatcatttagagattgataaggatgattttattttagatattggctgcggcggaggagttaatgtggaaagattccttaaaatgacagacaataaggtctttggtcttgattattcagagctttcagttgagaaatccattgaattgaatagggaatcaattgatgatggaagatgtgaaataattcaaggttcagtttccgatatgccctttgaagaagggatttttaatattgctacagcctttgaaacagtttacttctggcctgattttgtaaatgacctaaaggaagtccatagaattttaaaaaaagatggaatattctttattgctaacgaagctcttccaaatgagtatgacaagcgtcaacagcgcatcattgaattgttagagatgcatatttattcaaaagaagaattagaggattctttagaaaaagctggtttttctgatgttaaatgttttataaaggaagccaaagactcttttactggcgatgatgcatattggatttgtgtgattgctaaaaagtaa

SEQ ID NO: 897 - DNA, 963 bp, Methanobrevibacter ruminantium
  source 1..963: mol_type = genomic DNA
atggatgattatttaattaaatcaaaatctgaaactaatcctgaatatggatgcaatccatatgaaagacctattgaagaacatatagctaaaggaataatcaatttagacaagccttcaggccctacctcccacgaagtggactcctgggttaaaaggatcctcggatgcaataagacaggccatgggggaacacttgatcctaaggtgactggggtgcttcctattggcatagacaacgccacaagagtgagccaacttctccttccagcaggtaaggaatatgtatgtcttatgcatttgcatagggaaataccagaagatcaagtaaaagggatattcaatgaatttacaggcaagatttaccagacaccccctgttaaatcagctgtaaaacgtgaattaagggtaagaaatatttattactctaccatctatgaaatagaaggacaggatgtcctctttaggataggatgcgaagccggaacatatgtcagaacctattgtcatgatatcggtgaggcattgggctgcggagctcatatggctgagcttagaagaactagggtaggtccattcgatgagcgaaacaatgaccttgtaaacttgcatgaccttacagatgcatatcatttctatttggaagacggagatgaagagcatattagaaaggccatccaaccaatggaagtggctagctcacaccttcctcagatattcattaaagactctgcagttgaagcgatctgccatggggcaaagcttggtgcaggtggaatttgcaaattgtccaaggacattcaaaagggcaatcttgttgcaataaagtctttaaaaggagaactggtagctgcaggaacttctcttttatcctctcaagagataatgaatgcagattccggtttggtggttgatacaaataaggtctttatggatacaggaatctatccgaaaggatggtaa

SEQ ID NO: 898 - DNA, 183 bp, Methanobrevibacter ruminantium
  source 1..183: mol_type = genomic DNA
atggatgataaagaaaaagtaattgaagcatttaaaaactctgaagaacctttaaacgctaaaaaagtcagtgaactttctggtgttgaaaagaaagaagtcgataaaatcatgaaagaattaaaaaaggatgaaactattgtttctccaaaaagatgttattggactcttgcagaaaaataa

SEQ ID NO: 899 - DNA, 552 bp, Methanobrevibacter ruminantium
  source 1..552: mol_type = genomic DNA
atggtaaaaaacaataatgaaagatttgaacttgatttaagtaaaaatgaaactcctgaattcagcaatgaagaaatattaagcaaaatgagaagaggattcaataatcaatatgtatgctttgaatatccatttttatggcagaatatgccaattgacgaagaggatgaatttacagacataatgcttttcaataaagctaacaatgcaattgtaaaaatatcaacacagccatgtctcattgataatatagacgatttaaaggaagagattgaaaaggacttaaaatccaatggatgcaccattcaacagtccgctatggaaaagatggaaacccaagacatttgggatgtcttttataccactaaagaagggctagaagtagagcagttctctattttaaaggataataacctatacaatctggaattatataccaaaaacaacagagatcaggcaactgtcaaatcctttgttgatgttattcaaacatttacaatcttaaaaccaacttataaggtagatggagacagttatgaaaagatagagtaa

SEQ ID NO: 900 - DNA, 339 bp, Methanobrevibacter ruminantium
  source 1..339: mol_type = genomic DNA
atgagcgtatttgattatatttgccatagaagacctgaaagaagcttcttttataagggacggcaatttccagtatgtgcaagatgtacaggattttatataagtggaatagctagcataatcctatttaaatactttccattacctaacactctaacaacattagctattggaatcttgcttcttattccatgtgcaattgatggaacaagccaattgtttgagatgagagaaagcaataatgttctacgtttgattacaggccttttaggaggagtagggcttattatgatatatgaagtggttttaaactttgtctttttaaattttatttattaa

SEQ ID NO: 901 - DNA, 144 bp, Methanobrevibacter ruminantium
  source 1..144: mol_type = genomic DNA
atggatggaatggatcctgaagactatttgatttataattattattttgaagaggaagagaataatggcttaagcaagaatgaaagctgttgtggtgttttaatggttttaatgattcttacaatccttttaactgttgcatag

SEQ ID NO: 902 - DNA, 504 bp, Methanobrevibacter ruminantium
  source 1..504: mol_type = genomic DNA
atggcaagaagggaagagaatacatttgattttttaggactttttacagaagaaataggcggaaagaagaataagtcaaatggagctataaaatttcaaaaggataaacttttcattgaaaaaagaagcagattgaatggaaagcttaaggacagctatgaaatcagttatgatgaattggatagtgaaagcatcgatcgcccagctatcaatagggtggagattaaattaaaggataagacaatttcattgaagaccttagaccatgagatgttagataattttgaagataagcttttagatattgttgaaggtcctaaacttgctgttgaagattctccagttgcaaacgctccatacaatgctgcagagattaaatcagattctaagattggtgagatagatattccagaccagattagaaagtatcatgagctctataaagagggaatcatttcagaggaagagtttgagaataagaagaaggagcttttggatctatag

SEQ ID NO: 903 - DNA, 867 bp, Methanobrevibacter ruminantium
  source 1..867: mol_type = genomic DNA
atggaaattaaatcaatccctcaagtaattaaggaaattcaagagcttgtagataaagaggattacgaatcagcctacaatatagcaaaagacaatgttgatttgaataaggaatacacagaaggagaatatgtatttaaaaacctgcttgaagagcttttgtttcaggtattaattcaaaaggagataaaaaagaaaatccctatgattttggattattcaagcttatattccaattatggagaagttctgattcaattggataagattgacgatgctaaaaagagctttgaattatcaagaaactataatccaataaacattaaagcaaacttcggattaggtgacttatataaaatggaaaacaaactaaatgaattttataaattagccatagaatcatttaaaatagcctattatccaaaagaccttgcaaaatcatttagaaacttatcatactattttttaaagatagccaaagaggaaaatgctgatgaaaacttaaaaatagcaatccatttaaaaaagatcagcaaagattatgatgatgaatcagagcttgccaaaacagaattagatgaaataaatggaatcattagtaattttgataaagaaacagtagaagcacttgaaagcacagatttaaaggaatgtagaaatgaattaaaatcaaaagggcttccttatgaagcaggaattgaaataatcaccatctgcaaaaacctaggattccagttagatgaggctaaaaaagtagttccagcattatattactttaatatagcatatgacctaactaaagacccagacattaaactagtgattgatgacttaaatgaaaaagtagaaagaagattggatgaataa

SEQ ID NO: 904 - DNA, 450 bp, Methanobrevibacter ruminantium
  source 1..450: mol_type = genomic DNA
atggaagacgactttaagcacttagtgcgtatatccagaaaggacgtagatggaaacaaaactatcgaacaagctttaactcaaattaaaggtgttggattatccttatctagatctatctgtcttactttaggtttaaatactaccgataagattggttacatctctgaagatgatgttaccaaaattgaagaccttttagaaaatcctcaaaactacagcatccctgattggatgttaaacagacgtaaggattacgctactggagacgaccttcatttgattgaatctgaccttgacatgactttaagggacgatttaaacagaatgaaaaagaccagaagttacaaaggaagaagacatgaagttggtttaccagttagaggacaaagaactaaatctactttcagacacagttctactgtcggtgtaagtcgttccagaagataa

SEQ ID NO: 905 - DNA, 537 bp, Methanobrevibacter ruminantium
  source 1..537: mol_type = genomic DNA
atgggacatccaagaaaagcaaggaaaaagtatgatactccacctcatccttggaatgcagaaagaattaaaactgaaaataaattaatgtctaaatacggcttaaaaaacaagaaagaaatttggaaagctgatactttagttagaaaatacagtagggaagcaagatacttattagggttctctcaagatcaagtacaagttgaaaccgaagaattactcggacacttgaaaagaaccggtatcctcgatgaagctgctcacttagaaaacattttagacttaactgtagaagatattttaagaagaagattacagactatagttttccaaaaaggtttagctcgcacagctaaggaagcaagaatgtttgtagtacacggacacattgctttaaacggcaaaaagattaactctccaagttatgtagtaaaaagaggagaagaagaagcagttggtttctaccactcttccccagtagctaaacagattgaagaatacaataaggcagctagtcaagctggagaaaatcaataa

SEQ ID NO: 906 - DNA, 393 bp, Methanobrevibacter ruminantium
  source 1..393: mol_type = genomic DNA
atggcaaaagacgaaaaatggggaatagctaatatttattcatcctttaacaatactatcttgactgtaactgatattacaggagcagaaaccatttgtcaatggtctggtggtagagtagtacgtgcagacagacagcaatcatcaccttttgcagctatggaagcagcaaacagagcagctgaagatgcaaaggaaaaaggatttgtcggattgcacataagagtaagagctcctggtggaaatggtcctagaagtccaggtcctggtgcacaagcaaccattcgtgcattagcaagagctggaattaaaattggtaaaattgaagatataactcctatacctcatgatggtactggaagaccaggcggtaaaagaggaagaagagtataa

SEQ ID NO: 907 - DNA, 849 bp, Methanobrevibacter ruminantium
  source 1..849: mol_type = genomic DNA
atggaaattgatgtcaaaaaacaagatgaaaattctatggttttcatagtccgtgatgcagaagtgccttttatcaatgcaatcagaagaatcgcaatgatgagagtaccaaaattagctatcgaagatgtatttattgtaaaaaacgattctgctatgtttgatgaagtgttagctcacagattaggattgactcctttggtttctgatttggaatcaattgaaggattagtcatgagagaagattgtgactgcaaccatgatgaaaatggaaactatgtggataagggtgaatactgccctagatgtagcgtatccttttcattaaatgaaaccggaccaaaagtagtttattcaagggatttaaaatcttgtggtgactcaaggattaaaccagtatacgataccatacctcttttgaagttaaaagaggatcaagatgttgaattggaagctgtagcaaagttaggaatcggaaaggaacatgcaaaatgggttcctacaacagtttgcgcatataagcaatatccggaaatcactttcaatgaaggtgaagatgtggtctatcaagttgctgatgcatgcccaaggaatgtgttggatgcaaacagggacgatggagtcattgaagtcattgatattgaaaactgttcattatgtaagacttgcgtaaggacagctaaggcagcaggttctaaattcatcaatgttggatatcgtgaaaatgattttatttttaaaattgaaactgatggatcaatgcctcctaaagaggttttattaaaagcttgtgatgttttggatgctaaaacagacgagtttatcacatttagtgaaggaggaagctaa

SEQ ID NO: 908 - DNA, 366 bp, Methanobrevibacter ruminantium
  source 1..366: mol_type = genomic DNA
atggctagagaaattaagaaaactaatcctaaccttattgcacttatttacaatcttagaaaacagtcttatgaagaaggagtagctatctggaaagatgtagctatcaaacttgagaaacctgctagaaaccaagcggaagtaagcctttctcacattaataaaaatactgttgaaggagaaactgtggttgtaccaggtaaagtcttatctgacggcaaattggaccacaaggtaactatcgcagcattaggatttactaaaaacgctgaagcaaaaatagaaaagttcggttgtgaagctttatctattgcagagcttgcagaagcaaatcctaaaggtagcaatgttaagattatgttataa

SEQ ID NO: 909 - DNA, 429 bp, Methanobrevibacter ruminantium
  source 1..429: mol_type = genomic DNA
atgatgattattaacggtgaaggacatattttaggaagacttgctagcgttgtcagcaagcagcttcttgaaggcgaagagattgtagttctcaacgctgaaaaaataatgttaactggtaataaggattgggcttacgctaagtacaagcaaagagtggacagagcaagcatctctaaccctcgtgacttaggtcctaaatatccaagaagaccagaagatatattcagaagaaccgtaagaggtatgttacctatgaaaaaagcaaaaggtagaaatgcttttaaaggattcaaggcatttgtaggcgtacctgaagagtatgctgatgctgaacttttaaccatgcctgaagctgaatataacgacattaaaaaaggaatggaattaggagaaatctctaaacttttaggtgctaaattcgattag

SEQ ID NO: 910 - DNA, 399 bp, Methanobrevibacter ruminantium
  source 1..399: mol_type = genomic DNA
atgaaagttgttcatgcaagcggtaagcgtaaaacagctattgcaagaggtaccatcagagaaggtaccggtaaggtaagaatcaataaggttcctttagaactttattctccagaacttgcacgtttaaaattaaccgaaccattagaattagcaggagaagttgcagacaatgtggacatctccattagagttaatggtggaggagttatgggccaagctgaagctgcacgtatggtaattgcaaaaggtttagttcaatggactcaagacatggacttgaaagaggtttatacccaatatgacagaaccatgttagtaggagacccaagacgttccgaacctaagaaatacggtggtcctggagctagagctcgtaaacaaaaaagttacagataa

SEQ ID NO: 911 - DNA, 171 bp, Methanobrevibacter ruminantium
  source 1..171: mol_type = genomic DNA
atgatacctatacgatgtataagttgtggaaaacccgtttctgcatattttgatgaatataacagcagattagctgatggtgaaaagtcaaaagatattttggatgatatgggtattacaagatattgttgtagaagaatgttaatttctcatgttgaaacttgggaataa

SEQ ID NO: 912 - DNA, 219 bp, Methanobrevibacter ruminantium
  source 1..219: mol_type = genomic DNA
atggctgcaaaaaaaagcactgcaaaaaaattaacaagatttgaaaaggctagggttttaggtgcaagagctattcagctttctatgggcgcaaagcctatggagcataaggaaattgaaaagttcattaaaaactcaaaatctcttgatcctatagacatagctactttagaacttgaattaggtattttacctttagatgttagaccaaaagaataa

SEQ ID NO: 913 - DNA, 1248 bp, Methanobrevibacter ruminantium
  source 1..1248: mol_type = genomic DNA
ttggatagtgtaatcgaagatgttcgtgttagaaaaattttagatagcagaggaaatcctactgttgaagtagatataattacttggaacggatttggaagagctgcagctccaagcggagcaagcacaggttccagagaagttgtatccttccctgaaggaggggttgatcaggtaatcagtgaagttgaagacttgatttcttccgaacttatcggaatggctgctgaagacattgaagacattgatgaggtcttaagagaaatcgacggaactgacaatatgtctgcaattggcggaaatacaagtgtggctgtttccatggctgcagctaaggcagctgccatgtcctttggaatgcctctctatagctttttaggaggcaatttcgtcagtgaaatgccttatcctttaggcaatatgatgaatggcggagctcatgcaggtccaaatgcaccggacattcaggaatttctagtagttcctataggtgctaaggatgtggaagaggctgtatttgccaatgtggctgtccataagaaactaaaagagctcctctctaaaaaagaccctgatttcactggtggaaaaggagatgaaggtggttggattcctaatattactaatactcaagctttagaaatccaggcacaggcatgtgaagagacaagagacgaattaggcattctaattaggcctggtttggatatggcatcctctgagttttgggacagtgaaaaggaaaaatacgtatactcccaagacaatattgaaagggatgttggcgagcaagtggaatatgtcaaggacttgattgaaacatataacctgttctatgttgaagatccttttgatgagaatgatttcgaaggattccgtgagctcacttccaaggtaggaaacaaatgtcgcatttgcggtgatgacctctttgtcacaaactcaagactccttaagaagggaatcgatgaaaaggcagcaaatgcaattatcataaagcctaatcaaatcggctcacttactgaaacctatgctactgtaaaattagctaaagaaaacaatgtaatgcctgttgtatcccataggtctggagagacttgtgatgagaccattgctcacttggcagtggcctttggcgctcctatgattaaaaccggtgcaataggtggagagagaatagcaaaattaaatgagcttattagaatcgaagctgaattgtctaatccgaaaatggccagattgttctaa

SEQ ID NO: 914 - DNA, 192 bp, Methanobrevibacter ruminantium
  source 1..192: mol_type = genomic DNA
atgtcaactgtaattattgatgcaagcaaatgtgaaaacgcagactgtggtgaatgtgtagacatgtgtcctatggaaatcttttccttagacggagacaaaatcgtaactgatcatgaagacgaatgtactttatgtgaagtttgtgtcgacatgtgcccaaatgattgtattacaattaaagacgaatag

SEQ ID NO: 915 - DNA, 597 bp, Methanobrevibacter ruminantium
  source 1..597: mol_type = genomic DNA
gtgtcagatttattaatcccattagataactacttagctgctgggttacacattggtacccaacaaaaaactcacgatatggaaaaatatattttccgtgtaagatcagacggtttatatgttttagacgtacgtaaaaccgacgaaagattaagagcagtcgctaaattcttagcaaaatacgaccctgatgacattttagtagtggctacccgtcaatacggtcaagctcctgttaagaaattcggtgaaatcaccggttgtaagaccattcctggcagattcatcccaggtaccttaaccaacccaggatatgctaaattcatcgaacctaaagtaatcgtcgtaactgacccaagatcagactctcaagctatcttagaatccaaacaaaacggaattcctgtagttggtctttgtgatacagaaaacttacttgctaatgtagatatctgtgtaccttccaacaacaaaggtagaaaagctatcgctttaatctactggttgcttgcaagacaaatcttaagagaaagaggaattcttggcgaagacgaagacttagacttagagccttctgactttgagcttaagttctaa

SEQ ID NO: 916 - DNA, 897 bp, Methanobrevibacter ruminantium
  source 1..897: mol_type = genomic DNA
atggataatataaaagataagaagatcaatgataaaattcaaaagcaattggctaatgagtcagtcaatgagcttttaagcattacaggtatcaaatcaaatgttatccaacctttaacagtagaatatgtagatgttgcagacacaagaatagcagattatgtaggattagaagaaaatgacagtatccgtcttttagagtttcataccggcgcacctaatgaaaacttggattttaaaatgtttgattattcttccatgatttataaaaaatataggaagcctgtaaatgcggtagcgatttgtacagaacgaataaacgagccagaaggcaaactggaatggggtgataggaacaaatattattatgatattgttacatacaaagatatcgatggggaattagaattaaatattattaggaacaaaaataaattcaatcaaaagttatcttcactggagatttttactttaaaaatgattttatacacttcctttgataaaaaacctcatgagataatgttagatgcctgtaaattaactaatgaagctaacttaaatcaatacctgttggatgaaataaaaaagtttcaggaattaacttgcagaaaaataattgatgaacaatatcatagggggattgccgacgtgatagcgatgaaaaatactttgttttatgaagacttgaagaagagtgaagaaagaggtatacgtattggtgagaaaagaggtataagtattggtgaggataaaaaggaatttcatatgagaatccatataattaaaaatctgttaggcaagatttctaattctgatttagcaaaatctttggatatttcagaggaagaacttgaagagtttattaaagaaaataatttaactccttcaaaggattga

SEQ ID NO: 917 - DNA, 246 bp, Methanobrevibacter ruminantium
  source 1..246: mol_type = genomic DNA
atgatcaattgggctgctgaaatgaaaactatgaaaaatactttgttttatgaagactttaagaaaagtgaggagagaagcatccttattggtgaggataaaaaggaatttcatctgagaattcatataattaaaaatctgttaggcaagatttctaattctgatttagcaaaatctttgaatttttcagaggaagaacttgaagagtttattaaagaaaataatttaactcattcttccatttaa

SEQ ID NO: 918 - DNA, 849 bp, Methanobrevibacter ruminantium
  source 1..849: mol_type = genomic DNA
atgattagagaagctgtcgttgcaggtacattttatgaaaataatgtcaaatatttgagagaaagcattgaagactgttttacacacagattaggcccaggagaaattccaaagctttccagagtaaataaggaaaaagaagtaaatgcaatcatggttcctcatgcaggatatgtctattcaggtccgacagcagctcacgcatattcaaagcttgttcaagacggatatcctgaaacctttgtcataatagcccctaatcacactggctttggagaacatgtttccatcttcaatgaaggatcttggatagttccaaatggggttgcagatgtggatgatgagcttgcaaacgcaattataaatcaatccaactatgcaaaggcagatttcctggctcataggaacgaacacagtattgaagttcagatacccttactaaaatactttgatagcaatttcaagatagttccaatctgtatgatggatcaatctcctcaagcatcaatcgaccttgccaattctatattcgaagcggccaatgatttgaaccgaaaaatcaccttgattgacagcactgatttaagtcattttaagtcacaggaaaagaccattgaacatgataacttagtgtttaatgaagtgataaatggaaatactgaaggcctttatcaagttgttaaaaaagagcagattactatgtgtggatacggtccaactatggtaagtatggaatattgcaagaaattaaatcagaagaactttgaattgctccagcattctactagcggtgatataactttggattatgcttctgttgttggatatggatctggggtttggttctag

SEQ ID NO: 919 - DNA, 984 bp, Methanobrevibacter ruminantium
  source 1..984: mol_type = genomic DNA
atgagaaagatgtctgtggcttccgcacctggaaaaaccatattgtttggagaacactctgttgtttatgatgagcctgctattgcaggagcagtaaataaaagggcttctgtaaagatacaagagtctctaaataattattctaccttaaagtcttatgacctgggctttgaagtcatattgaatacaagaagagggacctataagctagtaaagggcaagccaggaatcattcgctatatattaaatgcaatgggcaagttccatgaccacagcaatattgacatgacattgggacttaatctgccgataggttcaggattaggctcttcagcagctgtaactgtagctacaattgcagcattgcatgactatcatggggttcctataaccaaggaaaagttggcagaggaggctcatggggttgagcaagacgttcaaggaattgcaagtccattggataccttggtaagcactaatggagggcttgtttatctctctcgcgaaaagcgcatcgtccgctttgacaagcctttggatgctccttttgtaataggctttaccaataagtatggaaatacaggaaagatggttaagcatgtaaggcatctgaaggacaattatccggagcttataaatcctgtaatcagcactatgggcaagattgcaaatgaggcaagaattgcgattctaaagaatgatattgataggatagcggatttgatgaacttgaatcaggggctacttgatggattgggagtcaatacatatgagttatctagaatgatttatacagctcgtgaaaatggtgctttagcttctaaaatcaccggttccggtggagggggaagcataatttcattatgtaaaaatagcactgtggataatgttgcaaatgcgataaataaggaagacagtacgataaaggttaaattctctggagagggtgttttggtaaataggcgttctcctccatttaattaa

SEQ ID NO: 920 - DNA, 816 bp, Methanobrevibacter ruminantium
  source 1..816: mol_type = genomic DNA
atgattattttaaaaattggcggtagcatattaactgaaaaggattctgcagagcctaaagtggattatgctaacttaaacagaattgcagaagagatcagacaatctttatactcagatgaaatgagcaatgaccttattgacgggcttgtaattgttcatggtgcaggctctttcggccatccacctgctaagaagtacagaatcggagagccttttgatatggaagactatctttctaaaaagataggattctctgaggttcaaaacgaggtaaagaagctgaactcaatcatttgccagtcccttatagagcatgggattccagctgttgcgattccgccatctgcattcatcacaagccataataagagaatctatgattgcaatttggaattgatcaagacctatattggagagggatttgttcctgttctctttggagatgttgtcttggatgatgaggtgaagatagcagtcatctctggagaccagattcttcaatacattgccaaattcctaaagtcagataggatagttcttggaacagatgttgatggggtttatacaaagaatcctaagacacatgatgatgcggttcatattgataaggtaagctctatagaggacattaagtttttagagtccactacaaatgttgatgttaccggagggatggttggcaaggtcaaggagcttctagacttggcagagtatggcataagctctgagataattgatgcaaacgagaagggagccatttcaaaggcacttcagggtatggaagttagaggaactaaaatttccaaggaataa

SEQ ID NO: 921 - DNA, 1053 bp, Methanobrevibacter ruminantium
  source 1..1053: mol_type = genomic DNA
atgatatctgatagaaaattggaacatcttttgatttgcaagaattatgatgttagctataatgataagactaccggatttgaggatattgaactcatccatagggccttgcctgaaatcaataatgatgatatagatttatctactgaagtatttggaaagaaactggattctccattattcattacagcaatcactggaggacataaggctgcaaaggatattaataaggaattggctattattgcagaaagcagaaatatcggtttaggtttaggaagtcaaagagcagctatagtaaatccagagctaagggatacctatgatgttgtaagggaaaatgctcccgatgcattgattttaggaaatattggagctccacaaagcgacttggcaattgatgctgtagagattctagacagcgatatcttggcaattcacttgaatcctcttcaggaatccattcagcctgaaggagatgttgatgcaaggggatatgtagattcaataaaggagatctgtaagacagtggatgttcctgttatggctaaagagacaggcacaggcataagagctgaagatgcaatagaacttgaaaaggcaggagtcagtttcattgatgttgaaggagctggaggaaccagttgggctgctgtagagacatatagagctgaagatagatatcttggagagctattctgggattggggaattccaactgctgtaagcactgttgaagtggtaaattcagttgagatccctgttgtatcctctggaggaatttcgttcaggactcgatgcaagctaagggcaattgcccttggagcagatgctgttggaatggctttgcctgcattgaaaggagcctatgaaggtcaagaagctttaaaccagatggtaaacagattcaatgaatctttaaggattgcaatgttccttttaggggcaagcaatttagaagagttaaaacgatctgatttgattattaaaggcgaaactaagcagtggcttgaagcaaggggctttgacacaaagcattatgcacgaagatag

SEQ ID NO: 922 - DNA, 1350 bp, Methanobrevibacter ruminantium
  source 1..1350: mol_type = genomic DNA
atgacagtagaagtaatagcaattggtggatacgaagaagtaggaaagaatatgactgccgtaaaggtaggggaagatgtaatcatatttgatatgggtatccacttagacagaataagtatccacgaggatacagatatagacagaatgcacagtttggacttgatagagcgtggagtcattccagatgacacattgatgaaggatgtagacggtaaggttaagggaatagtcttctcccacggtcacttggaccatattggagctgtagcaaagcttgctcacagatacgatgctccaatcataggaactccatatacaacagccctcattgaaaagcaaatcaagggagagcgcaagttcaaggtaaacaatcctataagaccactcaatcctggaagcaagatcaaactgtcaaaggacataaccttggagtttgttcagtccactcacagtattccacaagcggttttccctgtattgcacacttcagagggaataattgtctatgcattggactttaagtttgacaatcatcagaaggtctctccaccacctgactataacaggcttagggaattaggaagaaaaggagtattggctcttattgtagagaccaccaatgcaatcaactatacagaaacaaggacatactctgaaaaggttgcaagaataatccttgaagacttgatgaagagagcctttaaaggccaaaaggaaggaatgattgtaaccacattctcttcacatatcgaaaggattcaaacaattgcagacattgcaaaggacagcaatagggaaatattattccttggccgttccatggaaaggttctgcggaatcgctcaaaaccttggaatattgaaattgccacagaatgcatatgtatatggctctccaaaggctgtaaacaaggctcttatgaaagcagaggacgatagggatcaatacctccttgtaaccacaggtcaccaaggggaaccggatgctctccttccaagaatagcaagcgcaagaactccattcaatgtaaagaaaggagataatgttatattttcagctcctatcattccaaatccgaccaatgcagctaacagacatattttggaaagcaaattaaaggcaaacggtgcaagaatctatgcaaacgctcacgtttcaggtcacgcaggaagggaagaccatagggacttcttaagaatgctaaggcctaaacacatcattccagctcacggagagttagagatgcttgtggcttatggagagcttgcagaggaagaaggctataggatcggaaacaatgttcatatattaaggaatgctcaagctcaggtttttaatggtgattag

SEQ ID NO: 923 - DNA, 996 bp, Methanobrevibacter ruminantium
  source 1..996: mol_type = genomic DNA
atgtctgatgtaactgatgttttaaaggaatattctgcagatgtcattaaaacaattgaagagaatttagctcctgttcaacctcaaaacttacaggatgcttgtatttatttaactaaggcaggaggcaaaatgcttaggcctgctcttactttaatatcctgcgaagcggtaggtggaaataaggaggatgctcttaagaccgcagcagcaatcgaactcattcacacattttcacttattcatgatgatattatggatgatgacgatatgagaagaggcatgccttcagttcataaggtatgggacgagccattggctatattagctggagataccctattttcaaaggcatttgaaatgattatctcatctaaggaagagaacgctcatccggaacatgttgcaaatgcccttgcaactgtagctgatgcatgtgttaaaatctgtgaaggacaggcttcagatatgagctttgaaggggactttgatgtcaaagaggccgaatactctgaaatgatttataaaaagactggcgcattgattgcagcagcaactaaggctggagcgattatgggtggcgctgatgaaaaggaagtcactgcattatatgaatacggcagaatgattggtattgcattccagattcaggatgactatttggatgtaatcagtgacgaaaaggaccttggaaaacctgttggcagtgatattgcaaaaggaaaaatgacccttatggttgtaaaggctttagctgaatcagatggtgaagatcacgaaagacttcttgaaatcttaaaggacaatgactgttcacaggatatggttaatgaggcaatagatttattcaataagtatggctcaattgattatgcttataatttagctttagaaaatgtaaatggggctaaagaggctattgcatttttaccagactctgatgcaaaatcaatgcttattgcattggctgactttgtaatagccagatcttcataa

SEQ ID NO: 924 - DNA, 873 bp, Methanobrevibacter ruminantium
  source 1..873: mol_type = genomic DNA
atgggttttaaagacaaggttttatcctctagcaatcaattcaattattataaggacaattatgaaaaattgcttaatgagaataagcaattgaagcaaaagcaaaatcagcttatcgaagagaatgagcaattgattaaggaatttgaattaaataagcaaatcataatcaataaagagaatttatctaccgaaagcaactattgcccatattgtgggaggatttctaattttgaaccttatggtgttgtcaaaagggaaaaggcaatgtgcccatattgcaagtctttagaaagacacagattaatttatcttttctttgaaagaaactatagttctatttttaaaaataaggacattaagttattgcactttgctccagagagaattttctataattatttcacccaattcgaccatgtggattattatcctgtagacatagaccctgaaacatatgcaaaaagaggccttaagcttaagatgaaggtcaatatggaagaggttccatatggcgatgaggaatttgacttcatctataacagtcatgttttggaacacgttccaaatgattttaaagctatgggtgagttatatcgtgtacttaagcaggatggagtctgcataactgtggttcccctatctggaaatgaagagactctagaaaaggaagagtataacactcctgaattaagagaaaagcattatggaaacaaggatcatctaaggttttatggtctggatgttaagcaaaggcttgaatctgttggatttaaggtaaaagtatctaaattagaggatttgaatttaactgaaaaagagattgaactctttaatgtaaaggaatctttaatttttgtatgcactaaataa

SEQ ID NO: 925 - DNA, 660 bp, Methanobrevibacter ruminantium
  source 1..660: mol_type = genomic DNA
atggatttgccatctggagacaattatgaaaataccactgttaatgaagcaattcgtcaaatcaatgatacaaaccgtgatttaactgttttattctataatagtgaagacaatagtactgtagcccgggtagaattcgaatttaccataaatgattttaaagccactgctactgaacagactgttgcaaacagaactgtctggtataacgaggaaaatggtacttatatggcatttttaggtaattcagttacccatgacaatataatcatcatcacaaatgatgttgagatattggaacatctcatatcaagcgtgaaatttattttcctaaatgaagacggcactgtaaattccacatctgatatggtcaataatcaaagcataaatgtcactggcggtacggcttcaaatggaactgatgcaagtgcatctacagctacttccaatgtttcaagctctaattcccaatctacaggcaatgatggatattattggtctggacaagatcaggattatattaaggagtataccgacagcaatggcatacagcatatagaccgtaggaacggacctaatgaggcttatgatccaaacacccaaaggcattatactgatggtgtagaggatacagcagcttataatcaagactttaattaa

SEQ ID NO: 926 - DNA, 573 bp, Methanobrevibacter ruminantium
  source 1..573: mol_type = genomic DNA
atgatagaaaaggtacgattcgatcagattgcagatatctttacgggagtaagggtaaaaaggtatcagaaaggtaaaggaactacagttgaaaggcccattctaaagaaaacatattccgaaaacagttcaaaattggatttggaatatgaagaggtatcagaggagatccatgaaagattctactcacaggaaaatgatattgtaattctccttgcaggatctaaagtgagcaaaatagaagaggctggaattatcattccaatgtattatgctgttgttagagtaaaagaaggttatgatgttgattttatctaccatctgcttaaaagcgatatcttcccaagggaattgcataaaattgaagagggaactacattaaagattataaagacaactcaccttaaatctatttatttgcctgttccagatttagaaactcaaataaactatggaaaattgtttaatttaatggataagcgcatcaaattaaatatggaattggcagaacttgaaaaacagattgaaaagtcaattatcaatgagatgctcctggaggaaaaaactttttaa

SEQ ID NO: 927 - DNA, 1905 bp, Methanobrevibacter ruminantium
  source 1..1905: mol_type = genomic DNA
atgtcaagcagattaggacgccaactatgggataaatatgaggaattaagaacaaacagcatggttggttttttaacagatgaagatttccagaagtactttttaggtttcataacctacaagtatctctctgaaaatttggaattgtatcttgataaggaattggaaaaggacgatttgaagtttgaagaggcatataactttgaaaattatggcaaggttttagcgaaaaaggcaatctataacttaggctattttattacacctaaccatctatttagaaatgtcatagcctcctataatcagggtgcagatatttcaagagaattgaaatgggcttttgctgaaataaatagttcctgtaagaaaaccgaaagtcaggaagattttgaaaacctatttgaaagcgttaatctccaagccactccattaggtaaaaagcaggaggatagaaatagggtaatctataatatattgaacgctttggatagtgttgactttggcttggatgagttcaattcttcactctctttaattaaccattattctgagcctgctcgagagcttggtgtgaatctggatgctttggaaaaggaattgctttcagatcctaataagaatatctttttagatgattctcccctaaatgaaagttcttcaattccattaaatgaggctccatttgaagagtatgcatctatggaacttttcttagacgatattgctcctgttgaagagtttgattctatggaactttcaaataaagagaatattgtcacaggtttagaaaatccaaatcatcccaatagcttagtcaatgagggatggaatgacaggtcctatgacagctataggattcaaaagcaatattccataggtgacgcatttgaatatctccttgataagttttccctaaatgcctcaaaatctgctgatttttacactccaaatgatgtttcagttttggtttcaaagcttgtggccacaaacaaaagggctattgattcagtttacgatccttgctgcggctcttcctcaatgcttctggaattaaacaaacatgtttccttaaatcttatctgcggccaggaagtgaatgcatattactataatatttcaaggcagaacatgatcttgcataacattcactttaaggactttgacataaagcagggagattcattggatagccctcatcatatagggtatgataaatttgatgttgtagtctctcagattccattcaatgtaagttggaccgccaagaaaagcttcttaaatgatcaaagatttaaggagtacaatgcattggctccaagggtaaaggcggaatatgcatttattcagcacatgctttatcatttggatgatgatgggattatggttgtaatagctcctcatggggtattattcagatccgcttctgaagaatcaataagaaagataatagtctctaagatgaattatctggatgcagtcatcggtcttccgtcaaatatgttctatagcacaaatagccctgcatgtgtactgatattcaagaaaaacagaagatatgatgatgacgtattattcattgacgcttccaagaacttcaataagataaagcttagaaacaatcttagaaaagaggatatcaataagattgtaggcacttatgtctcaagggctgaagttgacaaatactctcgaagagtcagcttaagggaaattgatgaaaacaattgtaacttgaatatccctagatatgtggatacatatgaggaagaggaaataaacatccaggaaatttataaaagacgggaagaagcctctcgtgaacttaaggaagttacttatgaaatagatgagctttgtaaggaattaggtattgagaatcccttaataaataatatctttgaataa

SEQ ID NO: 928 - DNA, 921 bp, Methanobrevibacter ruminantium
  source 1..921: mol_type = genomic DNA
atgagcaaaacttatatttttggacataaaagtcctgatactgattcaattacttcaagtcttgtaatgtgtgacttagaaaacaaattaggaaatgctgatgtagtgtcatgcagattaggaaatcttaataaggaaactgaatttgttttagattacttcgatattgaagcccctcaattgattgaaagcatcgaagatgatgccgaggttattttagtagatcataacagtccaagcgaatctgttgacaatattgaaaatgcaaagattttaaagcttgttgaccatcacaagattgcttttgaaacttcctatccattattcattagaacagagcctgtaggctgtactgaaacaatcttatttaaattatataaggaaaatggcctcactccagataagaccattgcatccttaatgttatcagcaatcatatcagacacattgcttttaaaatctcctacaacaactgaagatgataagcaagcggtaaaggaacttgctgaaattgcccaaattgattatgaggaatacggtttggaaatgctaaaggcaggaactgacttatcaagtttctcaattgaagagatcttaagcttagacgctaagcaaattgactttaaagatgtcagatccattgtaaatcaggtaaacactgcagatattgatgatgtgatgacaatgaaagatgatttggaagctggaatgaataaaatcatagaagatgaaaatctagacttgttcatgcttttaatcactgacattgtaaacagcaattctcaagtaattgctcttggaaaagatgtgtgccttgttgaaaaggcatatggagttaaattggaagacaatactgttcttttagagggtgtagtctcccgtaagaaacaggttgttccaataatgactgaaaatgcttaa

SEQ ID NO: 929 - DNA, 354 bp, Methanobrevibacter ruminantium
  source 1..354: mol_type = genomic DNA
atgtcaaagttttgtccgaaatgcggttgtgaaaatctagatgaagcttctttctgcttggaatgtggcgcttctcttcctagcattgaagaggttaaggaaaggtcttctcatggagctggaactagccatcaaagcacttttagttcaaatttaaatgaggaaaatggctttaatcaggaaaccagtagtttttcacagtccaactcaaattctaatgaagcaagcaattcaagcaagtttaaaaatgtaataaatgaggcaaatcccgccaataatgacaatcaagactatgctatctgttgcctggtcatatttgttcttttattgattgcattcctatgtaatttttaa

SEQ ID NO: 930 - DNA, 396 bp, Methanobrevibacter ruminantium
  source 1..396: mol_type = genomic DNA
atggaaataaatgattttggccatgatttagatgaatctgctcagtttttagttcaaaagctattgattctccatccttgggatgaagaatgggacttaagcgtaactgccaatttggttcccttttataaggaaaagatagatatacaaatatctaagcaaggaaaatgcgatgaggagttttttgataagcttatccgattttcctctattttagatacaaatcaggttagacttctttttatggaacaattagttggtatgcctttaatccttgatggcaaatatctaaataatgatgagcgcattgatttattgatagaatctttaaatggaaggttaaaaagagttgataatggtttatatttatttttcaatcacgaagaggaattttaa

SEQ ID NO: 931 - DNA, 1170 bp, Methanobrevibacter ruminantium
  source 1..1170: mol_type = genomic DNA
atgatatataggaaactaggaaagactgatttggaagtgtcaaatataggctttggatgtatgcgtttgccccataaagagcatttttaccaaatagatgaggcagaagctagcaaaatgtttgattatgcaatagatcatggaataaactactttgaccttgcctattcatttcatagcaaaaacaaaaatcttggaggaaatgcagagccctttgtaggtaaatacctggctgaacgtggaaaccgtgaagatatggttattcaaacaaaactccctggatggctggtaaataaaagggaagatatggacaagttccttgatttgcaactcgaaagacttcaaactgattatattgatgtatatatgctccattcccttaagatagacttttggaacaagttatatggcatggatgtattggaatttttagacagcatccttgaagatggcagagtcaaatatgtcggtttttcctttcacgatgatttggatgttttctttagcattatggattcatatgataagtgggatgttatcctaactcaagtaaattatcttgatgaggattataaaagtggccttggcggtttggaatttgttggaatggcaggacttggtaatgtaattatggaacctttaaggggcggaagcctaataacaaacattcccgatgaagttcaagctctttgggatactgctgataagaaaagaactcctgtggaatgggcattggaatatctttgggataagcctcttgtaacatctgtattcagtggaatgagcaatatggaacaggtaaaggagaatattgccatagctgaaaactgccagccggattgtatgagcgaacatgataggcaaatattaaaggatgttgctcaagtctataagtctagggaagagattccatgtacaggatgcagatattgcatgccttgccataatagagtggatattccccactgttttaagcagtataatattgctaaaagcttgaattatattgataagactgcagcaccttatttctggttggtaaataaggatgaaagagctgacagctgtacattttgtggtgagtgtaatattcaatgtccgcagggcatagatattcctgcagagatggaaaaggtctttgacttcttccatgaggaaagtcagtattag

SEQ ID NO: 932 - DNA, 828 bp, Methanobrevibacter ruminantium
  source 1..828: mol_type = genomic DNA
atgaatcatgacgagctaataaaccttgatgcaatagattgggaagaagtttggcaaaagtcccttaaaaagagttttaaaaaggaaaagaactgggatgatatagcaaaagattttggacaatggcttgaaaatgacgactatcctgatgtattgcttgaagagatgagaattgatgaagaggacaccatactggatataggctgtgctgagggaaccataagcagaaagctagcgaaaaaagccaaatcacttactggtatcgataaatccaaattgatgttagaggaattaaataaaaaagcagaaaaagagagaatagataatattaccaccattcaaatggatataaatgaacttaattatgaggaaattggagactatgacatcattcttgcttccagatgcctaaatggaatatataatataaaaaatacacttacaacccttaatgaaatagcaaataaatatgtttacattacagtatttggttcaaaaagccataaatacaaaaaagagaaatgtgaaattgcaggaaaaccatttaaagcaggaactgactatatggttttagtgcttcttttaaaaagtcttggaattgaagccaatgttgttcagttagagtgtaaaaatctaaaggaatatcgtgactttgatgaagcaatcaatagatctgtttggagatttggagagttggaagaagatagagaaattgcacttagacaatatttcaaagagacccttgtaaaaaatgaaagaggaaattgggttaatccaaaggacaaaacagatttagttttaatttggtggaaaaaagaagaagaatag

SEQ ID NO: 933 - DNA, 825 bp, Methanobrevibacter ruminantium
  source 1..825: mol_type = genomic DNA
atgactaagaaaataatcattgaagatgagaatgaaattgattgggaccaattatggactgctaagatggataagaagggagaccgtggaaaagactggtctaaagcagcagaaaagtatagtgagagagccagcaaagataactataccgaacaattgatttcaaaaatgatcatatctaaagaggataccgttttggatgtgggctgtggagaaggaagcgtaaccattcctttatctaaagaagtaaaatccattacagccatcgatgcaacagacaagatgcttgaaatactagatgaaaaaattaaatctgaaggaattgaaaatataaagacaattaaagaggatattaatgatgtaaatcttgaaaaatatggcaaatttgatattgtgcttgcatctcgcgtagtaaacggcataaaaagccctaaaaaggttttttctaactttaatgaaatggccaataaatatgtattcattacattgtttggaccaaacaattggaaattggaaaaagatttccatgaatatttatctaaagagtataatggagctccctcttataccatacttctaaatctccttgcagagatgggaatttatgcgaatattataaatttagatgttgggccagtgcgcacttataagacaattgaagaagccatagataatggaaaatggaatttagctaaatttagtgaagaagaacaagagaaactgcctaaatttttaaatgaagtattaattagagataatgaaaccggtttgctatctaattctgaagacaaaccagattgggtgcttctttggtggaaaaaataa

SEQ ID NO: 934 - DNA, 816 bp, Methanobrevibacter ruminantium
  source 1..816: mol_type = genomic DNA
atgagttttcaaatagatgaccctgaagatatcgattgggcttacttctgggctaaaaaactggaatctaaaaaggacagggctaaagactggaataaggcagctcccaactttggaaagtctgcaaaaaaggacgattaccatacaaagattatagaaagaatcaatgtcagcaaagaggacacaatccttgacttaggctgtggcgacggaagcataacaattcccctagctaaaaaggcaaaatccgtcactggagtggattctgcatataagatgcttgagatactgaatgaaaatgccaaaaaggaaggaattgaaaacataagaacccttgaagaggacttatcaaatattagagtcaatgatgtgggaaatcatgacattgtagttgcatcaagatccttgaatggaataataaacattagggaaacaatctccaatataaatgaaatagctgacaaatacgtttatattaccctatttgggccaaacaattggaaaatagaaaaagagttctttgaaagcattgataaggaatatgtagagtttccatcccatagatacttcttcaatatacttgttgatatgggaatctatcctaatgttgaaaaccttaacatcggccataaaagggaatatgaaaacattgaagaggccttggaaagtggaaaatggagattggaacttttagacgatgaagaaaaggcacagctttataaatatttagaggatatattagaagaggatgataatggaaagctctccaatcctaatgataaagcagattgggttttatattggtggaagaaatag

SEQ ID NO: 935 - DNA, 495 bp, Methanobrevibacter ruminantium
  source 1..495: mol_type = genomic DNA
atggatggaagattagatatagattcttttgaaaaggcaatcaacggtttaaataaaaacttatacgatgttggagcactctttcaagcaaatatgcctcttttagcaagtgaagcaagccaagctgctaaagaaaactgcgttaacaagatggcagacagggttgatgaaagattagactcctttagagaaaactatggatattacaacgacttttatgagaaattaaaagaaaacgttaaaaatgacaccatagaaaacccagaggagtatgatgtgttcctagaacatgcaagcaacacttttccaaagtatattgatgaattgggacagaccattgatagtttatctggaattcctataaggactgaaaagtttgattcaacaatgagagaattaggatccattattgaaaacttcagatttgactttaaaaggaccttaacagtagctgatgtttataaagttcaaaaagaaatgaaaagccaagaataa

SEQ ID NO: 936 - DNA, 264 bp, Methanobrevibacter ruminantium
  source 1..264: mol_type = genomic DNA
atgaaagcggtctcttatatcaagagatccaataacagatatgtattagtaatgaatatgaatggaaaattcaagatgcccagtgaaatagcaagtgaaatggatctaagaataaatcagataagtgcagtcttatcggatttaaaaaaagaagatattgtaacttgcataaatgaagaagaaaaggtaggcagactttataagttaaccgacaaaggtttagaagcttataaagtcattaagactaacgaagagatacaatag

SEQ ID NO: 937 - DNA, 1671 bp, Methanobrevibacter ruminantium
  source 1..1671: mol_type = genomic DNA
atggacgaattagaagaaattgtatttaagcatgcattattgaatgcagcaaagcataagggaagcgcaaaccctggagcggttatgggctctataatgagcaatgaacctgaacttaggcctagagcaaaggagatcggaccgatttccggtaagattgtagctcaagtaaatgccatgtctcctgaagaacaaaagactaagatggaagagctaggagtggaagtggaagagaaaaagaaaaagaaagaggaaggattgcctaagcttccaggcagcaataagaatgttgtcatgcgttttgcacctaacccaagtggaccattgcacattggacatgcaagagcagctgttcctaatggtgaatatgttaaaaaatgtggcggaaaattcattttaagaattgaggacacagatcctaagcgtatttacgaacctgcatatcaattgattcaggatgatttgaaatggcttggtatagagcctgatgaagtctattaccaaagtgaccgttttgaaatctattatcaatatgctgaagagcttataaagcgtggagcagcatatatgtgtacctgtgacgggggagagtttaagaagcttaaggacaactgccagccttgcccatgcagagacaatagcgtagaggagaatatggagctttggaaaaggttccctgaaatggaagctggagaggctgtacttaggattaagactgatataaatcataagaatcctgccattcgtgattgggtggctatgagaatagttgaagaggagcatcctaggcttggaactaagtatagggtctatcctatgatgaacttttcagtatctgtagatgaccatttgcttggaatgacccatgtattgagaggaaaggaccatcttgcaaacagcgaaaagcaaaaatacctttacaaccatatgggctgggagattcctgaatttatacattatggtcgattgaagatggaagacattgcattaagcacctccaaggctatggctggaattgaagagggcacctacagcggatgggacgacccaaggcttggaaccttaagggctatagctagacgtggaatccagcctgagacaatcacccaattgatggttgagattggaatcaagatgtctgattcagcaatcagctggaaaaagatatatggattgaatagaaatctcattgaagagaaggtaaacaggtatttctttgtaccgggccctgtaaaaatagacattgcagatgttccagaggacattttaggatgggaggtcattaggccgctacatccagactttgaggaaaggggcaatagaactctaatctttgataaggaactatatattcctaaagcagactgcaaagatggaattatccgtctgatggatgctgttaatgttgaaatcagtggagaggatgtcaagttccatagcgaatcctttgaagatgctagagaggtcaaggcaagaatcattcaatgggttcctcttgatgcgataaaggctaaaatagttatggatgatgcttctatagtggaagggctttgtgaaaaggactgtggtgatttgaaagttggcgatatagtccaattggaaaggtttggatttgcaaggcttgatgagattaaagatgatgaattaatcttctattttgcacataaatag

SEQ ID NO: 938 - DNA, 447 bp, Methanobrevibacter ruminantium
  source 1..447: mol_type = genomic DNA
atggataaaaaattagcagttatttttatagggattcaaggaagcggaaaaacaagcttctataaaagatacttcccagattttgcccatgtcaatctggacacatttaaaaaaagaagcaaggaaagaaaattctttaacatgtgtatagaagaaggaaaatcatttgttgtagacaatacaaacccaactaaattcgatcgccaacgttatattccaactgcccgtgaaaatggatatgagatttggggatacttcttcaattcacctttggaagagtctatggaaagaaacaatcaaagagaaggcttggctaggattccaagagtgggagtcctatcaacctataaaaaattggaagttcctgaatatgatgagggatttgataaactgttctatgttaaaataaaagatgggcaatttgtggttggagaattagaagaataa

SEQ ID NO: 939 - DNA, 2289 bp, Methanobrevibacter ruminantium
  source 1..2289: mol_type = genomic DNA
atgaaagaggttacagcaattttactagttattattgccctaattgggataatatcaataataatagtgaaactatattacagagaaaaagaaaaagatcatgataaagaaagattagaggaattccttaactcaagcgattacaattccagcattgaatcacatgagaagattagctcaaggcaaaaagctgaaggctctaaaaagcctcagaaagtccaaagacgcagaagagttagaaaagtccctaaggaatctcaaaacagaaatgaaaacctaagcgaagcacaaatttatgctaacacactacaaaacgcatccaataatgatttatttgtagattatgatggtgataataggggagctcaaagaaccagaaaggttagaagagttgctaaagctgaaacagcagaaactactcaagctaacggcactgccgcattgttaagacaaagggcagaggctgcaaaagcccgcgaacaagctcctaggaccaaggtcagaaaggttagaaaagtaaaatcccaagaggatacagttcaaaaagttcaaagaactccagatagagtcaaagaacaaatgaacaaggaagagaaagtaaaacctatccaagaacctattacaaaagagcacaaggaaaccatcaatagcgtaagacaaggtgaaagtgaagtcaaacctcgtcaagtccctatgactaaagaacagaaagagttcatttcatctgaaaccgctaaaaaacttattgttgaagatgatgacggtgctgttaaagtagttaaatcaattaaaccagctgaagacattgaagaaatcaaggaaagcgctttaattgaaaaggctgaaactactgaagaagctaaagtaaaagttactgaagaaactcctaaagtagaagaaaaagctgaaactgctgaagaagaagctcctaaagtagaagaagaagttcaaactgaggaagctccaaaagtagaagcagaaccagtccaagaaactactgaagaagtaaaaactgaagaagctccaaaagtagaagcagaaccagtccaagaaactactgaagaagttaaagctgaagaaactaaagtagcagaaaaacctgcagaagaagttgctgaaaaagtagaagctccaaaagcaggaaaacctgcagaagaagttgctgaaaaagtagaagctccaaaagcagaagaaatcaaagaagaagtaaccaaacctgctgaagagcctaaagcagaagaagtaaaagctgaaactactggagaaataaaatcagacgcaccaaaagtagaagcagaacctacagaagaacctacagaagaaatagaagtagcagaacctacagaagaacctactgaagaacctactgaagaaatagaagtagcagaacctacagaagaacctactgaagaaatagaagtagaagctgttgacgattacatagaagctctagaaacagaaggcgtttatcaagatgacctccacattctcctaggagaagagaaaatcgaagatgaaggccctgaaaacgaatttgtcacaatcaattccgatagacaatcaagctctggaggaaacgacatattcagagatgctataaactccattagaaaattcagaggagcaaacacccaacagcataaggttgaagaaatcaaagaggaagtagttccagatgactacatccacaactttggaaacggtatagaagaaatcggagacacaatcacaatcactcctatccgtgaagacgaaatcgatgatttggcttataatcaacctaatgaagatgtagatgaaatctataaggaagtcaatgaagaagaatacaataaaaccattgattccgaattggatgaagcatacgaggatgttacagatgaaacttccgaagaagaagctaacacctacactgtagaggattataagcaaatcgaaaaagaggaagaggagaaaaaggcaagagaagaaaatacccaaaagattttagatcttaagggaattgaatccaaaaagcctcgctcttctaaaaaagaatctgtatctacagaacagccagaagatcctgctcaaaagcaattggtctttaccgaacaaagaagcaatgttgaagaggtttatatcaatggcaaattgattgaactcaaacttggccagactgtaatgtttaatcacaacaatgaaacttactctagccaaatattaaagttaaaaccaggatttgttggcgtcaaatacagaggcaaaaaagtctggattaaagcaaccgatgttaaaagagtgctttaa

SEQ ID NO: 940 - DNA, 1233 bp, Methanobrevibacter ruminantium
  source 1..1233: mol_type = genomic DNA
atggttaaaattaatgaaaattatcttttattgcaaaacagttatctttttgttgaagtaaacagacgtgcagagaaatatatggaagaaaacccagataaggatgtcatcaaaatgggaattggggatgtaaccaaacctttaacccctacagtaattaaggcattcaaggatgctgttgatgaaatggcagatggagaaacatttatgggttatggtccagagcaaggatatgactttttagctgaagcaatcattaaaaacgacttcaacagatggggagtcgatttagaccttgatgaggtcttcatttcagacggtgccaaatgtgataccggtaacatacaagagatttttgaccttgacaatgtaattgctgttactgaccctgtatatcctgtttatgtggacacaaatgttatggctggcaggtctggcctaataaaggatgatggaatgtatgcgaatatcgtatatctcccatgcactgaagagaacgactttgtaccagctcttccagaggaagatgtagacttgatctatctctgtttccctaacaaccctaccggaaccaccttgacaaaagatcaattggctaaatttgtcgaatatgcaaaggaaaatgacgctctcattcttttcgatgcagcttatgaagtattcataacagaagatgacgttcctcacaccatctatgagattgaaggtgctaaggaagtggctattgaatttagaagcttttcaaaaactgcaggattcactggtacacgttgcgcttacactgtagttcctaaggaaatcaagataaagacatctactggagatgagcaatctgtaaatgctttatggaacagaaggcagaccacaaaattcaatggagtatcctatcctgtccaaaaggctgcagaggcagtttacagtgaagaaggacaaaaggaaattatggaaaacattgaatattatttagaaaatgccagaatcattcgcgaaagcctatctgatattggattgaatgtttatggtggagttaactctccttacatttgggtaaagacccctaatgacatggaatcctgggacttctttgaccttcttttagaagatgcaaatattgttggaactcctggatccggatttggtccaagcggtgaaggttatttaagattaactgcattcaatactttagaaaatactaaagaggcaatgaacaggatttctaaattgtctttctaa

SEQ ID NO: 941 - DNA, 681 bp, Methanobrevibacter ruminantium
  source 1..681: mol_type = genomic DNA
atggaagctgattttagccttgttaatgaaaatgatgatttgcaggatttattctccaaatacggagctcttgctttggaaaaacaggaaaacctctccaagcttgttggcgatagcgagcctgaattggatattgaaaatggaatagtcaagtttggtgataaggagtttcctattcaacttctagggtttttagatcctgatgaggacacttggtcatgggcatgggacaatgaggaaataggattccctgaagagctcattgaggaagccaaggaagttaaggaatttggagaagatcagaatatagttcagtttaagcaaagcatgtttgctgcaagctttgaggaagcccatattttatccatgactgtatcttcaatttttggagacgacgcatactgtggagttaattatggaaactttgtattctttgtaaccataaaatctgatgagattccatcatctgagggtcctgaagaattctccaacattttcaatgaattccatcgcagatttgaagtaaatcatttaaaggctttggaatcctatgcaatgcttaagggttatgaatacaaatacagagatgactttgctcttgttaagattggagacaatagggtagttgtaggattaaccgaaagaaaaaatgttcaaagcattaagtttattctagcttaa

SEQ ID NO: 942 - DNA, 627 bp, Methanobrevibacter ruminantium
  source 1..627: mol_type = genomic DNA
atggatagtgaattaattgaagaaataagctttgaaattcaattattgcttaagatgggcttctataatgatgaagagattttagaaataattgatgatgaatttattgaagaggacattccaaaggaaaagcttttagaaatattctcaaatgttaaagagaacttcgattgtccaaaaagcgattcagaagactttttgaatctgaaagaggcttttttaaacttgtctaaaaatcataatatattaactattcataatgccggatacgatattgaagagggaatccaagactcatttgaactattcacccatcttagaaacaataaatatgaagtggaaggattctgcttctatagctttgaggatattgaaattgcaattgaagaaaacagccttttaatagcctttggcgattttgaatttgatgaagataaaggcctaaagatagctaagacagttaaagatgagctagtttccaagggattcaatataaattgggatgaaagcattgatgagagaattgaaatagtggatttcaattggcaaaaggcttatgaagatagggattattccatggatggagctttaagtgattatattgaattaaataacttagaagattaa

SEQ ID NO: 943 - DNA, 669 bp, Methanobrevibacter ruminantium
  source 1..669: mol_type = genomic DNA
atgaacgctcgttcttttgaaatcattgaagaggccatttcaaatggagtttggacatggcttgagttggattgctattcaaattcactctatttagagtttgaaaggcttcaattattgtctaaatccattgtaaatccatttaagcctgttcaagaatctacttataacgattataggggagaattggctattcgatttggcacaaacatttatttggctattctttatgatgatgaggattcttttgactttttagaccttgaagaggatattttaaattccttcttaaattcagatgccaaattaagcgataatgattcctatttctataggcagtttaaaaaggaaataagaggattcaagtttcaggatgaggattattcaagtaatctcactaaaaaatataaaaaagagatagttttagcccagcttcccaataaaaaagatagttatgactttttattgtcatttgaattagacaactttgcaataatcgttaagggagacattatttcatgctttaatgatttcgaatccttaagtgatggcgatataaagagagcttccaacgattggatcttgtattatttggattattggataaaaaaaggaactgaagaggagtatgatgaagatttcctttgtgaaaatatttcatttgactga

SEQ ID NO: 944 - DNA, 543 bp, Methanobrevibacter ruminantium
  source 1..543: mol_type = genomic DNA
atgaatcaattaagaccaggatataactttttagccactcatgaactgttttttgatgagattcctcatcaaagggccattcatttggcaaactatgaattcttttggaacatcctagatgagcttgggccatttggaacagaagagtcatatcttgccttttgcgaactatgcgattggctaatagataatcccaatacgcccataatagaatgttttagatggatattgtcctcttgggacattgaacttgaggattttgacgataaggttattgaaaacgagaatatcctaaagataatctatgacttggatttctatgaggatttgatgatgctggactttaccatcataagcacagggttcggtcagcttattcttcaaggaaaaatcgatgctgatgtaaagaacattattcaattgtcccttctgcgtcagatgaactctcatgtactggatgagtatttgggaagtaatatgcagtataaatacgaaagatatttgtatcttcaaaagcttttggacattttggaagaggcttag

SEQ ID NO: 945 - DNA, 1020 bp, Methanobrevibacter ruminantium
  source 1..1020: mol_type = genomic DNA
atgacttgtagtatattagttggaggagcttggggagatgaaggcaaaggaaaatgcattacttacctttgcgatacagacaaaccggatatagttgctcgtgcaggtgtaggtcctaatgctggacattcagtggaattcaatggagaaaaatatggattaagacttgttccatctggttttgttcaaactgaagcccaattgcttattggcgctggagtattagttgaccctgaagtgcttttccatgaatttgactatttaagcaaatacaatgtgagggagagaactttagtggaccctagatgttcaatcatcgaacctgaacacaaagagagggatcaagcttcagagcacttggctaaaaagataggaagcacaggatccggttgcggacctgccaattcagatagggttttaagaactgctaaaatggctaaggagattccagagcttgcagactatttgactgacgtttctttagcagtcaatgacgctttaaatgatggtcaagacgtattcatagaaggctctcaaggatttgccctttcattatactatggaacctatccttttgttacaagtaaggacaccacagcaagcagctttgcagctgatgttggggtaggccctactaaggtggatgaggtcatcaatgtattcaagtcctatatttcccgtgttggagaaggtcctttcccaactgaaatgagtcaagaggaagctgaaagcaaaggccttgaagagtatggtgtagtaactggaaggagaagaagaatcggttactttgatatggagcttgcaaaagagtcatgcagaataaatggggctactcaaattgctttaacctgtgttgacaagttatatgactgtgcacgtgttagggactatgctgaattgtctcaagaaactaaagacttcatttcagaaatcgagcaagagactggcgttcctgtaactattatttctactggaccagacttgcaagacactattgatttaagaaaagaattattataa

SEQ ID NO: 946 - DNA, 1185 bp, Methanobrevibacter ruminantium
  source 1..1185: mol_type = genomic DNA
atgagatgtgttggtacagttgtacgcggaataagaacacctattattaaagaaaacgacgatttagcaactatcgttgtagattcattgatggcagcaaaagaaagtgaaggatttgaatttagagacaaggacatcgttgcaataacagaagctgttgtagcaatttccgaaggaaactatgtgactgtggatgacgttgcagaggatgttgcaaagaaattcccatctaaagaaatcggagtgaccaatcctatcctaagcagaaacagattctcaataatcctaaaaggtattgcaagaggaatggataagattacccttttaagctctttccctgcagatgaagtgggaaacggcattttagacgaacgtgctttagatgaaagcgaattcaatttaggaagcgtcatcactgaagaggactacgaaaagaacttcagttcctggattcatccatttaccggaatcaacatggttgatttctatagggaattgattgaaagcgaagactgtgaagttgaatttgtcttttcaaatgacgtaaagaccattcttgactataccaatgacgtcttgacctgtgacatccatacaagaaagaaaaccacaaaaatgcttaaggaaaaaggagcaaatgtatatggattgcatgagattctagttgaacctattggagattcaggttgcaacccagaatacggattgctcggttccaataaggcaacagaagaaagattaaaactattcccaaaaacaggagataaattagtcaatgaagttcaaaagagacttattgaacttaccggcaaacagattgaagttatggtctatggtgacggagcattcaaggatcctgtcggaaagatttgggaattggctgaccctgtggtttcacctgcacatacagcagggcttgtaggctatcctaatgaaatcaaattgaaatatgtttcagacaatcaattcgctgacttgcatggagacgaattgaaggaagcgattaaggaagagataagacaaaaggctgaaaacctaaccggacagatgattaccgaaggaaccactccaagagtattaactgacttgattggttccctttgtgacttaaccagcggttctggagacaaaggtactcctgtcatattcattcaaggatacttcgacaatttagcaaatgactaa

SEQ ID NO: 947 - DNA, 384 bp, Methanobrevibacter ruminantium
  source 1..384: mol_type = genomic DNA
atgaaagatattattaatccgaatgtagaaattcctgatgaacaggtagctatggcattttttagaagtgtccgttgggttaatggggtctattgtcctaaatgcaagtcatataatgtcaataacagaggaaaccaaggcagaactcgtcgatatgtatgcaaagattgcggatctaatttcaatgacttttcaggcacaatcttccataaaagcaagataccgcttaatgtaatgctttatattttattcaatttggatgaaaaaaccaccactcaattgtctgaagagttaggctacagcaggcaatgcatctcaagaatatctaaattatttagggataagctattgagcaatcctgagttttttgacattgaagaatga

SEQ ID NO: 948 - DNA, 948 bp, Methanobrevibacter ruminantium
  source 1..948: mol_type = genomic DNA
atggataaaaaaactctagcaattattgctattatcgttatagctcttgtagctgttggtgcttactttgcaaccagcggtggatcaagtgacaatgtagtaagaatcggtcacttgccatcagaccatgacaccgcacttttcgttgcaaaagagaagaagttgtttgaagatcaaggtctcactgttgaactaactcaatttaacaatggtggagacttaatgactgctatggcaagtggagatattgatattggttatgcaggtatcacccctgtaatgtcttccatttcccaaggagttcctgtaaaagttgtatccggtgctcaaattgaaggaagcgctatcgttgccaataagaacagcggcatcactaccgttgcagacttaaaaggcaagactgtagcaacccctggtgaagcaacaattcaaaacatgcttttaacctctgctttaacacaagcaggcgtatccactgattcagttgaattcacaaccatgaaagctgctcaaatgactgacgctttaaaggcaggtcaagttgacgcaatgatcatttgggagccatattcctcaattgcagttaagaatggtgacggcgtattgattgaaaacagttctgaaatcattccaggacacccatgctgttgtgttgtagctagggaagacttcatcaaggaccaccgtgactcattagacaaggtattgaaagctcatgaagaagctactaaattcactaatgaaaaccctgcagaagcggctaagatgttacctgaagacatcgtaccagatcaagagttacaagctaaagtaatcgcagataccgttttcatttctggtttagatgctgagtacaaacaaaaggtcatggacttcatggctcttgaagtgcaattaggtcttttaaaacaacctttaactgaagaacaaatctttgcagacttatag

SEQ ID NO: 949 - DNA, 744 bp, Methanobrevibacter ruminantium
  source 1..744: mol_type = genomic DNA
gtggaaattaagaaaaaatttttaccatttatcctaccggcaatacttcttataatctggtaccttattacagatggtttgcatttgattccttattatatcctgccaagtcctttaaatgtatttaatgcggcatggactttaataactaatggaaaactcttcatgcatacctctagcacacttataaaggtattctcaggtatcattttagcatctgtagttgccattccacttggaataatccttggatggtatgagaccttagacagattaagctccttaatcataagtatcctaaggcctattcctcctatctcatggattccattctccattctttggtttggtataggattatcctctgcagtattcgttatctttatcggttgtgttttctcagtacttgtatacacaattgacggtgttaaaagaaccgataatgtattaatcgaagcagctcagactttaggtgcaaacaattgggatatcttgcttaagattgtccttccatccactttgccttatatagtctctggacttaaggtaggtgtgagcatagctttaatgtgtaccgtatctgctgagatgattgcttcaagcagaggtttaggttatatgattctaactgcaagtcaattgttccagcctggaactgtggtagttggtatgatagttattggtataatcggtattttatttgattatggatttagaaaagcgcaagagagaatattctggtaa

SEQ ID NO: 950 - DNA, 762 bp, Methanobrevibacter ruminantium
  source 1..762: mol_type = genomic DNA
gtgtttatattggcaattgatataaaaaatgtttctaaatcatttgttacaaaagataaagatttcatggcattgaaaaatattaatctccatgtggatgatggagaattgatctgtctattgggaccttccggctgtggaaagaccaccttgcttcgtatggtgggtggtttggaaaaacctgatgaaggagagatatatgataggggagagcttgtaacaggtccttccaaagacagaggattcattttccagcaatattctttattcccttggctaaatgttttagataatgttatgtttggattgaatttaaataaagatacaagcaaggaagaaaatttggctgctgctgaaagatatcttgaaagggtaggattggctgaatttaaatacagctatccccatgaattgtctggtggtatgaagcaaagggtggctatcattcgttctttattaaatcacactcctgttcttcttatggatgagccattctcagcagttgacatgcttaataggcatagtcttcaagagcaacttataggagtttggaaaagatttaataccacaattctttttgtaacccacgacgttgacgaggcagtctatttggctgataagattgtgattatggataagaatccgggcagaattcaagatgttgttgaagttcctcttgaaaggcctagacaaagggaatcaagagaatttttagacttccaggatgaaatagaaaagctgttaggtgtttgggaaccttag

SEQ ID NO: 951 - DNA, 801 bp, Methanobrevibacter ruminantium
  source 1..801: mol_type = genomic DNA
atgataggactttcaatagctggatttgacccttcaggaggagctggaataagcacagatatgaaaacaatggctgcacatggagttcacccctgttcagtaatcaccgcactaactgcgcaaaatcctaaaaaagtgttttctgtgcaagctatagaaacctcatatattaggcagcagatagattccatatttgatgagtatcctatcaaatactcaaagacaggcctattatactcaaaagaaatcatccaacttgtaagtaaaaaggtcgaagaattaaatttacgcatagttgttgacccagtgatggtggcaagttcaggtgggcaacttgcaaagaaggaaatggcaaattcattaaagaaatatctcttgaaaaatgcacttcttgttactccaaatgttaaagaggctgaagagctttcaggaatcagcataaaatcaatagaagatgcaaaggaagctgcatataagattggagaatgttgcaatgtaatgattacaggtggccatcttgatggaaacaatgtcatttacaataaacaaaaggatgagctaagcattttaaagcagaatctaatcaaaacagataatcttcatggcacaggatgcagtctctctgctgcaatatgtgcaaatcttattatattaaatgaaaaggacaaagacagcaaggatgaaaacaatctagagattgcaatagaaagatctaccaaattcatttatgaagcggttaagaagggtaggtatggcacattaaatcctaattttaacagcaatcttgactttttaaaatag

SEQ ID NO: 952 - DNA, 705 bp, Methanobrevibacter ruminantium
  source 1..705: mol_type = genomic DNA
atggataagatttatgcaataattcctgtaaatcaatttgcaaatgctaaaacaagattatctccttttctaacacctgaagaaaggagggatcttttaaaagccatgctaaaagacattacagatacattaaagcctattgtagataaggtcgttatcatcagcagagatgaggaagttttagcatatgcagaagaattggagcttactacaattgttgaagaggaatataaaaaatccaaagctgttaactcctctgatgacaaccctttaaataaggccttaaaacaggcaatgaaatggtcaagaaagaaaacccgaaaagtgataatcctgccatctgacattccacttattggaaagaccaatgtaaagctcctaattgaccaggcaaagaattttgattttatcatcgttccttcaaagggaggaggaaccaatactcttatcataaagccattggcaattgacatgaaatttgaaggatttagcttcaataaacatatcgaagaggccaaaagaaaaaaactagttcctattgtacatgattcattctatatggccttggatgtaaacaccacagaggatcttggagaaatcatgcttcatggaaatggaaccgaaaccaaaaaatacttagaatcccttggaatcaaggtagaatcctcccatgaccatgaaaggcttaaagtgactagagattag

SEQ ID NO: 953 - DNA, 1407 bp, Methanobrevibacter ruminantium
  source 1..1407: mol_type = genomic DNA
gtggaaaattttagtgaatggttccatgagatattagaaaaggcagaaattacagactcaagatatcctattaaaggaatgagcgtatggctcccttatggatttcaaataagaagagcatgcttaaacatctacagagacctgcttgacagcgaacatgatgaagtattgttcccactacttattccagaagaggaacttgcaaaagagggaattcatgtaaagggatttgaagatgaggtctattgggtaacccatggaggtcaaaaggaattgaatgaaaagcttgcaataagacctacaagcgaaactgcaatgtatcctatgttttccctatgggtaagatcacacattgaccttccaatcaagcaataccaagtggtaaacacattcagatatgaaaccaagcatacaaggcctcttataagagtaagggaaattaccacctttgcagaagcccacactgttcactcaagcccagaagaagcggcagaacaggttgaaactggaattgaaatatataaagagctctttgatgaaatgggaattgcatatctcatcagcaagaggcctgtctgggacaagttcccaggtgcagaatacactatggcatttgatacaatcatgcctgatggaaagaccttgcagattggaacagtccacaatttaggccagacctttgcaaagacctttgagataacctttgaaaacaaggaaggaaaccatgaatacgcctaccagacctgctatggaatctcagatagggtaattgcagcagcaattgcagctcacggagatgaaaaagggcttatcctacctccaagaatcgctccaaagcaaataacaatcattccaatcatatttaaggatggaggagaggaagtaatggctaaatgccttgaaatcaagaaatccttagaatcaaaaggaatcagagtccaaatggacacaagagacataaggccaggtaagaaattctttgattgggaattgaaaggaactcctcttagattcgaattaggtccaagagacttaaagaacaatgtagctatccttggcagacgtgacactggtgaaaagatagaaataagcctagaagatgatcttccatcaaaagtagaagacttattaatggaaattgaagaaaatctaaaagcaaaatcctggaaagcacaggaagataaactaatcactttagaaagtcttgacaatgttggagaaattgtagatgaagaaaaagtggttaaattctactggtgcggagaagaggaatgtggtaaggaaatagaagaggaaacagaagttgacattcttggaatcaatgaggaaaacataaaaacagacaagatatgtcctcattgcggaaagcctgcaaagcatgttgcgcttatggctaaaacttactag

SEQ ID NO: 954 - DNA, 1044 bp, Methanobrevibacter ruminantium
  source 1..1044: mol_type = genomic DNA
atggattctaaaaagattcaaatgccaagagaagtacatataggccctaatgttttagatgaagttggggaaatatgtaaggatttacgtttatttgatgaagctcttgttgtatccggatttcatacatttgatgttgccggtcagcagacagttgacgctttagaaagttctgattttggtgtggatgtcgtaaaggttaaggatgcatctgtagaatcagtggagaaggttagagagaagattgccaatgcatctgttgtattgggagtcggaggaggtaagataattgatgttgcaaagcttgcttccacttatgagcattcctacttcatttcagttccaaccactgcatctcacgacggaatagcctcccctatggcctccattaagaatgacaagggatccatctctaaaaatgcaaattctccaatggctgttgttgcagacactggcataatcaacacttctccttttagattaatcgcttcaggctgtgcagatatcgtttccaattacactgcaatcaaggattggagattggcttataggttgagaaatgaaaagttcagcgaatctgcagctgccctttctgaaatgactgcaaagctcattatcaattcctctgacagcattaaggaaggattggaagaaagcgctagaatagttgtaaagtcattgttcagcagtggaatggcaataagcattgcaggttcaagcagacctgcaagcggttctgaacatctcttcagccatgcattggatagaatcgctaaaaagccagcattgcatggtgagcaatgcggtgtgggaactatcatgatgatgcacttgcatggcggtgattggagagctattcaatctattttaaagacaattggggcacctacaaatgcctccgaattaggattggatgatgatgagataattgatgcattaacaattgcacatacattaaggcctgaaaggtataccattttaggtgataatggattaactagggatgctgccattaagttagctagaaaaactgaggttatttaa

SEQ ID NO: 955 - DNA, 441 bp, Methanobrevibacter ruminantium
  source 1..441: mol_type = genomic DNA
atgataactttaattggtaagaaattagcaaaggaaggagaaagctttatattttatgagcccgcagaggaatgttcgacttgtaggtttaaggcttcttgtatagattcccttgaagagggacataagtatacaatcacggaagtccgtgatgtggaacagaagtgtcctattcatgaggatgaaaaggttcaggtggttgttgtggaaaagggagagaccactattttaaccgattccaaaggagtctttgaaggatccagctttgaatttaatagacaaggatgttcaaataaggattgtgactttagggacatgtgtttccctgaagagattggaaaaggagaaaaatgcgtttatattaaggaccttggaaagttcaatgactgtcctcgcggaaactctttgattaaatgtgttgtaaagatatatgacaaataa

SEQ ID NO: 956 - DNA, 669 bp, Methanobrevibacter ruminantium
  source 1..669: mol_type = genomic DNA
atgagtcaaatgaaaaaagattgtggttatgctgctgcagaattggtaaaagacggtcaagtattagggcttggaactggttcaacaaccctttattttattgaaaaggtagggatgagagttagagatgaaggaattgaagttatgggaattccaacttcctttcagtcttccttgcttgctcgcaagtggaacattccaataacaagccttgatgagcatgagattgatttggctgttgacggtgcagatgagatagatccggactttaacttaatcaaaggtggaggagctgcacatactatagaaaagatagttgactattctgctaaggaattggtaatcattgcagatgattccaagctcgttaatgttttaggtgccttcccacttcctatagaaattattccagtttccttaaaccctgtaacaaaggctttagaggatatgggaggggaagtaaacattagaatgggccaagctaaggatggtcctgtcataaccgacaacggaaacttcattttggatgtttcttttggagagatagacaatcctatttctatggaaaaagagttaaacacccttcctggagttgttgaaaacggattgtttactgaaatggtagataaggttattattggttctaaagatggtgtaaaatacttataa

SEQ ID NO: 957 - DNA, 1335 bp, Methanobrevibacter ruminantium
  source 1..1335: mol_type = genomic DNA
atgaaagtagttatagtaggtggaggagctggaggtatatccacagcttccaatcttagaaaattagacgaagaagtagagattgttgtattgactagagataatcaagtgtcttactctccttgtgcaattccttatgtactttccgataggatccattcatttgatgacattgtaatgaggactgttgatgattataaggcaaaaaacattgatgttatgcttgagactgaagtgactggagtcgattcagctaaaaagcaaatcacctattctaaaaatggtgttgttcaaaccatgaactatgataagcttgttcttgcaactggaggaagtccatttgtccctcctatgaaaggggttgatttagatggcgtatttaagataagaactcttgatgacggaaaacaagtaaaggaatgggctgaaaactgtaaaagcgctttagtaactggcgcaggtcttattggtattgagatagcatatgcatttaaaaagatgggcttgaaggtaaccttatgtgaaatgttgccacagatcgttccacgttcacttgatcctgatatggctaaaatccttactgactatttgattgaagagggaattgatgtggttcttggccagcctattacagagcttaaaggggaagatggcaaagtcaaaaaggctgtctttgaagacggaactgaagcagatgcagatatggttattttggctacaggtgttagagcagagcttaatttagcaaaaatggctggatgtgactgtggaagatgggccatacttgtaaatgataggatggctaccaccgtacctgatgtctatgcagttggagactgtgtagagtcttacagtgcaattctcagatcaaacactgtttctcagttaggaaccactgcagttcgtcaagctaagaccttggctcagactcttgccggcaaacgttcaagattcaatcctgtgctcaattccatggtatctaaagtaggcaaattggagttcggtgcagtaggccttaccagaagctttgcacagcagaacagcataaaggcagttgtaggaaaggttgaggcattgacaagggcaaggtattatccaaatgcaaagcctatgaatgtaaaggtcatctgtgatgcagatggtacaataataggttgccagataattgcagaggaaagggtagctgagagaattgataccatgacattggcaatcactcaagagcttacctgctttgaactcagtaatatggagtttgcttatgcacctcctgtttccatggtaactgatccattggtaattgctgtagaggaagtcagtaaaaagtttaattaa

SEQ ID NO: 958 - DNA, 2076 bp, Methanobrevibacter ruminantium
  source 1..2076: mol_type = genomic DNA
ttgacaaaaatatttatttcatgtgcccttccatatgcaaacggtccatgtcatttaggtcacttacgttcaacatatattccagcggatatctatgcaagatataaccgtatggctggaaatgatgtcttgatggtatgtgcaaccgacgagcatggaactccaattgcagttaaagcagatgctgaaggcaagaaacctattgaagttgcaaaacgctatcatgacatgatagcccgtgacattgaaagctgtgacatcagccttgacaattttgcaagaacaagcgacgagttgcattataagatctcacaagacttcttcctatacctttatgaaaagggattgatctatgaggaagccattcaacagctttattgtgaaaactgtgaaaagttcttgccagataggtatgttgaaggaatctgtcctgtctgtggggctgaagcaagaggagaccactgcgaatcctgcggaagagctttggaaccgactgagcttcttgagccacactgccttacctgtggaaatactccagtaataagggacagcacacaatatttctttaagttaagccatttccagaatcaattggaagagtatattacaaccaacgagtatcttcctccaaatgtcagaaactatgctcagaactggcttaaggaaggccttgaagattggataatgacccgtgatatgaaatggggtattccagttcctcttgaaggcgctaaaggaaaggtcatctatgtatggggagaggctttcatcggatatatttcctctgcagctgcatggagcagaagaactggaattccttgggaagactattgggatggacatgttgttcatttcattggaaaggacattatctatcaccattcactcttttggcctgctatgcttatgggacatgactgcaagttacctgatgacatttttgcaggtgaattcttatcccttgaaggcagaaagatgtctaccagtaagaattgggttgtctgggtatctgattttgtaaaagacttcgaatcagacttgcttagattctatctaactattagcgctcctttaaataaagacactgatttctcatgggatgactttggaagaagggtaaatgatgaattggcagatataattggaaacttcttgcataggacttttacattcactcataagttctttgacggtaaggtccctgaatatgcaaatccaagtgaagaggacttggaatttgaagctgagattaaggaattacctgctaaagtgggagagcttatctcaagcatgaagtttagggaaggtttggttgagattctcaagactgccaaatctgccaataagtactttaatgatcaagagccatggaaagctgtaaaagaaaacccacaaaaggcttctaactgtttatatttatccaatcagttctgtaaatccttggcaattcttttaaaaccttatattccaaataaggcagatgcaatctgtgatataattaatatttctaaggaaaacgtttgggatgatgcaagcatattcctagagaatggtcatgagataaataaggcaaagccactctttaagaagattgaagataaggttattgaagctcaaaaggaaaagttatatgctaacctagaggattcagaagaaactaaagatgataaagacaataaaaaagataaaaaagataaatctaataagaataaatcaaataaagacaaaaaagataaatctaaatcaaatgatggtgaaaaaatggatttaattagcattgatgaatttgcaaaagtggaaattagaataggaaagattgtagagattgaaaaaatagaaaaatcaaataaattattaaagacccaaattgacattggagataagaccattcaagttattgcaggtcttggaaaaagatatgctcctgaagacttattaggcaaaaaggtacctgtagtaaccaatcttaaaccagctaaattgatgggtgaattatctgaaggaatgattatggctactgaaagtgcagctattttaactcctgacgattgtgaaattggcgaattacttatgtaa

SEQ ID NO: 959 - DNA, 1578 bp, Methanobrevibacter ruminantium
  source 1..1578: mol_type = genomic DNA
atggatgaatcattaatgataacagagtctgagaaatttttaaatcaaatagagagggagaagttagatctaaccaatcttaagtctgactttagtgacttggagtcatatttagaggtttacgaacttctaaaaagcaactttgacaagctccaggacatgaaggaaagtatggatgagagaggttatactgctccattcagatctctcaatcgttatggttctcgtgtaagtgaggatgttgattatgaggaactaggtgaattgaaccgccataacactatttttagaaacaatgcctctgctaaaaagaacagctttgatagggtaaaatatgccatagcagctcataggattgccttaggcaatcttgaggaatatgccaaaatcagatgcaaggactgtcaaaagtcatataaggttagcacattccttgaaaactctaagacctgcaaatgcggaagcactgattttgagcttaaggtaaaccactctggaatccatagattggaaatcattccttatcttccattatccggcaattatatggttcttctctccagcttatccggttggggaagggattcattcagaagaatcctaaacatattgcagcagaaaagaaaaggtgttgtaaagactgtaactcctataatccgcataaaggaaaatggcagaaccattactaaaagggtaaaccttgatagtgaatttgcagattgctatgaagaggaacttagaagaatatatggtaagggagttagaatagaaaggcttgaattccatagtacaaagccaacaatagttaatgataagtatacccgtaccaatctggccttggcttatgtcaagcatgctgaagacattgtttcaagacatgaggaagagatttttgaggaaaacatcaaggacttgaataatcttaagacctatgatgagcttatctattcagtcaatcttgaaaagcctgaatatatggatgaggatgacttagactcttggagagagcaaaagattcaggacaatcttttggaattaggccttatggacaaatatgggcacttagataagcaattaaagaaagacctaaaggaaagggagagaataaagtctaagatttttgcagacattgcaccaacccttattctttgggacatttccaaatattatctctgcacatcctatgaccgccgtaaaaggtatggatctccattccctttcattagaaacgatttagacagacagcagcgtaaggtatttgcaaatccccatgcaaatgtagtaggtctccttagggaaaaggagaaaaagcatatgatagcaatagatgagatggatttattgctgtataaaaagtttaaattggaaaagagaattaagaacactaattttaagctgaattatgcagcactaggacccgctattgtatttgcaaattctgattacaacattaaggaagtttctagagcatataaagttggagagaaaagcgtaaaaagagagattatgaatattaagagctttagaaagccaaacagtaaaaaatcaagagagtttttaggtaagattaaggggtag

SEQ ID NO: 960 - DNA, 708 bp, Methanobrevibacter ruminantium
  source 1..708: mol_type = genomic DNA
atgagttatgattttgatgactttgatgaggatttcgatgatgatgagtttgatgaatctgaggattatgatgactttgatgaagatttcgaagatgattttgaggacgattttgaagatgactttgatgactttgacttcgatgatgactttgacaatctagactcaaaatcaaaggaagatattgatatatttgatgaaaaaccacttgaaactgattcaggttatgaaagaaccgctgtagaggttcatgtttcaagtcctttaagttcaagaaagcttgttgaacttatggacacttatccttccttaaagagaattacttgtcctaaaagcatttatgatagaatgtcttcaaaatatattaaaattttaaaggaagatttgaacatcactgttgaaatcaaatataattggggaaagaaaaaatacacaaaaaaggaagtcgattctgtaattgaattgttcaatgagggaaaacgttcaggtgaaattgcttcacaattggatatgcctatttccaatgttaattatatcaaatccaaatactctgataggatcaatgtaaagcattataaaaagaaatatgatgatgaatgcagattaaggataaaatccatgaaggaagatggcttaaagccaaaagagatttctcaaaatctgggcattccagttagatctgtttattatattttgaataagaaatga

SEQ ID NO: 961 - DNA, 14790 bp, Methanobrevibacter ruminantium
  source 1..14790: mol_type = genomic DNA
atgaataataagacattatttatcattggtttattcatatgtcttttatttaccatacctatggtatcagctgcagatgctgattccaatttaattgataattcagtaattggaacaaatatcaattcacaagcaattacaacatctgatgcaagtattgatcacagttcaaatgcaaatgcaatcaatactaatattaattctgatgatattgtttctaataacaataacaataattccataattgatattaatgattccgatattgaatctcaaaaggatggttcaagtaagaatattatcaagtctaccaataaaaatacaaatgattccaataatgaaactgaagataatattctagtaactgatatcaatttaggtaaaaataataaaaattcaaatgataaaaatattttaagtgcaaatgcactaactgctgatggaactggtacaactttcggtgacttgcaatatatcattgaccaagatacaaccggtaccattactttagataaaaattataaattcgaatctggcactgatgatgcttatctcgatggtataactataaataaggccattactataaatggtggaaatcatactatcgatggagaccacttggctagaatatttaatattaatactggatctgcttccgatattgttgttttaaatagcatccatttcattaatggtatggcagatggcagtggcgataatgccaatggtggtgctatttatattggttctccaactaccttaaattatattactgcaatcaattgtacagctactggtaatggtggtgccatatatgcacatgcagatggtaccaatattgcagctaattacctatacctatataacaacactgcagtgaatggtggtgcattatatgtttatggtaatgattatacagtcacagtagtggatgcccgatacaattctgcaagtggaaatggtggtgcaatgtatgcatacggaaacagtttccaccttaacaaggttaacttcattaacaatacggcatacggtgaagattcagaaggtggtgcaatattctttgcccataattctgatgatagtattgttaacaattcctactttgcaaacaactctgcaaatagagatggtggtgcaatagtttgggatcaaggtgcacacttcggtgaactttataattccaagttctacaacaatactgctaaccatagttcaggtgctgttcgttggagtggtgaaaatggtaccattgacaattgtagttttattgacaacaaggcttatggaaccaatttagaacctggtgattttgatcaaggcggtgaccagattcttggtggtaatggtggtgctattacttggttaggttctgtgggtattattaggaattcaaacttcactgataactatgcagaggcaaatggtggaggtatgttccttatagctttcgatattaatgaccctaattccatatgtaacgatacccatattatcaactgtaacttcattagtaatgatgctggacttaatggtggtgcattagattgggacggtaaggcttacaatggttctgtatctggttccaaattttataacaataccgctgcacgtagtggaggtgctatcttctggaaaggtaatggaggtatcataacacaatctgactttaagtataactctgcaaatggtactcatttagttcagcctgaaggattccttacccctggtggtaatggtggtgcggtaatcatcacaggtagtgatgttaatattacatattccaatttcactaacaatagtgctagagctcgtggtggagcggtttacttgcagctcaataacaataccatggttttgaattcctcatttgaaaataatagtgcaggtactaatggtggagcacttgacttttatactggtgctgaaaatggtaaggtaattaactccacatttttgaataatactgctaatcgtagtggtggtggtatatactggaatggtgaaaaaggtgtaattaatggtagtattttctatgataataaggctttaaatcaaggtacatacgtaaatggaagccaaattaccgatggtggtgacggtggtgctatcatttggacaggttcacatggtactttagaaaattcaacctttaaaaacaacaatgctactaaccgtggtggagctattttccttgagaaacataatctggaggaccctaatgattattgtaaaaatattacagttttgaattgtacatttgaaaagaattctgcaggtaccaatggtggtgctattgattggtttgaaggtgcagaaaatggaagaattattaattcaacattcactgaaaactatgcacgtagatctggtggtgctgtattctggaatggtgttaatggtactatatccaattcaacatttacattaaacgaagtaggtcttgaaggtgcagatactggaactggtgagacaattccaactggagatgatgatggtggagctatcaaatggacaggtgcaaatggtttaattgaaaattccatatttagagaaaataaggctttagaaggtcgtggtggagcaatttatcttgaaaacaatgagaatggtactgttaacaattgtactttcgaattgaatagtgcatttacaaatggtggtgctatagactggcacgaaggtgcaaagaatggtcagcttatcaattccaccttaacaaacaacactgctggacgtagtggtggtgcagtatattggaatggacacaatggtacaatcaatggaactaattttacagataacaaggcattaggaactcatcacactgaaggtcagactgaaggtggagatggtggtgcaatcatttggacaggttcctatggtactattgagctttctaacttccataataacagtgcacgttggagaggtggagcaatcttccttcagaaaaacgtgcatgaaggggaagagcattgttataatacaaccgttaagaattcctactttgaagagaactttgcaggcagtaacggtggtgctatcgattggtctgcaggtgctatgtatggtaaattgattaattcaacattcataaacaacactgcggaacgtagtgcaggtgctgtttactggaatggtctatatggtgaaatattaaattccacatttgaaaacaatactgctataggtaacttcactcatgacgttcgtcctgaagtggatgaaacctatactgttattggaggtaacggtggtgctgttgtaattactggaagccatgcaaaaatcgatggatccaactttacattcaacactgcaacaagacttggtggtgcaatcttcttccacgacaatacaaacggtactataaacaattccatctttactaataacactgcaggtctcaatggtggagcccttgacttctatgaaggtgcgagagatggtcaggtacttaattccacctttatcaataacactgcaaaggatggaaaaggtggtgcaatcaactggataggtacaaatggtactgtagatggctgtgactttataaacaacactgcaaatggatctgatgatgagtctggtgcaggtggtgcaataaatgtagatggtattaacacctatattgcaaattcaacatttacaaacaacagctgttgggacgatggtggtgctatctgttggaatggtgacttaggtaaaatctataatattacctgttttaacaatagcgctataggaaaagaccacaaatcttcaggcggtaccataagtatttatggttcaaacctcacaatggacaaggttaacataacattaggtacagtgtcctcagtaaatgatgacaaggtatccaaaggtggaggtatatttgttacaggtaattatgtaaacattaccaatgccgaatttacaaactgttctgcattggctcctattgacgattcctctgcaggagcattgtacattatcggtaacaataccaatgtagtgaatgcaacattcaaaaacaacactgcttatgaagacggtggtgcagtatatattttaggtgaaaattgtaccttgaacaatacattattcctcaataacgttgcccacaacgatggtggagcaatccaatgggatggtaacaatggtagaatctacaatctcactgctgatggaaactatgcagacagtgcaagtggttcctctaaaggaggtaccctcactattgaaggtaataatacagttatacaaaaaatcaatatttccaattcctatgttgatagcgaccatgatttaggagcaggtaagtctacccaaggtggagctatattcctaactggtaatgactgtaacattacagatgctgtatttgacaattgttctgtaaaatatgttgcagatgaatcatctggtggagcaatgtacattatcggtaacaataccaatgtagtcaatgctaacttcacaaataactctgctgttgaagacggtggtgcaatatatattgatggtgactattgtaccttgaacaatactgttttcatcaataacactgctcataatgacggtggtgctgttgactgggaaggtaattatggtcatgtttacaatttaactgctattgataaccatgcagatagtgcacatggtagttctaaaggtggtactatcctgcttgaaggtggtcattgtacatttgaccagcttaacatttcaaacagttatgtaagcggtgaaacctacacaggtacaaaacctgttcaaggtggaggtatagctatctccggtaatgactgtaacatttccaattccgtatttgacaattgttctgtaagatatgaaggaaccaattcctctggtggtgcattatacatttggggtaacgatactcatatagcgaactgtaatttcacaaacaactctgttccttccgatggtggtgcaatctatgttggaggttctgacgtaactgtagtcgattcaaatttcatcgataacaatgcttcccaatctggtggtgcaatcttcttgactgacaataagaattcacaaattaatggttcaaccttcaagaacaattctgcgaaagtgaatggtggagctattgacttctatgcaggtgcagaagacggtctagtatctgcttgtgaatttgttaacaacactgctggtgcttccggtggttccatttactgggaaggtaccagaggtgtaatcgaatactctagctttgatggaagcagagctttaggtaatcaaacaagtgatgcaaacaatggtagaggaggatctatcatttggctcggagaccacggtacaattcgtggttgtgactttaatgacagtcaatccgctaaagaaggtgctacattatatgttgtaggtgaccttattaaggttcaacaatctaactttaccaattctcaaaccaatactagtggtggtatttacatccaaggttcagaaggtactataagtaattgtcatatggaaaacactactgctaaggaaagtggtggagcactttatgtaaaaggtaattatatctatttattagattctgatataaataatgctacttccgttaataatggttctgcaatttatattactggtaacactacccatatagagaattcaaatgtaaccaattgtagttcaagttctggaaatggaaccataatgattgcaggttataagacagtaatggatggtgtaaatgtagataacaacaaagctgtttctgctggtgcagttctaattagtggaagtcaaaccaaaatatctaactctaacttcacccataacaatgcatccaaggatgcagggggtataatgattaatggtactgacaataccattacaacttcaaatatctctgataactatgctaaagaaaatggtggaggtatttactatacaggtgatagaaatacagtaagttattctaatattgaccataacagtgctaataatggtgcaaatgtatatatggctataaaagctaaagattgtaagcttataggttccaatattacaaatgccaaggctagaaactttggtggtggagtagaatggtgtgaaaattctgaaaatggattgattcaagattgttacttctataactgtacttcaactgcccacggaggtgctattcactggtacccaggtaaatatggtgttatagataattgtacttttgttgaatgtcatgtagctggtaccaaaaacggtggtgcaatatatgcaggtgcaaacactaatgttaaaccagttggaacagttttatcaaacagtacattcattaactgtacaacaggtaccagaggtgctgtaaactggaattcacaaggtggtttgatttataataacacctttattaattgtggtgtagctaacacatctgttactacatcttggggtggtgcccaagctttacaaattgaaaaaggtaacaacactcaaattattgcttgtgaattttataactgttccggtatcggtggaggaggagcattaagagtacaaggtgatggccatagtggttataatattacaattgcgaactgtacatttgacaattgtaataataccggtttagctggtggtgtatatttaagtgatatggctagaaatataacttttgaaaacaatacctttaccaataacagtgctcctaatgtaggtgcattctttatggaccctaaaactgtcattgtttcatttgtaaataacacatttattaataactctgctactggcagttctggttatgcgggtgccgctcaattaactggaaatcttgaagtaatcaattctacattcatagaaaattcagctgttagtaaagcaggtgctattaatgctgttgaagattatgatggaaataacaatttagctattattggatccactttccaatacaataaagctaaagaaggttctgccatcaatgctattaatttggatatgactgacacagttttacttgaaaaccaagcagcatttgataaatggacaaaccaaagaaattcaagagctaatggtcatgtatctataaatggtacttttgtaggtaaagataactacttgaatggtattaaggctaatggagctactttcgataatgtaacatattgtggtgtaaatggtggaggtttatatgaagatactgtcaccaataccgatgatgtaacttcagctaaatccacaaatgaggttcatcagttaatagtcttagagatttatgattataataataatttagtggatactaaaaccacatttactgatgaaaatggtaaattcaatttcgaatttgacatggaaaatcctcaagattactcatacaaggttattcaccctgaagataattattacactggtgcagaatattctattggaaaagctatatctaatataacaatcaaatctcagaatattactcacccagaagatgagaatataacatttaaggtaactggaggaagtggaacacctactggtaatattactgtatttatcaatgatactgaaggtaatgtgatatttaatgatacaattattcttaacagtaccggtgaagcaaaattattcttcccaagattaaatgcaagcgaatattacatagaagccaagtataatggtgataacaactacttgcctgacaatgacacttccatattccatgtaaatatggcagaatcattcatcaaaattggaattgaaaactacacttataatgaaactagaaatatcacaatcacagtgccatatatagaatcaggtaggatatccgttatcgtaactaatgaaaacttcactcaattatacacagtctatgttaatgaaggaactgaagaagtgcaaattcaacttcctatattggatgcaggtgtttatgatattgaagcaatattccatggaaacaacaattactatccaagccaaaatacaactaatttcactgtatttaaagctgcttcaataattaacattacagcagacaatgtaagtggtggagtgagagaaactgttgatattcatatcgatcctgaagttgcaactcaaaatataaatcttacagtttatgatgctcaaggtaatattgttgatcaatattatgaccttggtttacacgattccagaattactcaaattcttacattgttacctaaaggtaaatacaatgttactgtaacttatcctggagataagaatcataatgcatcttcaaattcaacaatcttctatgtaactaatgatttattcccaattgaaatcaatgcaactaatatgacctatggtgatgatcaaatcatcaacattacagttcctgccaatgcagacccagataaattatacattaacataaattgtagtgattggcctggaaataaaactgtaactgaattaggattgactattgatgaaaatggtttaatacaaatagatactactaacactaatttatttgcaaataaaatagatgcaggtaattacactattaatgtttattatcctggtgatgatgacttcttatccaacagtagtagtgttgactttgaagtagcaaaagctattcctgaaatgaatgttactccaactaacattacatatggaaatcttgaggatattttagtcgaaattgcccaaaatggtaacgttaccctatatgtaactagtgaaaatgacccaactttaaacattactaagattgaagttgaaattattgaaggtaaagtctactggaatgtaaatgatacatacttgccagcaggcgaatatatggttgaggcaatattcaatggaaacagaaattatgaatctgtaaacaaaacagaaaaattcaatgttaccaaagccattcctaacattgtcattgatgtcgatgatatacatgttggtgacagtgaatacattaatgttactgtcgaaggtgtcgaacatggtaccaccccacaaggtaacattaagatcattgtcagaacaatcgatcaaattgttgaacttaatgccactggccaatacaacttaacattagatgatgaagttcaaggcaatggcataagtgtaaccgtaatttattatggtgatgataattataattacacagaaaaatctgtatactatgatgtaactaaaaaagaaacttccattaatgtaacaggagctactcctatttcatatggaactatagaaaatcttctagctgaagtaaatgaaactggcgttacaggaaccattaccatttatgtaaacagtactgtagatggatttatcaatcaaactcatgtagctacaatcactgttgatgatgcaggtaaagctacttgggatatagatcaaatcatattacctgtcggttcatatgatgttactgcagtttactctggtgatgacaaatttgaaggtagtgtatctactgtcaaagtaatcgttgtagaaaaggctactgattatgacatcagtgtagaagccaataacactgtttatggaactgatcaagtcatcattgtaactgttcctgataatgcaaatggtactgtaaccataaccatagaaggtactgaaatcagcttaacctcacaagtggaaaacggtaaagcagtatttactattccaaatgacctagttgacttcttagaagtacatgataattataatgtaactgcaacctataatggagatgataaatacgcagcaggagtcaaagcaagtgacttattcaatgtaaccaaagctgaatctcacattaaagttgttgcagaagatattgattacactcaaattgaaaacattactgtaatccttccagatttcaatgctaccggtaaaatagtgattacaattgttaataaatctgacaccactcaaatagtcagaactttagaagttgaccccttcactaatactactggtgttatctatccatttgaaggattattagtaggtaattacacagttaaagtcgaatacagtggagaccataactataataacagtgaaaacactactgactttgaagtacgtaaggtagatcctaccctaactgaaaactcaccggatatcatttacggtgcagatgaaaacataactgttaccatcaccggtgctacaggaggtgtggatcctaccggaaccatacaagttattgttgatggtgtaaccattgataccattactattggtgataaagacttagaattcattgtaaccaaacctggagttgatccacaacacaatataactgttatttacagtggagacagcaactataacccagtaaccattaccggtgaatttgctgtaactcaaaataacactattgaaatggaagaagtcagtcctaacattgtttatggtaataatgaaataattacaatcactcttcctaatgatgcaacaggtactgtctatcttgtagtcaatggaacttattacactcctattggtattgatgaaaaccatcaagctgtatttaccattgtagctccaatcgtaggagaatacaacttcacagcttactacagtggagatgaaaactacacagctaataatataagtggtgcattcaatgtaaccaaagcggatgtaagtttatcagaatctcacactgccacaattacttatggtgctaatgatacaattactgtaacaattactggtgttgaaggtcctgaaggagtattagctccaactggaaccattaaggtattggttgatggagaagaaattggcaatgtcaccattggtgatgatttagtatttaactccattaggccatttgtagacccacaacacaacataacaattatttacagtggagataataactataattccaaagtcatagacaataccgtattggatacccttgtattcgaagttattaaaaacaatactcttgaaatcagtgaagattctccagatattttctatactgaaaatgaaaccataactgtaaccattgctggtgatgcaacaggtaccattactgtaacagttggtggagaacaagtaggagaagtagtcactattactgaaataacagaagatgacaaagtattcaccttcaacattacaaaacctgaaggtggagtatatgatgacttaaccgttgtatacagtggagattccaattatgattccgctaccatcaatggtgaattcactgtaagtcctattgatcctaatatcactgaagacagtcctgatattgtttacacaaataatgaagttattacaataactgttcctgaaggtgctaccggtaatctaactgttactgtcaaaaacagcaaaggtgatacagtagagaccaaaaaattggttataggtactgatgatttggttgtaactattgaaaaacctgctgtagataactacactttcactgttgattacactggctgtactaattatactgaaaaaaccattacaggtgaatttaaagtaacaaaagcatcaaatgagattacagtcgtatctaccaatataacctatggacaaactgaaacaataaccgtaacagttccagaaggtgcaacaggtaatgtaacaattaccgttggtacatacactgatatgttagaaattccagaaggcagcactgaagtagtattcactattccaaaaacagctgcagatgaattgttaagtgtaagtgataactatattgtattcgctaactactccggtgacagcaattatgaatccgtggttgcaaatgctcctttccatgtagatcctgctaacactacactcactatagaagttgctgatattacttatggtgaagatgaaataatcaatgtaaccgttaatggagtaactggtggagatattccaactggatttgtaacaatcaaactcaatggtacagacattgaattaaccaaacctgtagatagtgaaggaaaagtacaattcaacgtatcaggattagttgtaggagaatacactgtaaatgctacatttgtatcaagttcaatcaattataatgatagcaataacactgctaagttcaatgtaactaaagcagatgttaaagaagctaatatgaacattacagctattaacatcacttacggtgatgatgaaaccataactgtaatccttaatgaaactaacataaccggaaacgttaccattacaatcaatggtactgaaatcgaaaccaaagaattagtggatggtaaggttgtattcaccgttcctgatttagaggtaaacggatacaatgtagtggctaactactccggtgatcataattataatgcaatacctattggagctaatttcaacacagactttaaagttgataaggctaatgtaactgttgttgttactccagtagatataatttacaaagaaacagaagaaattaacgttactgttactggtgttttcattaacgataatgttaacgacaatttaaccggtaaagtaaccatatacatagatggtgttgaaaatcaaactaaggatattagtgctgttgatgaatacggtatcttacacttcagtgtagaaggattggctgtaggtactcataatgttactgcagtttatcatgatgatagaaactacaatgataacaatgcaactgaagactttgaagtaatcaatgctcttccagaagatatgaaagtaattccacaaaacatcacttaccatatccaaacagaaaccattactgttgatttaggagaagtattaaacggaactgtccaattgtacataaacgacacattagtcgctacatttgaggtaatagaccaaagaacagtaagctacaccaataatagtttagctgtaggaaactacaccgctaaggcagttttcactgcaaatggtgatttcgttaacgctagtgcaaacttcactgtatctaaagcccctgtaactgttgatgtagtggcagaggacagtgtttatggtgaaactcaaaccattaccgtaaatgttgataatactgttccagataaatacaacctaacaggtaatgtaagcattacaattaatggtgtggattatggcaataagactgttgatgctaacggacaagcagtatttgaaataactggattggaagctaatgataactatcaagtaatcgctacatattacaacgatcctaactatctagacaatactggtcaagatacctttaaagtaagcaaagctgatgtaaaagatgtaaataaaaacattacagctattaacattacttatggtgaagatgagaccattacagtaaccttaaatgaagataacattactggaaagattaccattacaatcaatggcactgaaattgaaactaaggaattagaagatggtaaagttgtctttacagtaaaagacttagaagtgaatggatacaatgttgtagctaattactctggtgatactaactataatgctttcacaatagctgataacctaaatactgactttactgtaggaaaagctaattcaactgttgaagttgaagctattccaagcattgtttatggcaacaatgaaaccattactgtaagtgttccaattagaaaccacacaggtacaattacccttacaataaatggcagtgactatgtatttgtaaaacatctaactgctgaagatggagatacaattgtactaactaatgtaagcggtcttgctgttggaaattacaatgtaactgtaaaatatagtgatgatagaaactacaacgatagtgaagcttctgcattattcgaagtaactaaagcaactccaagtcaaattactgttgaagctcaaaatatcacttacactgaagatgaaataattctagttaccgttgctgatgaaaacgctacaggcagtgtgaccattacaattgatttaggagattccacttacacaaacactaccaatctggatgaaaatggacaagctaaattcaatgtaactggtcttgtagtaaaccactacacagttgtagccaattactctggagatgcaaattacactggtcaaactgcatctgctccatttagagtggataaggctgcttcaaatgtaaccatagatgtggctaacattacttatggtgaaatagaatatgcaaatataactatacctaactataacgcttcaggtagagtaattatcaaagtggatgataaagcttatgatattttaccaatcaacaacaatactcctgtaaaacttgaattagatggtttagctgttggaactcacactattgatgtagaatacttcgatgatgataattacaataaatctgtagcacatgtagaatttaatgtaactaaagccattatcccagttgatcctgctaatgcctcttcattaatagttctaccaactaatattacttatcttaacaatgaaaccattgttgtaagcgttggagcaaacaatgctacaggtaaggtaactataactatcaaagataaggatggcaatcctgttgatatcgatccatctgttgtaacaagcaaaaacatcacagaagaaggttcacaatctgtaactttcactgttccaggtcttgcagtaggaaattacactgtagaagttgattatacagatgatgcaaactatgaaaacgctcaaaccagcgctaaatttattgttgacccagctaattcaactgtaactgttgaagcggttaatatcacttatcttgataatgagactatcactgtcactgttcctatcactaatgctagcggtacagttgtaattaagataaatggcactcaaaaagacgaaagaactgtaagctga

SEQ ID NO: 962 - DNA, 8160 bp, Methanobrevibacter ruminantium
  source 1..8160: mol_type = genomic DNA
gtggaaggattagctgttggcgaatataatgtgactgtagaatacagcaatgaccctaactacaacaacagcaatgcatctaccttattccatgtggataaggctaatattcctgatgttccaaatactgaaggtcttgttgtaattccaacaaatatcacatatcttgaagatgaatccattacagttactttagatgttcctaatgcaactggcaaagtcactatcaacattaatggaaccgacattgaaactaaggagattggcggtggcactgtaacattcactgtttcaggccttgcagttggcgagtataatgtaactgccaaatacactgatgatccaaattacaatgatgtcaatgcttctgcattgtttaatgttagtccagctgcttccaatgtgactgtagttcctacaaatatcacatatcttgaaaatgagaccattacaattagcgttaacgtaactaatgctacaggtactcttgtagtcaagataaacggcacagaagtgaacacaactacatttacaggtgaagataagccaactattgtagtaactgttccagaccttgcagtaggcgaatacaatgtaactgtggaatacatagatgatccaaattacaacaatagcgatgcatctgccttattccatgtagataaggctaatattcctgatgtcaacccagatacaggcatcgttgttgttcctacaaatataacatacaatgatgatgaaactattaccgtaactgttaatgtaagcaatgctaccggtaaggttaccattaagattaacgacactgatatcgtattaagcaagaacattactgaagacggctcacagactgtaacattcaatgttccaggccttgttgtaggcgactataacgtaactgcagaatacacagatgacgctaactataatgatgtcaatgcttctgcattgttcaaggttgaaccagctgcttccaatgtgactgttgtgccagtaaacattacttatggtgaaaatgagactatcacagtcagcgttgatatcaataacgctacaggtaatgtaaccattaagattaacggcactgctgttgaattgactaagaacattactgaagaaggttcacagactgttactttcaatgttccaggtcttgcagtgggcgaatataatgtaactgctgtttaccatgatgatgttaactataatgaaagcaatgctagtgcattgttcaatgtaaagaaatcagctccagtcaatctgactgtaactgctactaatgtgacttatggcgaaaacgtaaccgttaccgtcactgttccagatgacgctactggcaatgtaaccattactatcggagattacacagacaagaaggaaatcactcctggatcaaacactgtcgaattcacagtaccaaatcttgaagtgaataactatgttgtctatgctaactactctggtgacagcaactatgaaagcggcatcgtaaatgctccattccatgttgataaagctaattcaaccgtaatagttgaagcaactaacataacctatggagaagatgagacaatcactgtaactgtccctaacaataatgctactggatgggtaactgtcagcgtaaacggtagtgaaatcggctctaaaaagattggcacagatggaaaagcaacattcacagtcaaagacttagaagcaggcgaatatgaagtaaccgtaacatatgatggagatagaaactacaatggaaacaacaaccttacaagattcacagtagataaggctaacattactgaagataatataactgtagttccaacaaatatcacatatcttgataatgaaacaatcgctgtaactatcggcgtaaacaacgctacaggcatagtaaccatcaagataaacggaactaatatcgaattaagcaagaatattactgaagatggttcacagactgtaacattcaatgttccaggccttgttgtaggcgactataatgtaactgcagaatacacagctgatcataactataatgacgtcaacgcttctgcattgttcaaggttgaaccagcctcatcaaatgtgactgtcgaagcggtaaatatcacttatcttgataatgagactatcactgtcactgttccaatcactaatgcaagcggtacagttgtaattaagataaatggaactcaaaaagacgaaagaaccgtaagcggagacaatccaacctacaatattacagtagggggattagctgttggcgaatataatgtgactgtagaatacagcaacgaccctaactacaacagcagcaatgcaagtaccttattccatgtagataaggctaatattcctgatgtcaacccagatacaggcatagttgttgttccaacaaatatcacatataatgatgatgaaactatcactgtaaccgttgatgttcctaatgctactggaaatgtaactatcagaatcaacggaactgatgttgaattgactaagaacattactgaagatggctcacaatctgtaacattcaatgttcctggccttgttgtaggtgactataatgttactgtagagtacacagatgatgctaactataatgacgtcaatgcttctgcattgttcaaggttgaaccagctgcttccaatgtgactgtagttcctacaaatatcacatatcttgataatgagaccattacaattagcgttaacgtaactaatgctacaggtactgttgtagtcaagataaatggcacagaagtgaacacaactacatttacaggtgaagacaagccaactattgtagtaactgttccagaccttgcagtaggcgaatataatgtaactgtggaatacactgatgatcctaattacaacaatagcgatgcatctgccttattccatgtggataaggctaatattcctgatgtcaacccagatacaggcatcgttgttgttccaacaaatatcacatacaatgaagatgaaactatcactgtaaccgttgatgttcctaatgctacaggtaatgtaaccattaagattaacggaactgatgttgaattgactaagaacattactgaagatggctcacaatctgtaacattcaatgttccaggccttgttgtaggtgactataatgttactgtagagtacacagatgacgctaactataatgacgtcaacgcttctgcattgttcaaggttgaaccagctgcttccaatgtggctgtagttcctacaaatatcacatatcttgataatgaaactatcactgtaaccgttgatgttcctaatgctactggtatggttaccattaagattaacggcactggcgttgaattgactaagaacattactgaagatggctcacagactgtcactttcaatgttccaggccttacagccggcgaatataatgtaactgcggtttaccatgatgatgttaactataatgaaagcaatgccagcgcattgttcaatgtaaagaaatcagctccagtcaatctgactgtaactgctactaatgtgacttatggagataacgtaaccgttaccgccactgttccaaatgacgctacaggcaatgtaacaattacaatcggagattacacagagaagaaggaaatcactcctggatcaaacactgtcgaattcacagtacctgaccttgaagtgaataactatgttgtctatgctaactattctagtgacagcaactatgaaagcggcattgtaaatgctccattccatgtagataaagcaccttcacatgttgaggtagatggaatagacattaattacactgatttggaaaccattacagttactgtaagcgataataatgccactggatttgtaaccattacaatcaacggcactgatattgaattaactaaagaagtttctgcaggtcaagctgtatttgatgtaaaagacttggttgttggagaatacaatgtaactgctgtatatcacagcgatagaaactacttgaacagcactgcttccgatacattcaaagtagataagtcagatgtcaagaacatgaccataagtcctgtaaacattacttatggtgaaaacgaaacaattactgtaagaatcactgataataatatcacaggcaatataaccatttctgtaaatggcactgaatatggtcctgttgaacttgacaatggtgttgcagtctttaatgttcctggattgattgtaggtgattatgaagtaactgctagctatagcggcgattccaactataatcctgcaagctcaaccgagacatttactgtggataaggagaaaccaaatgttcatgtggtctctgaaaacattgactatggaaagaatgagacaattactgttattgtagatggatttaatgtaaccggcaatgttaccattaagattaatggcacagagatagcaactaaagaaattaatgataaaggccgtgcagtatttgttgtacctggccttcaagccggtgaatatgaagtagttgccatatataacggtgatgataatcatgaatcttccgaaggcagtgatacatttacagtagctaccgtcactccaaacatggatgtggaaactgaggacatcgattatggcgacaatgagactataacagtaacccttcctaaagatgcgaaaggtagtgtaaacataaccattaccgatgagaatggcactgttgtttatgaaggtgaagctcagcttgaagatggcaaggctactgttgacgttccaggcatcacaccgggtccatacaatgtaactgtcaagtatcctggagacagaaactataatccaaccaataagacagtcagattcaatgtagataaggtagttcctgatgtcgatgtcgatactgttaatattgattatggcgacaatgagactgtaactgttacagttaaccctgttgatggtggcgtcactcctacaggtagtgtaaatgtcactgtcagagattctgatggtaaagttgtttatgaaggcaatgtagatcttgttgcaggcaaggctacccttgatgttcctgatttaggtgcaggagattacactgttgatgtacgctatggcggtgattccaactacgatgattcaactggaggctcaagcttcaatgtagctaaagtctctcctgatatggatgtgcaaactgaagacattgattatggcgacaatgagactgttactgtaacccttcctaaagatgcgacaggcactgtaaatgtaaccattaaggataatgacggcaatgtcttttatgaaggtgaagctgagcttaaagagggcaaggttactgttgatgttcctggtttgcctgctggcgattacactgttgatgtagcctatggcggtgatgataattacaacccagtcaatagttccgatagcttcagcatagataaggtaagtcctgaagtcgatgttggtactgaaaacattgattatggtgacaatgagactgtaactgtcacagttaaccctgttgaaggaggatctgctcctacaggcactgtaaatctaaccgttaaggatagtgacggcaaagttgtttatgaatgccaagcagaccttgttgaaggcaaggctactgttgatgttcctggtttgcctgctggcgattacactgttgaagttgcttatggcggtgatgagaattacactgctacaaactccaacggaaactttgctgtaggtaaagttaaccctgatatggaagttgatggtgaagacattgactatggtgacaatgagactgttactgtaacccttcctaaagatgcgacaggcactgtaaatgtaaccgttaaggatagtgacggcaatgttgtttatgaaggtgaagctaagcttgatgatggcaaggctactgttgatgttcctggtttgcctgctggcgattacactgttgaagttgcttatggcggtgatgataattacaacccagtcaatagttccgatagcttcagcatagataaggtagctcctgaagtcgatgctgacactgaagacattgattatggtgaggatgagcctataaccgtaaccattgaccctgttgaaggaggttccactcctactggcactgtaaacgtaaccgttaaggataaggatggcaatgtcgtttatgaagaccaagtagatcttgttgatggcaaagtcaccctagacattccagatttagatgccggcgactacactgttgatgtggcatacagcggtgatgagaattacactgctagaaactccagcggaagctttactgtaaacaaggcaaaaccagaattgaatgtagattcagaagacattgattatggtgatgatgaaaccattactgtaagccttccagaggatgcaacaggcactgtaaacataaccattacagataaggacggtaaaaccaaggtattcaatgatgttcctattgaaaacggcaaggctacaattagcgttcctgatttggatgctggagactataatgtaacagtagactatccgggagatgataattaccttggctctaaagctacttcaagctttaaagttgtcagatcaaacagcaatatcactcttgagactgagaacatcacatatggtgacgaagagcctataactgttgatgtaaatccagtggaaggaggagtcactcctaccggtactgtaaacataactattacagataaggatggaaatactaaagtattcaatgatgttcctcttgaaaacggcaaggctactgtagatgttcctgacttggccgctggaaactacatagttgatgtaaaatactccggtgatggcaattacgatccagatagcactgaaggagcatttgaagttgcaaaagcagttcctcacattgaaattcatgtatatgacatttactatggcgatgtagaagtgctcactgtcacatgcgatgctccaggcactgtggacatcactgtaaatggagtcactgtaacagtacctcttgatgacggatatgataagcgtgtattcagttcaattgttagagcatacagcggcaaggcaactcttgaccttgtaaacttggctgttggcacataccctgctaaggcagtctataacggaaatgaaaactacacttccgtcagcgacaatgacactttccatgtatacaaggagaataccactaccaagatatctgtagatgatatcaagctaggtgaagatgcagtgattgatattgaagttacccatgaagacggctctgaaaagatcaatactaacataactgtaactgtcgatggaaaagattatactgttgagctcattgatggaaaaggcactttaaccattcctgatttggatcttggaaaacatactgtcaaagcggtatatcctggaagccacaactacacaaacagttcaaacgctaccagctttaaagtgacaaaagttactccaagcttcgatatttcaactgaaaacatccaagtcggagatgatgaaaccgttactgtaactcttccagatgatgcaacaggaaccgtaacccttaccattgacggcaaagaatatactgctacagttgaaaacggcaaagctacatttgttattcctggcattaaggcaggcgaacataaggtcaatgttgcatatagcggtgatgacaagtacgcccctgctaaaagaagcgacagctttacagtaagcaaggttaaacctgatatgggcatggacgctcctgaaatcaaagtaggccaagacggcgttataaccgtaactgttccagaagatgcaacaggtacaataagcattaccgtagatggcaagacttacactgcaagcattaaggatggcaaagcggtattccatatctctggattaggtccaggcacacatattgtcaaagcctactactctggtgacggcaagtacttggctggctctgttgatggaaccattgttgtagagcctaagaacggtacaagcccacaagataagggcaaagctcatggtggtattgatttagaaagcaaaaagaccggtaatccaatattagtattgttcatggtattgttcagcttaattttaatacctataaaaagaagaagagatgatgatgaagaagaggaaaatgaagatcaaattaatcgtatagattaa

SEQ ID NO: 963 - DNA, 1026 bp, Methanobrevibacter ruminantium
  source 1..1026: mol_type = genomic DNA
atgtcaagtttaatttcaattcctactttgcctttaattgttatcgcattgatatgtgggattctttcatttataagtactcgtttggttatgccttggcttattggtaagcttgagcaggcggaaattattggaaaggacattcataagtcctcccgtcccattgtagctgaaatgggtggtattggtataatattcggattcatcatagggatctttgccggaataattctctttccagtattgaccttccagcttgtggttgtccttctggttgttcttcttgttggaatcatcggcatggttgatgaccttattgtattgtcctcaaaggagaagctattccttctctttttggcaggcataccattatggtgggttgcccctcctaatgtaggccttctatatatgatcatgattccgatagcagtatcaatcacctcaaaccttaccaacatgcttgcaggattgaatggaatagaatcaggccttggggttatttcaatgacctcacttacaataagctgtatcattcttggaaagtatgacgttgcgattataagcatgacaatgcttggaacccttcttgcattcctttattataacaagtatccggccaaggtttttccaggggataccggtacccttatcattggggcgacaatcgctgcaattgcgtttattggaagggtaaagctcatagcattcattgtccttctaccgaacattatagatgcagcgttaaagttctacagtgctggagttatggaaaggcagcagcacaatccgactcagcttaatgaggacggcaagcttgtaaggccggagcagggattcaaatcccttatcaggcttgtattgagaaagccggtggatgaaaagactgctgtgatgatgatatggggaataggcattatttttggtattcttggtataattgttgcactgctgatgcctggggtaactcatgatcagacatttgcacagtttatacacttgaaagattatttctattatttgggctaa

SEQ ID NO: 964 - DNA, 141 bp, Methanobrevibacter ruminantium
  source 1..141: mol_type = genomic DNA
atggctagaccaattagcccaactcctactttgtatggtgaagatgctaggaggtttttaaagaaaatgaatgaacctccaacagaaaaagaaaagaaattttggaaagaagtagaatcacaaaggtttgttcctttttaa

SEQ ID NO: 965 - DNA, 225 bp, Methanobrevibacter ruminantium
  source 1..225: mol_type = genomic DNA
atggatagtcagtacattaaagataattattattttgaaactttaaacgaaagccacaatttaaataatttttattgtgaagatgaagaattgaatgaatttttaaaggaagacgcattaaaacaacaaaaacagaaactaaatttaacaaaattgattatatgtgatgacgaaataattggttttgtaagtttactcagatggaataagaataaaagatattaa

SEQ ID NO: 966 - DNA, 507 bp, Methanobrevibacter ruminantium
  source 1..507: mol_type = genomic DNA
atgataaaaacagacaataaaggacagataacagtcgaactgctccttcttttaagctttacattcataagcatcatagcccttacaaacatcataagcgatgcaaatgaggtaaacatagccatggctgcagcaagaaacggagcattcgaaggagcttcctcaaacggactggcaatctatccaaaggacacctttgacaactattcaaaggacaagagaaaggaaggcctattcaatatgaaaaacattaagataataaagattgcacagacctttaagggaaaggacaacttcaataaaacgaggatacagctaaaggtctatgcctcatcaaagatcataaaaacaaaggaagagaaggagtctgcaggagatcgtataaattacaatatgagaagagcaatcaccaattcatttaagacggaaaatataagcaatagactatttaatcctgccttttcagacagctatagttttacaactgcaaatgtggaatgggtttga

SEQ ID NO: 967 - DNA, 465 bp, Methanobrevibacter ruminantium
  source 1..465: mol_type = genomic DNA
atggattcaaaaggattaatcaacatagaacttttattttgcacaatcatcatagtcatgattctgatagtgaactttcctatcctagagcatagcatagattctgcaaatgatatggatgaaaactcccaaggccgatttttacttaattcgatatcaactagcatagatcaagtaaatagcaataatgaaggattttcaaagaaaataaaacttccccaatctgttgacggaaactattatacaatacttgtaagcagcaatgaaataatattggaattcaacaacaagaagggaaaagctaaaatccagcccataaatctagttgattcaaagaaccgaacattaagcaaggcgcaattatacaatggaggaagctacataattaaaaagaccctaacaaacaataatgagagccacatctataatcaaagttctataataatcatgcaagtagaaggataa

SEQ ID NO: 968 - DNA, 1344 bp, Methanobrevibacter ruminantium
  source 1..1344: mol_type = genomic DNA
atggtgattgtttcttatttaaatccactgtcttcagagggccaaaacatagtcagaggactctctagtcttgacgacatattcgcccctaatgatgaccttattgacatagtcattcatagccctcgtcagaccatttcaaatcaggaatatgtgccagagactcttgccgacttggccatcaacagaatcaaatggtatatcgacaaaaagaacaataaggatttcaatccaagcaattacgcctatttttttaatgaagagattgctgaatatgacactatcgcattccacatacttgcccaggctgttgcaagccaatttagggcggggtctcgtgagataaagctttttgtcgaatcctatggacttcttgttgaggacagattgataagattacttgaaacagaaaaaagagagcttgttgaagagatattaggggactttcttgttcaggacggcatagaatgggccttcctgaaggacttagttgcaagcaaaagaatctcccttacagaccttgtattggataatggtaagatagtccttgacagggaagagtttgtctatacattcggcgatgagttcactgaccgctctccagagagaatctatgacatcctaattggagacggccttaaggaaatgatcgtatccaagcttctcattcaaaagtcagaggaatatgttgcacatattcaggatatgcttagaacaattgagccacaccctgccattgtaaggcttggtgagatgcttggcgagacaattacagagcttatgacaaagtacagcagcttctatgcagctggaggagcctatggtaatatggaaataggcaagctagtgagggaagcattccctccatgcattgcaaacaccgtcgaaggggtctcttcagggggaagaaacgatgctatagtccttcttcttacttcatttgtttcatatgcaaggctttatcctggaatattcggtgcagatgccagcgtaaaggtttcagacattgactcaaaccttaacatcacaatgaatgagatacttcctttgatatatgaggcagcggataactgtactcctcccttgtttgaggaccagccacaggagaagataaacattacttcaaaattaggctttgggatgcatgagactccagagctggagcatgaaggtgagacaaagtggtacactcctatgagctgtgaaaagattaagatgcatcttcctcagctgtgcaaggagaataaggattgcgctaagataaacaatccattaagctattattctaggatgaggtggattctaagcaagaaaggtggagaatctaaatctgaggaagaatag

SEQ ID NO: 969 - DNA, 2484 bp, Methanobrevibacter ruminantium
  source 1..2484: mol_type = genomic DNA
atgttaaatagaaaggctttgattttttcattgattgttttatttatgctatccatttctgctgtttcagcttcagataatacctttaatgagggcactggtttaaatgaagatattgctgatttaaatgatttcagtgatttaaatagcaattttaataatggacttagttctaatgctgttcatggtctagatgatgattctaataataatttatcatctgaaaatatgatttcttcatctgatgatgaaaaacaagatgatttagagggttctgattcagattcaattaaagacaatctcaattcaaattctatcaaagaccaaaacaattctaattctagtactgcagacaagtccaatacaaaaatccaaactaagatctctgcaaaggacatcaatacatactataaggaaaaatcaagcctagtattatatttaaaggataataaaaatcaggccctttcaaacaagacaatcaaactaagcctcaacggtaaaacatatgctcaattgacagataaactgggaaaggcctcattctctctttatggccttaaacctaattcatatgatgcgaagatagaattttatggggatgatgattataagaagtctgttaggactgttaaagtcaatgtaaagaaggtagatatatcaatcaatacaaaggacttctccacatatctcaattcaaacatcttcttttctgtaaaggtcttaaacaagcttactaaaagtcctgttgaaggcatacggattcagttcaatgtttattcatcacagaaaaactataagaactactatgccctaagcgataaggatggaatcgccaccttaaagaagaacctaaaactaggctcatatgatgtttacacatatgtaaaggatgatggccaaaaggactatataaattatagaaacacaaaaaataaggtctcaattaagatatccgctcctggagagatgggatgctcatcaatctatatccatgtaaatgagaatgaaagcgctgtcgcctttagaagggattccacatatgcagctgacttgtatatagtcgctcaaaagtggcatggaagaaatgcagtgaagcagtataagcttactggaacctactttttccatgctatcgtcacttcagacggatggctggtaggaactggaggtgcagacaatcctacaatcaataagaagatagaaagccttgcaggtcagatggtctcatccaataacattcaaaattccaagcttaatacaattagaaaatatgaaaggtcattaggcataggacactttgcaatagtggatcctaaaggaaactatgccattgtttggaaaagcggatatgtgaagggaaagctgaagaatggccaatatattgatgttcctaattcaagaggcatgtttagaaagggaagctataagagcttttcaaaggacactgcaactgcagcattaaggattgcagctacagacagatttggagtaaacagaagggacatcactgttttccattataagagaagcactaagaactaccagacaagcgcacaggtgaaagcctatgctgcaaacgataagggaaaccttgcaggaagacgcactggaggaaaaagcgataacattcattataagaaaacctatatcagcaggtccaagcttccgggaactcctaataaaaagctccttggaacccacagctttggaaagatcgacacccttataaagacccaaactaaggtttcagctcctgccctaactgcaaatcagaatcagaccaaatactttaaggtgactgtaaggaataagaagacaaataagaccttaagaggagttaaaattagtcttaaggtttatacaggcagtaagtttaagagctatgctgtgactaccaataagagtggagttgctaatttcaatacaaaggctttaagtgcaggaactcataatgtgaccataagccaggccaatcataagtacatagtttctggaagttctaagatagttattaagacggttaaaaagaataatactgttaattctactaattctagtgttgttaatggttctggagtaaatggtagttccagttctaatgctagtgttaacaatgcttctgagcctattaataattccacaacagacaattctagtgagaataatggttctgcaggtaatagttctagttctgatagttctgtaggtaatggtactgcttcagatggttatgtaggtaatggttctagttctgatagttctgtaggtaatggtactgcttcagatggttctatgggtaatagttctacttcagatggttctgcaggtaatggttctaattttgcttctgttttagatgtttctgcagctatcaattctgattctaatgttggaaatgacagtcaaagcaattctaaaactgaaacaaaacttagttcaatgaaaacagatattttaacaagttttataaaattaattaactaa

SEQ ID NO: 970 - DNA, 294 bp, Methanobrevibacter ruminantium
  source 1..294: mol_type = genomic DNA
atgaacatgtcatttgaggaatatgcagtaatggcaataaatcaccacattgaagagagaaataaatatttgaaaaaagagatcaaagcaaaagaggaagaaatacaagcaatagacgaaaaaatacaagcaaaagaggaagaaatacaagcaatagacgaaaaaatacaaacaaaagaggaagaaatacaagcaaaagaggaaaaaatcaataaaataagaaaattatttaaagacttctgtgaaaatgaagacgaagaagcaatgaataccattaaaagcatattattataa

SEQ ID NO: 971 - DNA, 1107 bp, Methanobrevibacter ruminantium
  source 1..1107: mol_type = genomic DNA
atggtgaatttaaaaaagttaaatcaaatctcaaccgaaaataacaatacagtatcatactacgaaacagaagaaggcaaagtatataaagtattagtagatgaaaatggagaattaaaaaagattgcctgtgaagaatttccttttgagcctgcaaagcaatttaaaaaggagaaaattaataaagtacatgacagaatcttcaagttcattgcagagaacaatatacaggcatttttgaatgtctttggattaaagcatataatattcaagcaattcttaaatgttgaaatcttagatcagacattgaaccaaagctattgcgacttggtaatagaagctgaagacggaaaaatctacattatcgaatttcaaagctcaggccctgcaaaaaaggataagataagatttggagactatcagacgaccctgcacagaaaaaagaaggggcagaaagtcatagttataatgataaccataaatgatgatcccgataatgatgaaccatatggatatgataaggagtatcgctacaggataaacaagagaagcacaacctgctttaacacagagaaggtgattaaggagttggagtttaaggctgagaacgattgctttgatgatgaggcatatgtcaaactgcagctactatattatatggaaagcaatggtgatgaacgaaaaaaactattgaaaaaaggagttgaaataaaaaacaagataaaaaacctatcaacagacagaaaagttggattgacactgatatacatggctttagcagtccataattttgaagaagaagaactagaaagattcaaggaggaacttaaaatgaacatgtcaatagaggaatatgcagtaatgggaataaaccaccacattgaagagagaaataaacatttgaaaaaagaactcgaagaaaaagacaaagagcataaaaaagaactcgaagaaaaagacgaagagatccaagcaaaagacaaagagcataaaaaagagatccaagcaaaagatgaagaaatcaataaaataagaaaattatttaaagatttctctgaaagcggagacaaaaaagcaatgaatacccttaaaaccatattattatag

SEQ ID NO: 972 - DNA, 492 bp, Methanobrevibacter ruminantium
  source 1..492: mol_type = genomic DNA
atgctaagtgaagaagagctcaggcgacttatagaaagccttacaataagggagattatagagcctgcattggacaattggaccaggtacgaatcaaccggaaagaccgtcattgaccttaaaagcggaagggtctatggaatttcactaaaatcaaatgagctgttggagctggaccatgacaacaatcacatagagctctataagatagaaagccatgaggacctatttgatgaggaggaccttctaagcgaggacgaatacaataggtttcaagagttcaaggatagaaaggagcttgaggatgaggactttgatgactatgatccagagcttttaagcgaattctgcatgatggaatcaatagatgagaaggaaagaatcatttccatcctgattgaagactaccaggagtatcatttcaataactatcaggactttgagcattccattatcctaaactattatgatgaggatgactatacctattaa

SEQ ID NO: 973 - DNA, 993 bp, Methanobrevibacter ruminantium
  source 1..993: mol_type = genomic DNA
atgtatggtccgtcaagcttggcagaaagaagaatatattacagagaggaatggtcggataaggaccttccagacttcatagcccaaggaatcaccaaaagggaattcggtttcgaccatcttggaaacggtcctaacgacagatataaggtcttcaagggaacagacaccctaagaagattcttaagatacaagacaccatttgcagcatacatttcagtggccttctatcagaaccctagaaagaggggaggctgggaaaaggcagaatacatctttgacatagacgccaaggaccttccaatcagatcatgcaactgcgacggagtatgcgagatatgtcttggagaggccttggaaagggtcaacataatgcttgacacattgaagggagacctgggattgaagaacatacatctcatctattcaggcaggggatttcatataaggatattggatcccgatatgatggaggccgacagcgacctgagggctgaggtattgaagtatgttgctggagctgaggttccaagggcacagtatcctaacatagtccctggagccaagccattgaacttcgagcacttctccatccctatagcatatcctgcagtctttacaaacaaggttaaatataatatattccaccttaggggagatgagacaatagatggaataaacaataggctccttaaggacataataaaaaacagggaatttcttattgacgacaagtggggactctttaaggaaaggataggtccaaggagatataaggatatggtgaatgcgatggcaagggtgaaccttgccactatagatgcaaaggttacaatagaccttaagagaattttgaggctgccgtcatccctccactcaaaggtaagcatgaagtgtgtggaggtaaagaatcctgagaccttcgatccattcaagcatgcagttcctaagtttgtatatgagagaaaggatgaggagattgctcaaaactag

SEQ ID NO: 974 - DNA, 399 bp, Methanobrevibacter ruminantium
  source 1..399: mol_type = genomic DNA
atggataataaagcgataattggaattgtaattgcattgattgtaattgtccttgcatgctttgcttatgtgacatttaacggaaatgctccaatttcattgaatgtaactgaaaatataacaaacaatacagatacaagcgtagacactacagacaatgccaccctcgtatcacaagacccaaataatgattctgaagttaaggacattgctaagaatgtctctgaaagtatatcagagcaaaataaggcagttgccgattctggagacaccttgcataaacagactttcacagtttcagaaaacgaaaccggtcaaaatgagggcatggaacctggaacctatgtgatgtattatactgaaaatgatggtcctataaaagttcaaaagatagattag

SEQ ID NO: 975 - DNA, 303 bp, Methanobrevibacter ruminantium
  source 1..303: mol_type = genomic DNA
atgtctaaaagagttctagtcagttttgcattaattttcatttgcttattttctataagcgcagcctgggctttagatatggattcgagcgatttaaataagaatataggcactaatttagaaaataactttaacacagattcaaacaacaatttagacagtaatttaaactctaattttaacagcaatttaaacagcaatatagataattccacccaagaattagacttaagcactaaaaatttcaaagccctaagctctaattcatcaattgggggggggcaaatagctctgttaatttaa

SEQ ID NO: 976 - DNA, 4473 bp, Methanobrevibacter ruminantium
  source 1..4473: mol_type = genomic DNA
atggatggatcttattccaatctaacaaatctaaacttttatacaaatgcaacaagtgagaattccaattatcttacaccaatctacatcaacgaggcatcagatttggtcattgaaaacaacccaatttatatagactattctgatggatgtaactacaatctagcgggaatctatgcatttggtgcatccaataataatataataggaaataacagaatatccatctattcaaggtctctaagcaatacatcaaaacattacatttatgggatagacttctcttcatattcctcaaatgcctattctaaagataatgcgaagggaaatgacatatcatcaaatacaatagatatcatttctgactattatgcaaatgcaattacattgtcctgtgcagttgacaccactcttgaatcaaacagcctccatttaaaatcagattcatttgtttatggtatggttgcagagtattttgactttggaaatggtttgaatccatcaaataactttaattttacaaaaaacactattgaagctagctcaaatatggtatatgccattcaattctttaatgtatttgatgttaatattaaggaaaatacaatcaaaaccaattccaacggtagttatgggataagtgcatatgagtcttataatcatgatataggatataacaatctttttgtaaatggaaatgacgtttcaatgattggaactaattttgatgccataggaactggccatagtggaatatactatatgagggattcacatgatttaagcattcatgacaataatgttttatccaattactctcttgggggagattatgcaatcaggttcgatgcaagctccagcgagaatataaatgtttttaaaaataatttaagttctaataatggaaagtatctaggaaatgatgcagttaacggtaatgtgactgtttctgaaaacaatcattattatggagataatgatcttggcactaatgatttacgtatttttgacatctatgttgatttgaatggaaatgacaataagggagacggctctataggaaagccattcaaatccattagcaaagctttgtcctatttaaagaatttaactaacatttatggttctagtgcttcatctagttccaccactaaagtaaaaggcataattcatctaggtgaaggtaaatataatggctatggaactaatttgagaatatatataacaggtttggatgtggaaatatttggatctggctataataagaccattattgatggagtgtcttcacactggttctttgatatttcagaagattcttcagtttctataaaaaatttaagtcttgcaaatggagtttatcgttataatgatggaggattgattcacaataaaggtaatctatatcttgagaattgtatttttgataatgcaaagatgtctcctagttctgcaatcatttataatgatggcattttaaatttaaagaacaatttgatgaatatgactgcaaatggctatcatatatataacaatggatttattgatggtttgtatttgaattttattggagacagccttagtgaagatgaaagattattgaatacagattcccttagcttcatattaaccgcatatgttcatgatgacaatggaaaccctataactggaggctatataagattctttatcgaaggcaaggaaatattggtaaattctagcctcattgaaggtttggctaaattatacacattctcttccttaaatggaatcatcaagatatcaggatactattcaaatgcatataccaatctttttgtcaatattgggaaagtaaacagtagcatcatcagcgatacaataaaagtttatgttaattacagtgctaatgaatcaaaatcagacggttcctttgaaaagccgttcaagagtataaatgatgcattggatgctctcaacacatgtatagaaccggttactatcactgttcttgatgatgaaactacagaacagattgacgattcaagattgaataggaataatgtcattacaatagaatccattaataagacaaacatttcaactaattggacatttaaatcagatgcaaatatccgattgaaaggtcttatttttgatggctatggattagttaaggacaacacttatttgacaatagataattgtttgtttaataatactcctgcaagtgctatagtgtctacaaatggtagtttgactcttttaaattctaattttacaaataacaatgtaaaggacaatcacacattctacacaggctttagcacccctgtaataactacttctctttgggacattcagtatgattatgataagggaggggctgtggataattccttttccaatctaactattttaaattgtaatttcgcttttaatgaggcttataatggaggagcaatctttaacaatcaaagcgatcttcatatttcaaattcaagtttcacatctaatcttgcattcagcggattttatgaaaatcctcgtgcaatagacttttcaaatgcaatggataaggatcaggaccgtaatgtcgcaagcaagggtggagcaatcttccagtatcttggcgaagaagttgtagtaaccgacactggctttttaaataatactgcggggggctatgggggagcattttattcttctggcatctatccttataggaatgacagttccagcatcattgaaggaattccattcattgtttatgaaacagaagatggattgatggataattttggaaattatgctgataatcttttatctccacaagacatatactttataaactgtaattttgattctaatgtggctccaataaggggaggggcagtttactgcattaataattcccaaacccaatatatttcctgtaattttggcaataatcttgtttatacttataatatgtcccaactgtttggaggattaaataagaattcccataggaaatggatttttgaagatgaattggaccaagtctacagcatcttcttcaccgccgtaaacaatggtggagcgattcatgatgaaaatttaaaaattattgacagcacattcactgcaaacacattgcaatctggaggttcaattcttctcccttcagtaatccgctattccgctgatgtctatactttgcctaaaaacactgcaggcgcaatcatcactaattcaggcaaagggggagaatcagtctatgtggcagactcttcattgctcacatctgaagattcaaaatatattggaataaatggatggacaggcactagcacaggaggttcaatcagaagaatcatccatgaaaacggccaagaaactggcactggcggaaacggtagcggaacaggaggttctggaaatggttcaggaacaggaaagggggcttatggaaattcattgtcttggagcgatatattgtctgcattgggcggtgacgctcgaggcattgcaattaatggcgaaggatccagcttttctgatttcattagtggtttgataaatggaaaatcctcttcaaattcaagttctgatagtcaggataatggttctggctcttccaattcttcttctcaaaatcctgttaatggaacaatcccttctaattcaagttctgatagtcaggataatggttctggctcttccaattcttcttctcaaaatcctgttaatggaacaatcccttctaattcaagttctgatagtcaggataatgtttccagctcttctaattccagttcaacaaaacctatggatgattcaaacaagactaattccacttctgatgttccggctaatgatacagtaaatgccactgacggtagttctgactcttcaatttctgaaaatcctgtaaatgggactgcttctaatgataataattcctctgatgtcaatggcggagcttctgatatggatgatgataatatttctaatttaacaaatagcagttctgagattccagttgatactaatattaatgatactaacaattcatcttcagaaaattctaattcaacaactgacttggatgattctgaagataaatctgatgtggataaggatgataagagcgaatctgatgatgtcggacttagcgataatcctttaaatggagatgtttcagaaagttctgatagtccagatagtccagatagtcctgatagttcagaaagttctgacagtccttcaagtccagatagtagttcaagtgattatcaatcaagttcttcagcggcatctcctggagatagttcaaatagtccttcatcatcatcttcttcaagtgcatataagatttatgaagaggagattgatgataatattttggaaaagaatgttgaccttgaaaatcttttaataattattgtcctgtttttaggattgataattttaggatattataaaaaatcaaaagaagatgaggataattaa

SEQ ID NO: 977 - DNA, 6606 bp, Methanobrevibacter ruminantium
  source 1..6606: mol_type = genomic DNA
atgagttattttaataaaggacatatatggaatattttattaatttgtcttctcatcggaactttggctatgatgggttcagcaagtgccagttctgctaatttagatgattttagcaatcttgcatgtgactctaattcatataatgatttaagtgttggctttgaatctgatgctaattcatataatgatttaagtgttggctttgaatctgatgctaattcatataatgatttaagtgttggctttgaatctgatgctaattcatataatgatttcagcacctattttgaatctgattctaattcatatgatatttctgatagtttggttaattctaattctgatcgtttggttaattctaatggcttaattgagttcaatatttctgctcctaatgacattcaattaaatgacaaagcacctataaaaaactctttaaaagaatatgatgaaagggtattttatgtttctttagatggtaatgatttcaataatggattaagtcaagaaaattcatttaaatccctaaataaggctttagaaaatcttcatgatgctaataaaacaacaatatatgtttttgaaggaacttttctaagtgaaaatagctacgatctattctttgaaggggttggaaatagtcagatgatttccattataggttctggggtaaataagacaatattggatggtgaaggtttgcataggctatttaatgtggataattctatcaatttgacattaagggatttgacctttgtcaatggttttgacttttcatctggcggagccatttataataagggcaatctgactttagtcaacacttgcttttataataataatgtctattctgaagatgcatatcagcatgtgtctctgcttagcggcggagctatagaaaatgagggattcctgacaattgaaaactcttcattcattaaaaatagtgtgggttctgtttttaatcaatatgcctatggaggagccatttgcaatcatggaaacttaactataaacaattccattttcaataacaacagccttgagacatatattgatttgaatgagaattcctatttccgtaagtggaacgctcttcaaactgggggagcgatagcaagtttttcagatggtgctcttatctcaaatacagagttttctaatcattcaatttccatattgaacaagtatcctttcgttcaaaagacattcatgacattctcagctgggggagctgtttatattgaaggcaataatcataatttcatcaattgttcattcttaagcaatgatgcagataatggtggggctgtttactttaagggtaacaatacatgctttgactattgtgattttgacaataactccgcttttatgggtggagcaattatgacaatcgattataatttaaatgaggcttggatgcctactttaaagaatctgacttccaacaaatattctaatctgaacatttcaaattccaatttcagtaataatcattttatatgcactgattttggtataggataccgtatttctcctggtggagctgcaggatactttaaaatagataatattactatcgacaattctagtttcacaaacaatggggtgctggaaaattgcaccatattcgtttcatctaggtgtgggggagcagtattcctttatggtcaagattcaaaagtaaacaattctagttttgttcacaataatgttgaagtaggcggagccataatgaattatggatttgatacaaatgtatcaaactctaaatttatcaataattctgcttgttattctgatggaggagccattttccattctattggtgatcttttgattgataattgtgattttgactacaatagggctgtaaagaatgggggaagcattcaagcaagttatgattatacaaataactatctctttgagcaaaaatcactctataacaattccagatttaaaaattctgctgcagaatatggcggtgcaatatttgacatgggaaatgcggttttatacaatgatttggaattcattaacaattcagcatcctatggtggagctatctataatcaaggattctccaataccttcagaaactccactttcgtcaataattctgcatttagcgaggattattccaatggaggagccatctataattatggttcaaatgcattatatgagtcatcaatcttcataaacaacagcgcagatatggaaggtggagccatttccaattttggtgaaagctgtgttgttcaaaacaataccttcaatctgaataaggcatttaaaggaggatctgtttatttgagtggacaagggggcagattccaagacaataatgtcttttcatcatttgcaatatatggaggtggattatataactcaaacataaatctcatttgcctaagcaactctttcaacaattgcagtgccaatgtttcagggggagctatctataaccttgtttccacacttgaattatattctaattcaatgaatgactgtaaagctaaactttctggacttggcagtggaaattatgtattcacctgtgccaatatctcttatttggtcatttcatttgcaaataatggaagctttaatattgttgacaataagggtgttttgctagttgctaacataagcgacaatatgggcaatcctattactggaggtaattttacttttatcttgtttaatcaaaccaatcaggatattgatctaataggtagttctggttcttccagttctaattcttcaaatccaagcaatctagaatcaagcatcataggtgtatgtgatgtggtagaaggacaagcattcttaagatatgatacttatttggaattaggctccagatatacaatttcaggaacctattcatatgcagccgaacctgtcttgacacaagtggctaatttaaattcagttctatccacaaggatgtacttctcatcaaacattacagatgatatggttaattttggagagggcttcaattatgaaatcattcttttggattctaatgacaattatattcctaatgctgaaatcttattgtatgttgatgcagtctattccaagtctgtatttaccaatgaatttggctatttgaagggtagtgtcaataatttaacttcaagcggaaagcatttctatagcttcatttatagcggagatattttccataatagggcaagctatgatttaaactttactgtattctacaataactcctactattatgatgatgtttccatcagctttagagatttgatctattcatttgtctatacaagtcctaacagtgaaattccttttgaatttttgatttctcataatgatggcgttccattgggaaatgtatcaacgcctcgttattttgtcgcttatgaaaatggcattccacttgccagtttctcttgcacagattatttgggtgtttgtaaaggtcaggaagtcttatattcaattatagagcttaacggaaaattagctaaaatctttagaacttcacctgaaggtattttccaaatgttaataaagcactcagaaagaggactctatgagtataggattgcatttcttggagatttggtaaagcactacgattctagcacccataatggcataagcaatgaagacactttttacaatccttgcaatatttcatttttaatgcttgttgatgatgagcaatccactattccaactagtttgaattataatggtcctaataagattacagaagtggattttgcttattataactttagcttaagtgaaaacagtaagaatccattggccaataaagaaatcagagtttatgatgatggaaattacttaggttcaagttatacaaacagcaaaggctttgcagaattcaatttcccgcagatgcttgataagggcaagcacataatcagttttgtctatgtcgcagatggggattataaaagtgcatactccatctttgaattgaatgtattggaaaacccttctaaagacaatgtatcatttttcaataaaagttctttaaacattactggagctaataataattttacagctcagattaaggattcacataataataatctatctgaaatggtaataaggctatctattctgtttaatggttctgacaataagccatatattaagaattacactgcagtaagcgataaaaatggtgtgttttctattcctcttgaattaggggcaggtagctatctgattaaatgttcatttgctggaaacaagcattattggaaatccagcaagacattcaatcttactcttaataaggttcctacattattatttggccagtccagtgttgaagtattgaaaaatgacacttatctaactgttatattatctacaaatgatttgaaaagtttatccgattcaaaaatcaagtatttggtatttgattcaaatatcactggcttgaacttatcctataatgattcaagtgaattaataagggacatttcaaactatgcatacacattctatgcatttacaaatgagtcaggcatctccaagcttaagataaatcttccagtgggcagttattatctggtaagtttatttgaaggggataaatggtatgatgaatctagccttatcaccaatcttacaatctatggaagttcatcaagattgattgcaaatgaaaatgtcatagttaaaaaatcaggatattacactgttaagctcgtagatggcaatggcaatcctatccagggtcagacaatagagattacagtttgcaataagacatacactagattctctgattccaatggggaggctcgattggccattaatctaaattatggaaattattccatccaatctaagtttaatggaactcttaattattcatcttccattgttgcctcaaggctatatgtggttgatgaggattataagtatccttccatattgactgtcaattcatctgatatctatagggcctttggctattatgatgtggtattgtctgatgtaaatggaaatcctttgccagagaagagcattattgttgaagtgaatggcacaggatttaatattaagacagataataatggattggctcatttggattataatttcactgtaggcagatacaatatagtttcccactttgtgggagatggggattatcaatatagcaatgtcggttccatcttgaatgtcgttaatgaaaatgcggctaacactctgctaaattcatcaatttattgggtattgaaaggaaaaggcaataattatactgtcactttgactgataagattcaaaatccgattgaaggccagataattgtattttccattaatggcagggaatattcaagaactacagataagtatggaaacgcaaatctggccataaacctcaatccaggatcttatgacatttatgcattctacaggggcactgatgtatattattcaagtgaaacctatagtaagttggttgttttagctttggaaaatgaaaatgaagggtctaattcaagttcagccattggctcttccaattccagttccaataatgattctgatgtagattctactaatacttctaattcaggtaattctgagactaatttaactaatggttcaagttctggagattctggaattgataatattaatggttcaagttctggagattctggaattgataatattaatggttcaaacgccagtacaaatatttctaattctactggcgcaggtaatgattcttccagttctgggcttgataatattaatggctccagttcaaatatttctaattccactggatctgataataactcatctagttcgggtattggtggcaatttgactaatgctactgttaatgatggaacttctatttcaggtaattcctctgttactaatggttcttctaatctttcaaataatgacactataaataaaagcgacaaaccggtgattattcctaaaagaactgtaacaaagattatttgccataatatgaccaccactgcagtttctaaagcagatgggagggtaggaaaatactttgaagtaagtcttatagatgcaaatggcaaaccattagccaataaaagaatcctaattggattcaatggaagaaaatataaccgtacaacaaatgctacaggaggtgcaaggcttcaaatcaacctagcatacgaaggaaaatacacctttgcaatcgcgttccttggagatgattattatagcggttcttttgaagtggctctcattacagtaaacaagcacagtccaaagctcgatgcatcttcaagagcatataagtatagtgataagactaaatcattaactgctaaattgctatctgccaatggaaatccaatcagtggcaaaaatataatctttaccgtcaatggcaagaattatgctgcaaaaacagactcaaaaggacttgcaagggtaaatgtttccttaaataaaaaaggaacttatacagtaaaaattaaatttatgggggacagttcatataaatccgcttccaagaaaataagccttagaataatctcccctagcgaaagataa

SEQ ID NO: 978 - DNA, 8754 bp, Methanobrevibacter ruminantium
  source 1..8754: mol_type = genomic DNA
atgaaaaacaaggcaatgtttttaatatctgcattattgatagcagttattctatctctcagtgctgtaagtgctgcagatgatgctattgctgcagatattgatgacattgacgattcaatcgaagtatcttctgtagatctctctgcagacacagaggatataagctatacggacgtctcttttaatacaagcaaggataagaatacattatcctcaaatattgtagaggagggagatggttcatggtatgtagacagtaaggttgaaaccactggtgatggtagtcaatcaagcccatataagaccataaaagaagcatttgatgcgtctggtggtaatggtactatctatttggcaagcggtgtatataacaccaccaatgataggagtttttcattggctttggattcaggtaataatctgtccattattggtgctggcagcgatgagacattaattgatttattatctctttcaaataattttataaacgttagaaatggaaataacttctatttgtctaatgtgaagcttatacgttctggaactactgcaattagtggagccaacataactatagaggactccgtatttgccaattcttattattacggcggagcaccgattttgtctttaggtggcggtgacaacactataagaaattgtgtgtttgttaacaattccgctggaagctggtatgggtcaggtgttgcaattttaaatggaaatgcaaatgtattatttgacaattgtctatttaagaataataccaacactaacggaggttcagtattctataccacttcatctaatatcaagttgactttaaacaattgtaatgttacagaatgtcctgtagctttctatgcttcctattttggaaatgtggtatttaacaattcatatttctataataatgatgtgacacgtttaaacaataggtattgtgccgttttctattcaaccgatccaggtaatctaactatagattactgtaaatttgaaaacaatacaggagtcgatagtgcttctatcattagcgcttatagcagtaaccgacctttaaatttaaccgtcactaattctgagttcattgacaataagatgggtaagaatagttatggctattatactgtcttcaataatatctatatgggttcttggggaggtaatttatatttaaaaaacaacactggttcatttggaaatttatcatttgtttcaattagctctgcaaacattaattcagagattaatttgattgttctagataatacaacatatgacattaatgcaattgaaataaatgttatcggaactttaactgatgatatgggaaaccctattaatatgagcggtttcgatttatactttaacgacactttagttggttctcaattaacttttgactctggtgtgaataattacacattcaaggaagcattaagcggttcctatcttgtgaaatatgtctataactccacagctaatttcactaacttcaatcaaaagacttcagttatgaacatatctccattggaaaacattgatgtatatgttgcaactgacggatctgatgaaacaggtgatggaacagaggcaaatccatatgcgacagttgaaaaggcattggatgttgcttcaactgcattgaatgcaaatgtctatattaaagctggaacatacaaatactatagatacagagcaatagacactgcaaatggtattttaaacattattggctatgacggtgacgtgactattgatatgaataatgaaaccgcattttgtaatgtttcaaacaggtctaatgtatttatttccaatgtagactttgtaaatggatattcccaatatcttgtagataattatggaattatcaactcctttggtaatttaattcttagtgaatgtaaatttagtgataataatggttattattatataatttctggtcaatcaacaattgattcatgtacatttgaaaataataagttccaacaacaaaattctgctaggattttattcaatccagcatatgttaacaatgtaactttctataacatcactgccatcggattcagtgccaatagcttgaatcaaaaatatgacttgactatagaaaattgtaagttctatgataatgccaggatattaatttcaaacggtaatgtgactataagatcttctgaatttgcaaatctttctaatcagagagcattggaaactcaaggtgtagttgtcttgtcaatagatgattgtacctttaaagattcagatcaatcagtaatttacttatatgattatgcctccactactattgcaaacataagcaattccaaatttatcaatatcactcacgaaaatcctgtttatgtgggcaatggtcaggaaatatatttagagaataatgaggtttcagatttggctgctccttatgtttatataagaagcggttatgttgcaagccctataaccattttggttttaaataatgaaaccattgaacaggaaagctatggtgctactttaaaggcaaaagtattggatgatagcgaaaatgcaatttcattaaatagtttcgtatttgatttcaatgacgaacaaatcaacggaaaattggtatatgatgaaatggtagctaaatccatgggcatttatgatggcacttatttggttagtgcaagttccacaaatcttttaaacccaattcttaaaacaggtgttttaatcatcactccattaatgaataaagagttatatgtttcaactggaggatcagatgaaacaggtgatggaaccgaggtaaatccatatgctacacttaaaaaagcaatggatgaagctgtcgcatttaataacactatccatgtagcagaaggagtatatgctattgacactgcattggaaatcgacaccaacactgcaattgtaaatattgtgggaagtggtgaaaatacagtatttgacatgaataatgaaattaactttataaataccatttctgcaaattccatcattgaattaaaagatttaacacttgcaaacgctaagtcccctgcaaatgcaaaaggaggatttataaccaacttaggtaatttaactgtaaacaacgttaatttcatcaattccactgctaataatggtgctgccattagaagcagcggtaatttatctgtaactgattcatacttcgaaaatactgttgcatcaagtaatggtggtgccatttggagtaatggcggaaataattatgtattgaattctatttttaataagacaagcgcatcaaattatggaggtgccctttatagcagaaattatctttacattaaagataacactttcatagatacaagtgcaagtgcagcgaaaaatatatatgttcaatctaaagttgagggaggagttgttttaacagttatggataattctacttggactataagtaccagttcagtaactttcaatgcaactttaactgatgaaaataatgaccctatttatgcatcaaacattccagtatcattctatttggatggaattaaagtcgcttcctccagtattaatggcgaaaaggttactgcaaacgccaatttaaagatgaatggtgaacatattgcatctgctagcttaggaactgcagaagacataactgtaaaaacagcaacagtgagctttgtaaatgatgcagtcgcacatgacgtatatgtctccgcaaacggggatgatgaaaccggtaacggtactcaagagaacccatatgcacatatctccaaagctttaactgtagttgagtccttaaatggtgtaattcatataatgaccaatctcactaatgtaccggtcaattccattgacggtttctacaatttaaccattatgggtgaaaataatgagatattcattaagaacagtacatcaggatttgttatgcttaattcaggttccttaaacttgcttaacttgagattcactgaagcaaattatcctacttactttattttcaccagagcaggatccagcttgtctttagaaaactgtagctatgaaaatgtatattatccaaaagacggatattatccagtattcattgacagctcaagcgatttcttaagcttgaaaaattgtaaagtaattaataatgtatttaatctttcagatttatcaagtggtgtcatacgttcaaaatcaaacaccacctttgaagactgtgttttcgcaaataactcttacacaaataggaatggtgctttaggcggaaacttcctcttattctctaataatcagaaggtcttcttgaaaaactgtatttttgataacaacactgcaagattattgaatttccaatcaacatctgtagtggataattgttcattcactgaaaacaatggaactttgattactgcaagttatccaattaatataactaataataactttacttcaaatgatttggtaagtagtttgattggtgtttcaggcaatgcagaaattacaaacaacatagttaaagaaaacactgcaagtgcatttgtatttgcatctggaagtgctatagtcaatattcatgacaatactctcaatttgggagacatgccatatgtaaacttaactggtaacactaaaatcacaggttccacatttacattgactgtaaacgataatgacacttatgagattgaaggtcttaaccttgcgttcaatgcaagcttggtggatgctgatggcaatataatttacggaccattggtatacttcaccttaaacggcagtgacataatctctgctaatttagtccctattgcaattgcaaacactaaatttggtggagaaggcgaattcattgcatctgcacgtactgatgcaatgtatgactcaagcgaatggactataaagacttcagtattcaacatcaagcaaatcgctgagaaaatcatatatgtggacattttaggaagcgatgaaaccggtgacggttctgaagaaaacccatatgcaagcttggaaagagcagttcaagatgcaggtggtcttaataatatcatatacatccaacctggcgaatatgataatatgactttaggcagccaatatgtattaatcgacgatcagacattatccatcattggtctatccaacgaagttgataaggtcattattaaaaaccttgataatacatttgcagacattgcttatgaatatggaaaatattctaatgaccaattcacattggcaaacattgaatttgttgactcaagcttaagcactgatttaatcagaaccaattatgtaaatgctgttttagttgaaaatgttgtctttgacaatataactgtctctaatttaataagaggggattcaactaatcttgtattaatcaattcaaccattaatgcaatatccagcagttgcgtactcaatacagaaaacatcactgttttggattcagtaattagcaatgcatacggatacagaattttcactataggtgctcgtcatgctgcagatttaacaatttataactctgcattaatcaataactcttacataggtgccttgatctatgagcaatggacttccaccaaaactcttgaaaacaactggtggggctataacaccactgaagatgatttaatggctttcaccaatgtggaaattactaactggatcgtagcagaagtaactccaagcagtgacagcatcaacatcggagacaatgtccaattcgacatcctattaaaactcaatgatggctctgaattaacagatgttctcccaacccgtattgtaactgctattgcagaaaataccgagtttgatgaggatgaagtagaaataatagacaaccaagctactatcactggaaccgtaaccggaactggtgacattacaataaccatagacgaacaggactttgtattccctgtcaacggatatgttgcataccttactgtagacaatcttgcagtaaatgtgggagatcctataaacgtatgtgtcctattgcaggatgagttcggacctcttgcaggtgagcttgtaacaatatgggtcaatgaagttgagtataacgataccaccaatgatgacggtatggctatctttgaaatcgatggacttgaaaaaggaaactacattgttaccgcttcctttgcaggagatgagctctatgacggaacaagcgctgtcggattgatcatggtatcagatgcaatcctatccatagacattccagctgttgactatggcagccctatcactatctatgcaactgtggaagacagcgaaggaaacccattatccggtttggtcattgccacccttgacggtgtcgactgcaacatctatgtggatgctggagaaggatccatcacaatccctaacgagctctttgctggcgaatacttggtaaccgctaagctcttaggtgaaaacaatgctatggacactgcattgcttgttgtaaacccaattgaagctgaacttattgtaagcatagacaacattacctacaataatcctgttgaagtagaattgtcctctgaatatgcacttgacggaattgtcatcctcacaatcgatggcgtagactatgcaatcgaaatcgaagatggcgaagccatcgctctattgcctatcctgcttgactcaaaggattatgaagtgactgcaaaattcattggcgaaaactttgacgttgaagacgctaccacaagctttacagttgaagcgatcgaaactgcattgactcttgaacttgaaaacagcacaatcacctatggcgactttgccatagtcaaggtctcacttgttgatgagttaggaaatcctatggacggtattgtcaccctcactgtaggagatcaaacaggctcccttgctgtagttaatggagaaggcactgtttctgttccatatcttgctgcaggcaactacactgtaacagccaaattcgaaggctctgcaaacttcatttatgatgaagacagcgcaagccttgaagtcactgcagacgacaatgtccaatttgatatggacgtaatcggaaacagccttgtaataagcctcgttgatggcaacgacaacccaatggatgcaaccgtaaccgtcacaatcgacggcgaaagccaagatgtcactgttgaaaacggaataggatttgtctatgaccttgaagctggagaccacacagtaagcctagactatgatggagatgcagaccacgcctctgcaagcatggaagatgaagttacaatacttccagaccctgtagttcctgtatctgcaaacgcaaccatcgaattggctgttgtgggagactatgttgaagtcaccttaaaggaccttgacggcaatccaattgctggcgctgatcttgaagctgacttaaataacttcttactatccacagtcacaacagacgatgacggtaaggctcttgtagacttgtatggagaacctaacttcaacttcacagttactgtagtctacacagatgacttaggctccagcgtaagcgcaagcctcaacaacatctatgttgaaaacgaaacaacagtcatcatctatgagaatgtcacagttcctgtaaccgctaacggatcaatgtctgtagaagcaagcgaagatgcaataaccgcaacactcactgacagcgacggaaaaccattagcaaacgctacagtcaccgctgtaatagacggagtcgaaaccaacttcacaaccgatgaaagcggcaaattgactgtacctatagatgaaaactccactgtagagctaagctacaccgacgacaacggcgcatcagtgacctatacaaccaaagtggtcaccaacgaagtgccagtcccagtccctgtacctgtccctgtaaccgttaacggaaccatcgcacttgcaaccgaagatggcaagtcaatcgttgcaacactcacagacagcgacggaaaagcaatagcagacgcagaactaaccatcagcgtaaacggacaagaatccacagtaaaaaccgacgcaaacggtaaggcaacagtagacgtagaaggcaacacaacagttgtagccacctacaaggatgcaaacaacctcaccgcaaccggatacatgaacctagtggtcatagtaaacgaaacaataatcaacgaaaccataatagtaatccctaacagaacagaaactgtaatcgattaccaaaacatgaccacaaccgtagtcgcaagcgctgacggaagaataggcgaatacttcacagtagtcttaagagacgacaaaggaaacgcattagcagacaagccaatcaagataggattcaacggaagagtatacgaccgtgtaacagatgaaaacggtagcgcaaaactccaaatcaacctaggatacaaaggaacatacacctttgcaataggattcctcggagacgacaactacaccggagcattcgaagtggcaaagatcacagtcaatctacagactccaaaactaagcacttcatctaaaacctataaggcaagcgctaagacaaaagccttaactgcaacccttaagacagtaaacggaaacggaataagcaacaagaaaataagcttcaccgtaaacggaaaaacctacagcggaacaaccaacgacaagggagtcgctactgtaaaggtaagcctttccacaaaaggaacctacagcttcacagccaaattcgcaggcgacgaccaattcgctaaagtgactgcaaacggaaaattaacaataaaatag

SEQ ID NO: 979 - DNA, 843 bp, Methanobrevibacter ruminantium
  source 1..843: mol_type = genomic DNA
atgtctaaaggatatcccaatttttatgataggatgatgaagaatatagcatcctatgatttgaaatcattctttttattctttggactggattgcattccatatttttcaatagccaatgaggtagttgacggaggtttgaatctaagcttattggatttgcctgtttgcacttcaaaaggaattgtaaattttgaatttcaatttgatagggatgaggcggatgataggagatttataagatatggcgttcaattatatgagaaatatggatttccagttatgtctgtagtgatagactttaaagcccaagaggatgagccttttccaattgaaataagcaagggatgcgtgtttactatatatgtcaaatcgttaaacgaaagaaatccggacatagttttaaataatataaatgataaactcgcaattaatgaaaaacctttaggtaaagatctcacaggtctaaaattgcttccttttttggatttggatagaaaaatagaattgttggataaggctactgaagtcttattttccttagataagaatttagttggcttacgtgagataaaacatcttatgagggttataatgttttattcccatcaatggaattatgaggagaatttggatagattagggagatggtcaataatggttgatgatttaagtcaggatgctgttgttcattttggtaaagttaatagaaagaaaggtagagaagaaaggtcttatgaagttgcaagatatatgattgatgatggcttttcagcagaggatgtttctaaatatagtcgtttggatctatcaattgtaaaccagctaatgctaatgaaataa

SEQ ID NO: 980 - DNA, 3375 bp, Methanobrevibacter ruminantium
  source 1..3375: mol_type = genomic DNA
atgtcaagaaaaagcaaagagaaatatgagtgggactacagcacctactcaaaggtggatcctaaggtaagaagctactttccgtttgccaaggctaggcctcagcagcttgagacaatctcagaaatccatgaggccatagagaaaggatacaagtacatagtacttgaggctggaacaggtaccggaaagtctgcaattgcagccacccttgccatgtgctacggcgatgcctacatactcaccatgaccaagcagcttcagaggcaatatacaaaggactttgaggattatgactttgcccttgtgaagggcagaagcaacttcgattgcctgaagtatatggaagaggcaatagaggaaagctgtgacatgggaagatgcgtccttgaggggcataagtgcagctataaggtgaatcagttcaatctctataagaaagaccctggggaatgctgcccatacttccatcaaagggcgatagccctgaattcagacatagtcatcacaaactattcctatctctttgccgagcttaacttcaacaacgacttcaaggccaagaggcttctcatatgcgacgaggcacataaccttgaaagcaagataatggatctgatttcccttgagttcacaagacgccagctaaaggatgaggttggaataaatctctctaaggagactctgaaggaccttgatgagaagggctacacatcctggctgcagtttataaagagggtctgtgaaaggtatggggataagagcaaggaaacaaagaaggcattaggcaagcgaaaaagcctaacccttcacagaaggtctgaaaacctaaaaagaagacttgaggactttaagaggttttcaaattacattgcaatagacccggacaattggattatggattatgacccccacagccaaaagctttcattcaagccgataaggattgacaagtatgcaagcgaggtcctccttaagcatgcagatgtctgcatcttcatgagcggaaccatccttaaccatcaccagtttgcaaaatggcttggaatcgaggaggatgaaatctatcccatacgtagaaagtctccatttgatattagaagaaacccaatcagaacatactcaggctttgacatgacctataggaaccttggatcatctgcaaaaaggtcagttcctgtgataagggagatattggaaaggcataatggggagaagggaataatccataccgtcagctatcagtgcaaggagtttctaaagaaggaactcaacaatcccagacttttggaccatgagacaaaagacagggaaaaggttttggaaaagtttaaaaagtcagatgagcctttggtattaataagcccatccatgaacgagggagttgacctgccgggagacctgtgcaggttccagataatctataagataccatatcctaacatttcagacaagcagactaatataagaagaaagaaggaaaagatttggtatgactatcagactgcaatcaatcttgtgcagacctatggcaggggaatgaggtcagaggatgactattgtactacatacttcattgacagcaggataaagagttatttgaagagggacagcattaggaataatctgattccagacttctttaaggaggctgttgatgtggaggcagctgagattgagaaaaatccaattagaaaggcttctgatgcctctgctattgctaaatatgaggggtcagaattttctgatggttctgataatgataaaaatttaaaaatagatgattccacttctaaatctcaaaaggacagtaaaaacactttcaaaaagtctgatgtgagaacaaaatatgctttaatgaaaaagggaaaagacctggcaagaacaaacaagaaggaagcaatcgcattttacaaatccctattaatgcataaatgctttaagaatgattattatccatatagaaagcttgttgtcctttatgacaagacaaaggactataaaaacgaattgggactaatcaaattcttcttcaataggggaatccactgtccaagactctactatttctggtttttaaacaagcttttaaagctatctgaaagaggattgattactaaagaggaaattaaagagcttgaaaaagagtatatgtcaaagggatttaagaacaaatccgtccaaagcagctctatgataattgcagatagaatcgaacattactatggagatacatatgtgctctcagagcataagttcaacaataagttaaagtctaaggagattatagaagagggaaaatactttgagagaaccggaaactaccaaaaggcaattgacttatattcagaggcaatattcgacaggcatttcaataattactcattctatcaaaggatatgcttctctttggaagagctggaggattatgaaagggaattggaatacattaattcttattttgacaatgatagtatcaaaaagtctgaaaccagtgaaaagtggtttaataagagattggataaggtcaatgggcttttggaacttaagaataatgagaaaaacatatcttctgaggttaaatcttccgatgaagattcaattttaaacccatccaatattgatttaatggaatacgatgattcattaagtctggaagacaatatccaaagaaagatggaacttaaagagcatgcaatggaacttaggagaaataagaattattcagaattaatctcttttttaaatgcactgactaaaaactcctattttgaaaacgactattatccattcaggcatctatgttcaatatatgagcaaatcaagcattactcttcaatgaaggattcaattaaggacatgctttatgcagatgtttatttaactgactatcagctagtatggctaaagagcaaaagggaaatagttgatgctcagataggccttgatgatgtcctattcaatcaatggatagaccactacaagagccatggggcaagaaacaagtcaaaggccaactctccagtgcctcttgcagacagactaatcaaaaaagatgaaaattacaatgtttcaacttctgaggaattcgatttcacccagaagaaatatgaattgactgaaaagggaagatctttagagagaaagggaagatatgaagaggctgctgagttttatatggatataattaaagagaagaagtatcaccattatgacttttataaaaggctttgcttctccttggatgagatacctgattatgaaagggaattgaaggcaatcaagttgtattatacctgccctccaatctttacagatgataccagtgacagatggtttgaaaagaggttggaaaaggtcaattctaaaatctag

SEQ ID NO: 981 - DNA, 498 bp, Methanobrevibacter ruminantium
  source 1..498: mol_type = genomic DNA
atgggaaagataacaaatagaaaagaggcattaagcaagagagaccagatagaaaagcttcaaggggaatcttttgaaggtgacgacaacattgactggtttggcagaatcgaggagatagtgattgatgacgattactgcatctatcaaatcggcaaatattcaaaattatctaattattactatgatgactttgaggaatattctaaagagtatggccaagagaatccattgaatctttgctttgaggaaataatttcctatttgtctaagatcgttctcggcgactttggagacaacgtcaaagccgaatgcattggcaagggagggatagttgaagtgaatggattgaacttccatcctgtttcccggatagacattgctgatttgaatggagaaagctttgtatatctttatgatgacaatgatctcattgcaagaattccattctttgacataaccagctataagataactgctcctgaagagagcgtttaa

SEQ ID NO: 982 - DNA, 165 bp, Methanobrevibacter ruminantium
  source 1..165: mol_type = genomic DNA
ttgggggttaattgcattagagttgtaatagacaatgcagaagaaagtataacaaaggtggctaaggcccatggaaatggggctttggtgttggttccaaaacgatggatcggcaggaaggtacagataaccttgctggaggaagaggacaaactgatgttttaa

SEQ ID NO: 983 - DNA, 603 bp, Methanobrevibacter ruminantium
  source 1..603: mol_type = genomic DNA
atgaacagttgtgctgttgatgtaaaagaaaatagtattgaatccgcaatgggcatcaatacaagtgaaagcgatagctttcaattaaacactatcagttccgttgatattggagataaattcaaatcaagcggagcaacaaactatcttgaaagcattaaagcttggaaaaacattgaaaagattatcgattgcttagtcccatctgatttggaggaagtgttttcaatctcttcaaataataatttcaagatcaattgggatgaaaaggcattatatgatgtattatacacaaatgaatcttccatatttgtcccattaggctgtatggaacaagtaggcaatggatattatatcatgaaccataaggatatggtctattctaatccagatgacttcatccatgaaaatggtgtttatggattgattatcagattcgacaataatatgattcaatccgaatatgcatattgcgaatataattccggactttccttagacggagaaaattgtgacttcgttaaaatggactttatatcaggggaagacaccgtagaaaattatattttcgattctttgaatggatttaatctttttaattaa

SEQ ID NO: 984 - DNA, 417 bp, Methanobrevibacter ruminantium
  source 1..417: mol_type = genomic DNA
atgtattattataaattagagtcttttgactatgatgagcattggacggcattctatgtttcaaataaaaagtattccgacgatgaattcaaaaagatagttaaggatgcttatattgaaacttgcaagcatatttcagaaaatcaaaagccagtatcaaaatttaactatatgattgattctgtcatttttgatatcttgcaggaaagcgataaagataagagtcagccatgccactatttcaataggatattaaaagacaggcacgatttaattaatttggacgattgtttagattctaaattggaatttgttgaacaaaatggcggtaatgataatttgagggagttttatgacaaaagaagtgagtatattcttgtgggtatatcagatgatgataataagggatacatataa

SEQ ID NO: 985 - DNA, 1257 bp, Methanobrevibacter ruminantium
  source 1..1257: mol_type = genomic DNA
atgaacaaatatattaaaaaatggacagaatcaagtctgattttaaagatcatcggtggtttgattatcggatccgtattaggaatccttgtacctcaatataagttaattggacttccaggagagctatttgtaactgctttaaaggctattgctcctattcttgtatttattttagtggcttcagctctatctagggcaagcgaaggaataggcagtcgttttaaaacagtaattgttttatatttattttcaactttcctatctgctatggtagctgtaactggaagctatctcttcccagttggcatgcatttgacagacgctagtgatgtggcagcacctggcggattgggggaagtcataagttccatgcttcttaagatctttgcaaatcctttgcaatccttatctcaaggggattatttgggaattctcttttgggctattgtaataggactatgcttaaagaaaattgctagcgacagcacattggatgttttctccgacttggcagatgcaaccagcttggctgttaggggaattattcaatttgcccctataggtattatggggcttgtatttagtgctgtatccgaaagtggattaagcattttcatccaatacggtcaattggtcttattgcttgttggatgtattgcaacggttgcatttgtaacagaccctatcattgcagcatttgccttaaggcgcaatccttatcctcttgttttgacttgtcttaaggaaagcggaataactgcattctttacaagaagctcagcagcaaacattcctgtaaatatgaggctttgtgaaagattaggccttgacaaggacttctattcaataagtattcctctaggttccacaatcaatatggaaggtgctgctgttacaatcacagttatgaccttggcagtatgccatactttaggaatcagcgttgacttgcctacaacaattgttctatgtatcatttccactttggcggcttgcggttcctctggtgtagcaggaggttctttgctccttattccaatggcatgttccctatttggaataccttcagacatttcaatgcaggccatagcagtgggattcatcattggagttgttcaggactcatgtgaaactgcccttaactcaagcggagatgcattattctctgcaacagcagaatatcatgacagagtcaaaagaggggaagatatgaacttcctaggtgaatttgctaaagataaggcaaaacaataa

SEQ ID NO: 986 - DNA, 1473 bp, Methanobrevibacter ruminantium
  source 1..1473: mol_type = genomic DNA
atgaactatgaatttatactaaatgatttaaggccatctcaagaggagattgatgcagtaaacaagacaacagaaaaagtgataagctttttaaataagacctgcaaagaggaaaatattccagcacaggcttttgcagtaggttcagttgctaaaaacacttggttgagtggcaaatcagatatagacatattcatacgttttcctttaaaaactgatgaggcagtgcttaaggaaaagggcctatatcttggatataaaacaaatgatgcattaaaaggaaaggcatcagagcattatgcctcacatccttatctgacctgtttaatagatggaatcgaagtggatatagttccttgctattggattgaagatggtagccaacttaaatcagcagtggatagaaccatcctccacaccagatatatacagaaacacttaaagaagtcccaagaggatgaagtattgcttttaaagaaattcatggatgccgttggcacatatggctctgaattcaagacaggtggttttgcaggctatctatgcgaattgctcattctaaaatacagcacctttgaagagacccttagacaggctcaggattggaagttccataccaaaatcgatttggaaaactatggaacctcagacaataagctctttaaaaatgaccctcttgttttcattgacccaacagacaaaaaccgtaatgtagctgcagctttaagaatagagagaatgcttgattttataatagcctctagaaactacatcaatctaattgacagcttagaggatgccgatgagaacataataaaagaaaaagtcttaaaatacttcagcccacttcttaaggagagattccaggacaaatcagttaaagaaatatcagatgacatattggatgagtttaaagaccgagaaactcaaactttagtcatcagtttcccaattccagaaatgaatgcagatgctcttcatcctcagcttttaaagacagttgaatcaatatcccataagctggaatctgaagacttttcagtttatagctatgactattggactgatgaaaaaaatctcgtcatcttcataattgagctaaatgtattcaagcaaagcaaatattacgttcatgaaggtcctaaggtttggaataagcttgcatttaataacttttcagccaaatggtcccaagagtctctatatcataaaggggaattcattgtctttgacagggagcgtcaattcgttacagctaaggaattggttaaacacttgcttgaaaaggataatattcatgagattaaggttggaaagaatttaagaaaagctattagcagcacccataccctttgtgagattgatgagtttttagaaaatattgatcaattcatttgtgatgaagcagatcaaagggagtttttaaatactttagatgatttattaaggccaggccagtatcttaaaaggtaa

SEQ ID NO: 987 - DNA, 465 bp, Methanobrevibacter ruminantium
  source 1..465: mol_type = genomic DNA
atgaatactgaaaaagaatttaatacgactgtttataattatgaccgtttaggagaccttttgtttatttttcaaaagaaccataagacctatcttaataatctcttggcagagtatgacttaaatttgatacaggtattgtgcattttaaaaatagatagtgaagagaatcttaatcaaaaggacttatcagatagtttatatctaacaaaaggagccataaccaaagccataaagaaattagaatctaatggcatagtcataagggagaaatcccctatcgataaaaggcataatgtgcttgctttatcaaagaaaggagaggatcttattccaatcataaatgacataaatcaagattgggaaaagagaatgggtttggatgagctttctcctgagtttttaaagacttttaaggccttggcttttaaatcagctgagttgaataatgaaaaattagtttaa

SEQ ID NO: 988 - DNA, 414 bp, Methanobrevibacter ruminantium
  source 1..414: mol_type = genomic DNA
atgaaatttaacaagagtttaattgcaatttttgtaattttgattgttgctttcagttccatatctgtcattgcagcggaagatgcagaagatgacaatccttatcataatggtgctgtaatgaatgaacaggaacctggatctggtgaagatgatgacaatccttatcataatggtgctgtaatgaatccacaggaacctgaatctgaggatgatgacaatccttatcaccacggtgctcttatgaatccacaggaacctggttcaacagatgattctcaagcagcaggttcatctcaagcagatagttcaaataaagtagctcttagcaaatatcctactggaaatccattagtagttttattaatgtccctttccatcattggacttggtactttaagagttagaaaatag

SEQ ID NO: 989 - DNA, 939 bp, Methanobrevibacter ruminantium
  source 1..939: mol_type = genomic DNA
atgagcataaaaaaagtagttgtagctggtggaggagtattaggcagtcaaattgcttatcaatctgcattctgtggatttgatgtaacagtttggcttagaagcgaaggttcaatcgaaagggcaaaacctaagtttgaaaggctcttgaacatctatttaagtacacttgaagcaatgaagactgataagtctgcatattgcagaggtttaagcaaaacagcagacctaagtgatgaggaaattgacagcttaaaggagcaggctcaaaaggcttttgatagcttgacacttactacaagctatgaagaagcagctgatgatgcagaccttgtcattgaagcaattgcagaagaccctaatcaaaagatagccttctatgaggaattgagaaaataccttccagaaaagacaattctggtaacaaactcatctaccttgcttccaagcatgtttgctgaacacacaggacgtcctgaaaagtatcttgcattccactttgcaaataacatctgggctcaaaacactgctgaagtgatgcctcatcctggaaccaaacaggaatacttcgatgcaattgttgaatttgcagaggacatcaatatggttccgattaaggtattgaaggaacagccaggctatgtattgaactctttgctggttccattcctatctgcaggtcaggcattatgggcaaatgaggttgcagatcctgaaacaatcgacttgacttggaggcttgctacaggtgcacctaacggtcctttccaaatattggatgtcgttgggcttgtaacagcatataatattgtaattatggatcctaggtcaaatgaccctgagacaacccagggaaaaatagctgcaaagcttaaagagaaaatagatgctggtgaaacaggtatcaatgcaggaaaaggtttctacgagtatggatag

SEQ ID NO: 990 - DNA, 684 bp, Methanobrevibacter ruminantium
  source 1..684: mol_type = genomic DNA
atgatagttagtgtaattggtggaactggtccacaaggtttaggaattgctcttagattagcaattgaaggtgtagaagttattgttggttctcgtaaagaagaaaaagcattagatgttgttgcagaagcaaaagaaaaatatgcagactatgacttaaacataaaaggtttagctaacgaagatgcagctaaagaaggtgacatcttaatccttacagtacctcttgcagcacaaaagccaactgttgaaggaattaaggaattttgtactgacaagattgtattagatgctactgtacctttagaaactgcaatcggaggtaaaccattcagattcatagacctaatggaaggttccgcagcagaacgtactgcaagcattcttgatggaaccggagcaaaagttatctgcgcattctgtaacataagtaactctcacttatccaacattccagaagacattgactgtgactgtttgattgccggagatgacaaggaagctaaggaaattgcagcagagctcatcaacaagattccaggtgtcagaacaatcgacacaggaattttagaaaaatccagaatcattgaaaagatcactccacttttaattggattaaacataaaatacaaatcccattacggtggtcttagaattactggaattcctaaattggatgaataa

SEQ ID NO: 991 - DNA, 1497 bp, Methanobrevibacter ruminantium; identical to SEQ ID NO: 119
  source 1..1497: mol_type = genomic DNA

SEQ ID NO: 992 - DNA, 903 bp, Methanobrevibacter ruminantium
  source 1..903: mol_type = genomic DNA
atgaatattataaaaaatctgcctttggcaataaccggattgatattggccattctttcacttggaaagatattcgctgatttcagcgccatattcttcataatcggctctattttaatatttatggtattgctaaagcttgtttttcatttcaatgactttttcaatgagctgaacaatctgattccattaagcacattcggtacattctcaatggctcttatgctttggagcacatatctaaagcccttattcctgccattgtcacaagatattgcctttgtgatatggattttaggaataataattcacctatccattattttgttctttacaaacaactatgtgcttaacaatttcaatattgaagatgtctatgcaacttggtggatcgtctatattggaattaccatggctgcaattacagctccagcccatggcctctcaaaatatggattcattttctttggaataggatttatattgatgataccaacattggttctggtctcctacagatacattaattttaaacaaatagacgatcaaaataagccattcatttgcatttatgctgcaattttatcaatccttattgtaggatacgtgaatgctatgacaataaacggcacttttctaagcattatctacataggggcagttattttttatatttttgcaataattcaagcattcaagtttataataattgaaagattgaagtttatgccaagcttttcagcctttacatttccatttgtaataagcgcaatagctacaggggaggcctataagttctttggacttgatattttgaattatctcttttatattcaagcgtttatagctttgattttagtaatatttgtattgtataattatttgaagtttttaatgaactag

SEQ ID NO: 993 - DNA, 510 bp, Methanobrevibacter ruminantium
  source 1..510: mol_type = genomic DNA
atgaatgcaatatttaaaagaaaaagcataagaaagtttttagataagccaatagaagatgaaaagatagaaaggcttctaagggcaggaatgcaggctccatctgccatcaattcacagccatgggaatttattgtggtccgggataaggattccataaagacaatagagaatatgagcctctattcaaagcctgccaaaacatcaacctgctgcataatcacattattcaacaaaaaatacactgataagtttgatgattactgttgggttgagcaggatatgggagcatgcactgagaatatactattgcaggcagttgaagaaggccttggggctgtatggcttggaacatatcctaatgaggaaagggtgaattatcttaaagagcattttgatattccagataatgtttatccttactctgtcattgttttaggatatcctacagaggattatcatggagaaagtcgttttgatgaaagcagaatacattatgagacttattga

SEQ ID NO: 994 - DNA, 522 bp, Methanobrevibacter ruminantium
  source 1..522: mol_type = genomic DNA
atggatttattagatgtgatgcttaaaagaagaagtgtaagaagatatacagatgaagagattccggaagaaaagctaaataaaatattgcaggcaggtatgcttgctccaacaagcagaaacagaaagccttgcagttttcttcttataaatgataaggattccttggtggaattggcaaattctaaagagcatggtgcagagctcttaaagggtgcaaagcaagctatagcagtaattgccaatccaaatgtatcagacacttggattgaggactcctccattgcacttgcattcatgcatctaatggctgcagagcaggatgtcggaagctgctgggttcagatgcatcttagaaagtctaaggatggccagtggtctgaggaacttgcaagagagattcttgggcttgacgactactttagaatagttggcatattggctcttggaatggctgatggccagcctaagccacatagccttgatgaaattgacttaaatgatgtgcatatcttgcattaa

SEQ ID NO: 995 - DNA, 576 bp, Methanobrevibacter ruminantium
  source 1..576: mol_type = genomic DNA
atgaaagcaaatgaaaaagagacaatcagaagctttttagcaattgaacttgacgaaagcctagtgccaccaatattagacgttcaaggggattttaaaaagacagacaccaagatcaagtatgttcccgctgaaaacatgcattttacattaaagttctttggaaacatcgatgaggatatagtagaggacataagtggtgcagttgaaaagataataaagaactattcttcatttgaacttaagatagaaaactgcggatgctttccaaatcagaaggtaataaaggttctctggcttggaatagataaggattccaagataacagaccttcaaaaggagcttgataaagagtttaaaaagcttggattcaaaaaggagagaaactacatttcacatcttacaataggaagggtaaaaagccctaaaaacaagaatgagataagggatgtgattgaaaagaataagaatataaaaataggatccatgacagtgaatagggtatgtcttaaaaagagcacattgacacctcaaggacctatttatgagaatataagagtgtttgacttggaataa

SEQ ID NO: 996 - DNA, 801 bp, Methanobrevibacter ruminantium
  source 1..801: mol_type = genomic DNA
atgacaacaaatataggtaaaagaattcgtttagaaagaattttcaatagaaaaaccggaagaaccgtaattgctcctatggaccatggagtgtccagcggaccaatcaaaggtatcataaatatggataagaccattgaagaaatctcccaaggtggagccaatgcagtattgatgcataagggtattgtagagcaaggacacagaggatacggaaaggacataggacttattgtccacttgtcagcaagtacctccctcagccctgatccaaacaataaggtaactgtaacaactgttgaaaaggcaattcagcttggagcagatgcagtgagcgtacacgttaacataggctctgaaaacgaacctgaaatgctaatggaacttggagaaatctctgaaacctgcagctactggggaattcctcttcttgcaatgatgtacccaaggggacagaaggtagagaacgaacacgatgttgaaatggtaaagcatgctgcacgtgtaggctctgaacttggcgtagacattgtcaagaccaattacaccggtgacccagactcatttagggaagttgtggaaggagcattggttcctgtagtaattgctgggggtcctaagatagacactgatagggaacttttagaaatggtaagagattctcttgaagtgggaggagcaggtgtagcattcggaagaaaccttttccaagctcaagaacctggaaagatcactaaagcaatttctgaagtagttcacaatgatatggatgtagaagaagctttaaaaatcctcaaataa

SEQ ID NO: 997 - DNA, 1107 bp, Methanobrevibacter ruminantium
  source 1..1107: mol_type = genomic DNA
atgtccccgaaaacatcatgggacgataagaaagaattaatcacaactgcacttgaatcaggaatagaccatgttcttgaccttgaagacagtgaaaacattagaaaggtaggtaactttaacatcatttccacagaggaagacgctgatgtatatttagttggaatagacggtgaaggagacggcacccttgagcttaaagacaatctaaatgagtcatcagacttagcaaaagcaaaggaagctaaaaacagtggaaagacagtatgtgcctatataatcattacagacaagctccatgagcaattggctgtagtcttaggtaaggttgttgattatataatccttgttggaacagactggactgtaattcctcttgaaaatatcatagcagatcttcagaaggaagacgtcaagcttcttgctgctgttagcaatgcagatgacgctcaagttgcaatggaaacattggaagtgggcactgacggtgtcatatttgaagcacgtgactttgcacagataaaggacattgcaggtctgatagacgagctttcaactgaaagctatgaattaaaggacttgacaataaccaatgttgagcctgtaggctctggcgatagggtctgcatcgatacaacaaccatgatgagacctggagagggaatgcttatcggctcatattcaaaggctatgttcttcatccatagcgaaagccttgaaagcgaatatgtggcatcaaggcctttcagagtgaatgcaggtcctgtgcaagcttatgttatggttccaggtaacaagacacgttatctctctgagcttgtaactggcgatgaagtcttaatcgttgataaggatggaaagaccaagacatcaattgtcggcagatccaagatagaaaaaagacctttgctccttttggaagcggaatatgatggcatgaagataaagtcattagttcagaatgctgaaaccataagattagtcgatgagaatggagagcctatttctgtttctaatttggagaagggaatgaaagtcaaaggatttattgacgacagcgccagacattttggtatggcgattgatgagcagattattgagcaataa

SEQ ID NO: 998 - DNA, 1266 bp, Methanobrevibacter ruminantium
  source 1..1266: mol_type = genomic DNA
atgaatcctaaagaattatttgctgaatctaaaactattattccaggaggggttaactctccagtgcgtgcatttgaaccttatccattttttgtaaaagaagctaaaggctctcatatcatcgatacagaaggaaacgactatgtagaccactgtttggcatatgggcctattctattgggccatagcgacgatgatgtgatggcagacgtatataatcagatgaagatgggaaccgcttacggagctccaactgaaaatgaggtcaaattggctaaggaagttatcgacagggttccatgtgccgagatggttcgttttgtaaactcagggactgaagccacaatggcagccattcgccttgcaagaggatttacaggcagaaataagattgtcaagttcgaagggtcatatcatggtgctcatgactatgtccttgtaaagtctggttcaggcgctgcatgtcttcctgattcagcaggaattccagaggacaccactaaaaacaccctttcagttccattcaatgatgttgaggcattaacaaagcttattgatgaagaaggggaaaacatagcttgtattattgtagagcctgtaatgggaaatatcggctgtgtagagcctaatgttaaatatttaaagttcctaagggaaatcactgaagaaaacgacatccttttaatatttgatgaggtcatcacaggattcagggtctcccgcggaggggctcaagagtattatggagtaaagccagacctcgttacctttgctaaggttcttggcggaggattccctatcggcgcatatgcaggtaaaaaggaaatcatgagcttgattgcacctgcagggccagtctatcaggcaggaaccttcagtggaaaccctatatccattcaagcaggtctttccacccttaataaactggattatgagttctatggaaaccttgctcgaaagggagattatttaagaacaaacatatcagatattgttgaagacttgaatcttgaccttcaggtagtggggcttgcttcaatgttccagatctatttcaatccagagcctgtagtcaattatgagatagctaaaaagtcagatgcaaagagatttctggtttacttcagagaacttttaaagaatggcgtatttatcccacctagtcagtttgagtgcaatttcatatcaggtgctcacacagaggaggatttggataagactgctcaagggatagaaaatgcgttgaaggttgcttggcaactataa

SEQ ID NO: 999 - DNA, 714 bp, Methanobrevibacter ruminantium
  source 1..714: mol_type = genomic DNA
atgaatcgaagatcaaagttaataattgcgattttaatagttatcataataggtattgccgttattcttttcggcagtatgtttggtggtgaaaaattatcatcaggtgataaagacattttagtttgtgcaattgacgaaagtgagcctcgaccaggaatgggggcagttgatatggcctttttagtacatatgaatgatggaggaattactaattatactccgatttatccgcatggaatggtccatccgtctatagccgaaccggaagagtatcaggctatgggtgcaggggaaaaactgctcttgcacgattgcttctattgggaagacaaacagcagtgcatgcaatatgcaaaggagattcttgaatataatacaaattattcctgtgatgcagttattgcagttaacagtcaggccattgataacatcatctcagctgcaggtaccttaaagtataacggtgaggaagtcaatgcatccggtattgatttcatcagggaagagcagaataccatgggaatgaccagaggagactctgtaatggttattgtaaatgcattgatgcaagcggctaaagaccctgataaaagggataagatgattaatgctgctgtaagcgaatatacagccggaaatattgcaatgtatcctgaagggtcttttatggaattgctcgcttctaaaggcttgcaagccatgtttgggtaa

SEQ ID NO: 1000 - DNA, 639 bp, Methanobrevibacter ruminantium
  source 1..639: mol_type = genomic DNA
atgaaccaaaaggactattggaacagcatagcagataaaaaggaatttacaactccatttcatcctgaaatattggaaaattatctaaataaagatgattttattgtggatataggctgcggctatggcagaaccttaagggagctaaaggataacggatatagaaatcttagaggctatgacatttcagaaaagatgatagaaaggggaaagaatgaaaatcctgatttggatttgagaataaaagatcccgacacaatcgatcttgatgatgacagcgtagatggaatcattctatttgcagttctaactgcaattatagatgatgaagagcaaaaggctctcattgatgaaatatatagggtattgaagcctggaggcatattatatctgaatgatttcctattgaatgatgatgaaaggaatctgaagagatatgatgaatataaagatgaattgggagtttatggtgctttcaagcttccagaaggagctactttacgccatttcgatgaatcttatatctttaagctatttgactcatttgaaaaaagggaatatgagcgtcagatatatcctacaatgaatggacatacttccaatggcttttattatattggagaaaagaatataggttaa

SEQ ID NO: 1001 - DNA, 1239 bp, Methanobrevibacter ruminantium
  source 1..1239: mol_type = genomic DNA
atgttaatgaatgaacagacaaagctttctaaggatcattatatgatttttggcttaagttgggccggttgggtctttgatttctatgaccttgtcctatttacctttttgatttcacagcttcaatccagcttacatataaatgccgaaatgcttgcattatgcttaggattgtccctatttgctacaggattagggggaatcatttttggagcattaggtgataagtatggtcgtaagaaggtattggaatggacaattcttgtctattcgatagggacactgctatgtgcattctcatggtcattctattctctggttctattcagattcatcactggattgggagtcggaggagaatgggctacaggccaaatctatataagcgagacattccctgataatctaagggccaagtttggagctttcatgcaatcaggagctcctgttggagtcatattggcttcaatagtaggtggaatgataagccctattattggctggagaatgacatttttggtttccatcattccggcaatcaccattatccttattcgaagatatcttaaggaatccgatgtctggattaaaaataaggatgattttgtaaacaagaacatatttcaggagttcaagcaacttgtttcaaaggaatacagaaagatattccttatatccttggtattgtgcatattcggtatgtctgcatattggtttacctattcctggcttccaacctatctggcagaggagaggggccttgcaatggttacaacctcccttggaatcatactgattcagtgcggtgactttacaggatacacaacatttggttttgtagctgaaagaataggaaggcgtcctgcattcactatctacagtttcatcatgggaataagcattgcaatgataacaatatgctggaatcagatagataaggtcccagaccttataatggtattcatgttccttacaggattcggaacaggattctttggaggattcggttctctattctcagagctattccctacaaagataagaaatactggagttggaactgtgtttaaccttgcaaggggagttcaattcatcactcctatgataatcactttcgttggggcctactatgacttaagttatggaatcgcaatagcggcaatattcgcgttccttgttggaatttggatatgggtattccctgaaaccaagggaacagccatcaatgatttggattag

SEQ ID NO: 1002 - DNA, 543 bp, Methanobrevibacter ruminantium
  source 1..543: mol_type = genomic DNA
atgaaaattatagcattattggcaagtccacgtaaaggtggaaactgtgacgtccttatggatgaaatgattagaggagcagaggaaaacggtcatgaagtagttaaatacttccttgaaaaatgtgacatcgctccatgtaaggcatgcatgttctgtgctgaaaaccctgactgcgtacgtgaagacgacggaaatgaaataatcaacgcattggtagatgcagatggcgtaatctttgcaacccctatctactatggtcaaatgtccgctcaaggaaaactcattatcgatcgtttctatgcaatcggacaaaaccctgataagagtcttggaggcaaagcagcacttatcttcactgaaaaccaacctgaaggcacttacaaagactatattgaattaaccaaattctccccattcacctttatgggatatgatgtcatcggtcatgtagatgctggaagcgctggccctgcaggtatagtcgctgaagagcaaaaagacaaattagaagaagcttatgagttaggtaagctcttctag

SEQ ID NO: 1003 - DNA, 789 bp, Methanobrevibacter ruminantium
  source 1..789: mol_type = genomic DNA
atgattaatatagtagcaggcttaggtgaaaatgaaaacatcatattggcctcaaggcaactggaatcaatagatgacttaaatatccaacttgtagacaatgaggatgacttatttgatgcatttaaagattctaatgttggtgcggtggtaagaggctctctaaaggcttcaaaagtaatcaaattaataaagcaatataagtctgactgtgaagtaaacagagccacttatgtaaacacatccaatgaccctaactttaatgactcctatgagtttttgctttctcctgttggaatagatgaaggcaaaaacatagatgagaagatcactttagccatccagtctgccaattttattcaatctcttggaaagactccaaagatagctgttcttgctgaagggagaaaggatgactatggaagaagcgagagaatagataaaagcctgaaggagtctgaagagctcactcgacttttagaggaaagattcaattcccttgacaattttgacaacagcagcgaggatgtttctaaaaactaccagataaaaaactattatattctccttgagcaggcaatcaatgataagttcaacatactcctagcaggtgatgggatttttggaaatataatgttcagggctcttgttcttcttgataaatggcctagctatggcgctgtaacacttggaatagatgagatatttattgatacaagtcgtgatcagactgttgaaggctataaaaggagtttggagttggcatataatcttgctaaattaaaatag

SEQ ID NO: 1004 - DNA, 765 bp, Methanobrevibacter ruminantium
  source 1..765: mol_type = genomic DNA
gtgccaccacaatttttatataagatttatgaaaagcgcctaatgaatgagctggatccagatagaatgcctaggcatgtagctatcattatggatggaaacagaagatattccagaatgaaaggtgatatggaagttatcaaaggccatgaattaggagcagacactttagagaaggttttggactggagcatagatttgggaatagagatagtcactgcatatgccttttcaactgaaaactttaacaggccagagcatgaagtggaaggccttatgaggctttttgttgaaaacttcaaaaagatcgtagaccatgaaaagattcacaagcataaggtccgcgtcaaggttgtaggcagaattgagctattgccagatgatgttcgagaagcgattaaggaagctgaagattccactaagcagtataatgaaagactgttcaacttggcaatcggctatgacggccgtctggagatagttgatgcaatcaagaagatctataagaaagtggaggatggagagatttccattgacgatatagatgagaatcttgtcagcgaaaacctatacactgcaggtcttgaagaccctagccttatcataaggacaagcggagaggaaaggcttagcggtttcctcttatggcaatcatcttattcagagctttatttctgtgatagcctatggcctgagcttaggaaggtagattatcttagggccatcagggactatcaggaaagggataggaggtttggtgtatag

SEQ ID NO: 1005 - DNA, 762 bp, Methanobrevibacter ruminantium
  source 1..762: mol_type = genomic DNA
atgatagatacccattgtcatatagattttgaagaattcgacgaagatagggaagagctaatcaaaagggctcaagacaagcttaatgcagtaatcaactcaggatacagtgtggaaagcaacaataaggttctagaactttcaaaggaatataaggatttcatctatcctacatttggctttcatccggtttcctctcaaaattctcctgaagaggagataagtgcagcccataatcagatcgtcacccatctggatgatattcttgctgttggagaggttggaatggacttctattactgtacagacaaggcccttagggctcgccagcaagagatattcatgggatttgtagagattgcaaatgaatataatgttcctctattaatccatggacgggactgtgagagaaaaatcttcaatctcctaaatgactatgatgacattcctaaagtaatttttcactgttatggaggcagtctgaaggtagcaaagagaatattggataaggatgactattatatgagctgttcaaccatggtatgctatagcaagcatcatcaggagctttttaaaaacattcctctagagaggattcttacagagacagacagcccttaccttgcaatgacaaaggaggagagaaacgagcctgccaatgttgtctatgcagttgagaaattagcagaacttcatgaaactgatgtaagtgaggtagatgaacagactgaaaagaatgcaagatatgtgtttgatatataa

SEQ ID NO: 1006 - DNA, 681 bp, Methanobrevibacter ruminantium
  source 1..681: mol_type = genomic DNA
atgaaaccttatgtgattttaaatgcggctatgacattggatggaaagatagccacaaagacaggcagctctgagatttcaggcaaagaggaccttgagagagttcacgagataagaaagaaagttgatggaataatggtagggataggaactgtccttgcagatgacccaaggcttacagtccataagattaatgcaagaaaggaagataatccaatcaggatagttgtggacaataaggcaaggactccattgaacttcagaatcttgaatgatgatgcagagactatcattgcagtgtcttccatttgtgatgagagaaatgaaaattgtgatgaagaggctgtaaaaagagctaaagagcttgaaaaaagagtgaatgtattttattctacaggggaaactgttgatttggtagaatttatggaatatctctatgattatggaatcaagtcaataatgctggagggaggatccacccttaacttttcaatgattcgtgatggtttgatagatgaagttaagatatgcattgctcctatgattgttggaggaaaggattctaaaactttctttgatggagatggctttgattatatgaaagacgctgtacaattggaattgattaacagctttccattaggcaaggactttattatggagtataaggttttaaaataa

SEQ ID NO: 1007 - DNA, 147 bp, Methanobrevibacter ruminantium
  source 1..147: mol_type = genomic DNA
atgggaaatatggctgaagcaagaagaaagatgcatgaaagagatgagagaataaaaaaagaaaataagtctgatgtcaagaagattagaaatttcttcttcggatgttgtgataataaagaaaaaaagaaagtaaaagagcattaa

SEQ ID NO: 1008 - DNA, 645 bp, Methanobrevibacter ruminantium
  source 1..645: mol_type = genomic DNA
atgcacagtttattcagtgatggagagctattgccatctgaacttgctagaagagctttagtacttggacatgaagcaattgcaataacagatcatgttgactattcaaacattaacacaatccctgaaatcagcgctgcaattgatgacataaattcaaattgggatattaccgttgttttaggagctgaaataacccatgcacctaccgaatcaatccctgcacttgctgagaaggctcgtgagcttggtgcaaagatagttgtagtccacggtgagacattgaatgagcctgttgttgaagggaccaactttgcagcagtaaactgtaaggaaattgatattttaggccatccaggactcataacaaaagaagaagcagagttagccaagaaaaacgatgtggctttagagataagtgcaagaaaaggccactgccttggaaacggtcatgttgcaaacattgcaagggaagttggaaatgaccttgtcatagatacagacacacattctccagatgacattattacctttgagagatcaattgaaataggattaggagctggaatgaccaaagaggaaattctaaaagcaactattgacaatccaagaaaaatattaaagagaaatggcattgaaatttaa

SEQ ID NO: 1009 - DNA, 1059 bp, Methanobrevibacter ruminantium
  source 1..1059: mol_type = genomic DNA
atgatttccgtatttgttccgtcacatatcactggcttttttagtattcatgacaatccagatcctttattgaagggttccttaggtgcaggtgtcctattggataagggggtaattacagagattgattttaaagagaattttgatttaggcggtgtaaatgataatgatttgaatcttgactctttgaattcagatgagttattaattataatcaatggcaaaagggacgaatataatgaagtaatcattctaaaaaccatacatctaatgaaaaaagcattggataaagaagatatttccttgtccggtgtggtcataaaccaaataatccaggttcctataggatgcggatttggaacttcagcggcttcagcacttggtgtggcgatttcaatcaatgaactatttgatttggggctttctcttgaagagtgcggccaatttgcccatttggctgaagttgaacttggaactggccttggggatgtcattgcagagctgtcaaagggaattgtccttagaacaacgccaggggctccaggatatggggaggcaaaatccatagttcctcatgagaagactggctttggagtctttgaatcattaaatgctgatttttatataatcacaaagtctttaggtgaaatttcaacagcctctatcataagtgatcctaagcataagaagctcattactcaagtgggtgagaaaactgctgaagagtttaataaaaaggatgatggaattgtcataggttccaaatttaaaaataagttcaatgtagctgttgacagcgaattcaatgaagaagaaaccattaaaaagtttatgaaatcttctcttttctttgctcgaaagacaggtttaatcagtgatgagctattggaattggttcacaatctccatggaaaggtcataggaagttctatggcaatgttagggaatacattatttgcaattgctacagaagagcagaaattaaagcttgaagcggaatattatggggaatttgatttctataaattagaaaccgaaggaattcgtataatcaaataa

SEQ ID NO: 1010 - DNA, 534 bp, Methanobrevibacter ruminantium
  source 1..534: mol_type = genomic DNA
atgataagattaagttatgatatgcaggtctatagaaaagacttaagagaagtcctaaaaagaacagacaatgtagttgaattgggatgtcatgtaggcaagaccagtgagcttattttatacaaattaaccactggctctcttattggaatagacaatagtcctgaagctgttcagcctttggaaaggctttcattccatcatgaaaactttactcacattataggggatgttcgccgtcatgaggtcttaaaggaagttaccgaactcataggccaatgtgatgtattgtccattgatttaggtggaggatatcatccagacactgtctttaaagtctattatatttgggcgtctaccttaaagccaagggatgtcttgattagaaatcagggattgattgactttgtcaattcagcaataactacagaagatatgatttcagagcatggctggcttgaatcatgtggagatcaaggaattcctcctcaaattaaggagttcagcttatggacagataagttggatgactga

SEQ ID NO: 1011 - DNA, 717 bp, Methanobrevibacter ruminantium
  source 1..717: mol_type = genomic DNA
atgaaaagatcaaaaaaattaattatagcaattcttgttgtaatccttttgggattactattggcaattgcaggatacttcgttggtggtcctgacttgtcacaagaaaataaaaccattttagtcttagctgctgataaatacgagcaacctaatggtggttgtgatatggcatacctagttcgtttagaaaatggtagtttagctaattacactcctgtttatcctggtggaatgtatcacccttcacaatcagctcctggaaaccttcagggcaatatgctgcttcacgattgtctgtggaacggagttgaagacggtatgcaatatgctaaggagattgtggcattccataccggcgttgaagctgatgctgttgtagtcctttatgacgagggagtggacaatgtattggattccatcagacctattgagattgatggagagccaaccaacctaagcgcaactgacatcattcgtgaaaacgataattatgcaggttataagggtaacgaaggtgtaaccggaaccatgtctagggcagatgctgttatggtattggttaaagcggtttccaaacaagctaaagatcctgctaaaaagagcgccatgttgcatgcagctttagatgagtacactaaaggaaatattgtaatgactcctaaaggttctttcactcgtttgcttgctacaaaaggattggaaagctttgcatag

SEQ ID NO: 1012 - DNA, 1329 bp, Methanobrevibacter ruminantium
  source 1..1329: mol_type = genomic DNA
atgaaagaatacaagatagcaattataggaggagggccagcaggaatgatagctgcaataagagccgcagaaatattaggcccaaatgcagtatgcattctagagaagaatgaaagcttaggaaaaaagcttcttttaacaggaggaggccgttgcaacataacaaacaacactccaatccacgatcagcttaactattacaataaaaacaaaaacttcctaaagcactcattatacacacttccacaagacaagctacttgccatctttgaagagaaagaccttgaatttcaccaagaggacaataaaagggtcttcccagacagcgaagatgcccatgacatactggacattttagaggaatatcttgaagagttaggggtagatgtgtataacaatactccaataaatgctcaagacatagagcatgaattaaatgaaaggatggaaccggtatttgaaatagaaaatgaaaagatatcattaaatgcatcaaagattatagtatctacaggaggcatcacctatccaaatacaggttccgatggagatggatataaaatagcatctcacatgaatcatacaattacagacatcaagccgggacttgtctcattcaatattgatgactttctgcttaagaccttatccggactcactttagagaatgttgaagtctcatttaaggataagaagaaaaagatatctgtaaaaggggatatcttgattagccactttggccttacaggccctgcaattattgatttgtccaacagattgcttgaaaaatccgatttaactgtccttgacgacaagttaaacctaaagagcagagatgaaatagaggaattggaactctttacaaacaggattacaatcgactttactccagatctaacagaggaagatataaagaaccagataacaaaggacagcccgaagaatggaaagatggcaataaagaactatatgaagaaataccttccaaataactttattgattatttcctaatgaagatagacatcaatccgaagaagactatggcaaacattactaaaaaggataagaacaaattggctgaaaaccttaaaaggcatgtctttgagatagaatcccttgagatggacctggcaaaggttaccattggaggagtcaaatcaaaggagatagatgcaaagacacttgaatccaagtatgtggaaggattatactttgcaggagaagttcttgaagtagctggacctactggaggatataacctacagatagcattttcaactggatacttagcaggtcaagaggctgctaatagcttaaaaaacgaataa

SEQ ID NO: 1013 - DNA, 1323 bp, Methanobrevibacter ruminantium
  source 1..1323: mol_type = genomic DNA
gtggattacttattacgcgatttaagaagaactcattattccaaagacgtaaacccagacatcagcggtgaagaagttattataatgggttgggtacatgaaatcagagacttaggcggaatcatctttgtaatcatcagagacagagacggattggtacagattaccgcaccaagcaagaaagtagatgcagaaatccttgaagagctaagggcacttagaaaagagtctgtagttgcaatcaaaggaactgttcaagaggcaggaaaagcaccaaacggcgtggaaatcattccaatcaagacaactatcctaaaccctgcaaaacagccattgccaatggatccaaccgaaaaggtcaaggctgaaatcgataccagactaaactcaagattccttgacttaagaaaagcaaacgtaagctcaatcttcaagataaaggcaaacatgtttaaggcagttcgccaatacttcgacgaacagggcatgattgaaatcaacacccctaagcttgtagcttctgcaaccgaaggaggaacagagcttttcccaatcacatactttgaaaaggaagctttcttaggccaatcccctcaattatacaagcaaatgatgatgggagctggattcgacaaggtatttgaaatcggacaaatatttagggcagaagagcacgacacccttagacacttgaatgaagcagtctcaatcgactgtgaaatctcctttgcagatgatgtggatgtcatgaacgtattggacggcatgattaccagagttctccaatccactaaggaaaactgtgcaaaagagcttgaaaccttagaatacgacttaagcgctatccctgaaggaccattcccagaagtcaaatatgacgatgctgtagacatcatcaactctaaaggaatcgatatggaatggggagaagacttatccagagaagctgaaaaagctttaggagacactcaagaaggtttctacttcttaaccgattggccatcagcaatcaagccattctatgcaatgccttatgaagacagacctgaaatcagccatgctttcgacttgatgtataagaacctagagatctcctcaggttcaatcagggttcaccaatatgaccttttagtaaagcagatgattgaaagggacttaaacccagatggattcggaagctatctcaaggcatttgaatatggtatggcccctcacgcaggttggggtgtaggtgcagacagattggctatggttttaaccggtgttgaaaacattagagaaactgttctcttcccaagagacagacacagattaactccttag

SEQ ID NO: 1014 - DNA, 1281 bp, Methanobrevibacter ruminantium
  source 1..1281: mol_type = genomic DNA
atggaaattttaagatatgagagagaaactgcagatgagctaatcaaaaggtcacaggcagacatcaatgaaatattaaacatcgttcaagacatcctatccgacgtaaaggaaaacaaggatgaagcggttaaaagatacactgcaaagtttgacagatgcgaattagatgatttgcaagtttccgacgaagaaatcaagaatgcttatgataatctagatactgatcttatagatgcccttaaaagggcttcccaaaacattgaaaagttccataaggcccaaattccagaggaatggtctatggaagtggcaaaaggtatcacagcagggcagataatcagaccgatcaatagcgtcggctgctatattccaggaggaagagctgcctatccatcatccatattaatggaagtgattccggctaagattgcaggagtggaaagaatcatatgctgcacccctccaggagccgacggaagaatattggatgcaatacttgtagcggcagacttggcgggagcagatgaaatctacaagtgcggaggcgcacaggcaatcgctgcaatggcatttggaacagaatcaatccaaaaggttgaaaagattgtaggtccagggaatgtctttgttacaggagctaaaaagcttgtctatggtgatgtggacattgagtttccagcaggcccttcagaggtattgattcttgcagataagactgcaattccagaatatcttgcccatgacttcctatcacaggcagagcatgaccctgaagcatcatgctttttagtgactgatgatgaaaaaatagcagaagaatccaacgaccttatagaaagattcactaaggaagctgtaagaaaagagataattcaagagtccttggaaaagcacggacatataattctctgcaaagatatggaagaggccattgaatttacaaatacctatgctccagagcatttgatcatatcaactgaagatgacaatgcaatccttgataaaatcaaaaatgcaggatccatattcttaggaaaatactctccagtggcagcaggtgactatggctctggaacaaaccatgttcttcccacaagcggtggagctaagatgtattcaggcctttcaaccgaatcattcatcaaaaagcctaccgttcagaccataacaaaagagggtattgaagagctatccaagacagtcattccaattgcagaatatgaaggcttttatgctcatgcaaattcagtgaaagtaagattagataaaaacgaatag

SEQ ID NO: 1015 - DNA, 306 bp, Methanobrevibacter ruminantium
  source 1..306: mol_type = genomic DNA
atgtataaagatgaaatgattcaattacatcaatttttagtatatgttttaaaatatttagacacagataataatgctcatgaatatattgaggagtatcttgcgcttaacataagccctcatcatattcacagaacaaaagcggagcataaacaggcaatcttcgttctttcaaacactatttcagaagtgatcttgcataaggaagaaggttccataccaccaaatgtatcaaatgcattaagggatcttgttagaagatctaaaaaggaattaaaggctgctgaagcagctcaatcaaaataa

SEQ ID NO: 1016 - DNA, 1389 bp, Methanobrevibacter ruminantium
  source 1..1389: mol_type = genomic DNA
atgtctactcgtaaagttgtttgtttagtggatggagagcattaccttccggtgacccgttctgctgtaaattccattaatagcattgaccatattgaagttgtggctcttgtttttataggcggaactgaaaagcttaaattaggtgatgaggaagagtatagcgaacttttagacactcccgtttactttggaaaggataaaaaccagattccatataaattgattgaagatgtcatcaaaaagcataatgcaaatattgtgatggacttaagcgatgagcctgttcttgattatgacaagcgctttaagatagcttctgttgtactgtcctgtggagtaatttacaagggggctgattttgaatttgagcctttgactcaatatgaaataatgaaaaagccttccctaaagattttaggaactggaaagcgcataggaaagactgcagtttcaggctatgctgctcgattgattgacaagaataactataatccatgcattgttgctatgggtcgcggaggtcctgaagaacctgaagtagttcatggaaatgagattgaaattaatccggagtatttgcttgagcaatccaataagggaattcatgcagcaagcgatcactgggaagatgcccttatgagccgtgtattgacaatcggctccagacgctgtggaggcggaatggccggcgatgtctttgtcacaaatatggataaggcagctaaaaaggcaaataagcaggatgctaaatttgttatctttgaaggaagcggtgcagccattcctccgattaagacagacaaatccattgttctggtaggtgcaaaccagccaataggaaatattctcggatactttggtccttatcgcataatgttaggggatttggttatcctgacaatgtgtgaggaaccgatggcaagcaaggaaaagataaaggaaatcgaagacttcatccataagatcaaacctgatgttgatgtgatatctacagtctttaggcctaagccattgtcagatattaatggcaaaaaagttttatttgttaccacagctcctgaagcggttagggatgttttatcaagctatcttgaagagacttattcctgtgagatagttggattaagctctcatctttcaaacaggcctcttcttcaggaggatattgaaaaatacaaggatgatgtcgattgcatagtgactgagcttaaggcagctgcagttgatattgtcactaaggaggcaatagaatctggaatagagcttgtatactgtgataatattccggttcctataagcgatgactatcctgacctttcagagtctattctaaaggtggttgatggggcaattgaagagttctcctttaatatgcttttagattaa

SEQ ID NO: 1017 - DNA, 1062 bp, Methanobrevibacter ruminantium
  source 1..1062: mol_type = genomic DNA
atgatgtctcaagattcaaacaaaaatgatataaattcatacgattttccatcaagggtggaaaaggctttaaaattgattcatacagattctttcaaagcattggattattttaatgaaattctggatgattttttcaagttcacacctgatgaaatcaaggaaaataacttatcttcccttataataaattcattgaatggaaagggttccattttaaatgcatttgataaaatcgatgaggctgaagaatgttttgatatggttttaaatgattttgacagccaagatttcacttccctaattaataaggcattgattttaagaaaaaagggacatttggaagaatctttggattattacgatgagatagccaaatactatcctgataagaaagagcttattttagctatgaaaagtgaagtttatggtgaattgaaaattaagctctctgataccgatttggatgattatagcattgaagcaaaggacttaattgggaggggtcttgcatcccatgagaataagattgttttagaagccttggattattatcaaaaagcgattaaagcagattcaagctgtaaatatttggtcttaagccttatggatgatgttaaaagggaattttttaagctctttctctatgaggatatagacattgaaaaggacgagatttcaaagaaaaaaggagctgttttgcattaccttttcattcaaaacaatctattctatgcttatatgctaaatgaagagatccttgaagaaaataagaatgacttgtttgcattgaatgcaatgggaatgatattcttctatttggatgactgtgacttgtctattaggtatttcgacagatgtaacactattgatgagaaatatctttacccatatcttaataaggccattgcattggctagggctaaaagatttgatgaagctaaagagtcctttggaaaaattaagggattgcctaatctgattcgggatccaaatgaggaagagttggacatttttaaaagaacaatcatttcaaacagcatctattccttaggattttag

SEQ ID NO: 1018 - DNA, 441 bp, Methanobrevibacter ruminantium
  source 1..441: mol_type = genomic DNA
atgtcacatgttgaaaagtcattagaattatttgaagctaaatttaattgtgcccaatcagttttttgcagtttttcaaaagaatttggccttgatgagaaacaagcattaaaaatagccgcttgttttggtagcggtatgcgtaaaggcgaagtctgcggagcttgtagtggagcattgatggttttaggtttaaaatatggtcagagcgaacttggagatagagatagcaaactgaaatctgataagaagtgcactgactttttagaggaatttgaaagagcaaatggttcttatatttgcaatgaattattagggtgtgatataagaactgaaaaaggagttaattatgctaaagagaataatctttttatcgaattttgtccaaaattcgtagaatctgcaacattgatagttgaaaaaatattaaaagaagaatag

SEQ ID NO: 1019 - DNA, 1080 bp, Methanobrevibacter ruminantium
  source 1..1080: mol_type = genomic DNA
atgggtgatagtttgaaagttattatagatgcagctaatgtggctcattatcaaaaaggggaaaattcaaaggctaaattaaagaacattaccttggctgttaaggcattggaacaggggcatcatgattttttaattatagcagatgcatcattgcgtcataatattgatgataaggacacttttgtaaggcttgttgaagatggaatcatcgatgaggttcctatcggaaatgtggcagatcactatatccttgacttggcttatgatgaaaatgcaaagattctatccaacgataagtttagggacttcatgtctgaatttccagatatcaacagcatgaggattcctttttcaataaaggacaatgagttaatattaggtaagacaaagaaacctaagaaggttaaaaatctcttgcagaacatctgtgatgaaatcttaaatgagcttgagcgcaagcgttgggttgtttataagggaaaggagacaactaagttcacacctttgaatgttgcaaaacaagccattttgattttagaccaatctgaaagggatgatatgtcctctaaaatcgaaggaatattttcaaagcttcctatgtttgacaaggtcatggaaatggttgatgacgtagagacctctgtcccttatgttatttttgttcttgtccatcctaaggattataaggctgcagtaaaggatgcaggtaatatttcagtcactgtggcagataggttaagattggttcataagcctttgattgcagttagaaatgacctctttattaagccaggatatttcggattgaatattgtccttacagatgaggtggaagatattcctccattcaatattgagattcagacaaacacctatgatgaggtatttatcaagaagaattccagaaatatagcaagtacaattgctggcagattaggttcctggaagtttccatttgtttcagttaagcctaatatgattttggaaaaacctggtgagtttgaaatctatttagagaagaattctaaaaagaaaaagaaagataaatctaaagataaggataagaagaaaaaatag

SEQ ID NO: 1020 - DNA, 1203 bp, Methanobrevibacter ruminantium
  source 1..1203: mol_type = genomic DNA
atggctaataatagtgtattaagacgtattgtttctctaattaccaagcataacatacttagtataggaactaagtattttcctactacagagcttgaaacagagtatgtagatatgttcaattatactcaaacaatgcttatggaaatcgataaagcgaatattactacagaaagtatcttcactaatctagttagagatgttggccgtgaaaatattccagaaaatcatagcttttatgaattgcttcccgctcaaaacaagatagatgaatatgccttagtaagcaagatcatcatgggaagtgacagatacatgtatgttgagctttcagagccttcctatatcatagattacttcacagacattatcttaagggaaaatggggagattattgaaagaagcgaaacagagattgtttcaagattgatgtctaaaaacgatgcaataagaatagccatcaagcttgtagggattggattggataataacattcgtgtaagggcagcagcaggaatgactggcgctgcagccattgaaagatcaatcaagttcaataaggaagttggagatgttccaggtgtggcattcaccaaattaggaggggaatatgcccttgttttagacactccatttaaattgggacaatctgaacatgcagaatatcagcattatctattcattgacatagtggattccactaatttcatatcaaagcatggtaaaaacaagcttgtagagcttatgaccagcgtcaaggagtttatggaaaactgtgaaggtcatattgaaggctaccgtgaaggtggagatgaccttattgctcgtttcccaagtaagggagtggcaattcgtgcaggccttgactgtgcatggttcattctaaataatggcgcaaaggtcaagataggtattggaagaagcagaagagaggcaggagaacgtgcaaacattgcagagggtattaaaggatttggggcattgactctaatcgtatttgatttggcaaacggattgtatgcatattatgttccatcagacttttcaagaaccttgtgtgagcttttcactaccaagaaaggcaagttggtaactgcattcctgttggtatttattttatgctatttattggctgttttaggctttggcctttatggaattttggtatttattattgtagtggcttattatactttaaagtag

SEQ ID NO: 1021 - DNA, 306 bp, Methanobrevibacter ruminantium
  source 1..306: mol_type = genomic DNA
atggcaaatgaaggtggaggacatttaaagactattttgatgattataatcttaatagcttttatttgtggtcttgcattaggagtttcagttataatgggaggggatgataactctcaaactgaatctgaaggtgtgcactatgttaatgtgacaaaaaacattactgaatataatgaaagcgggaatcttattgaaaccgaagatggcacacatatagaattttcttcttacagcgacaatgtaactgaaggagaaaacgttacagcctataattcttcaacagatgcagggaatttgttttaa

SEQ ID NO: 1022 - DNA, 1194 bp, Methanobrevibacter ruminantium
  source 1..1194: mol_type = genomic DNA
atgtgcctggttaatggagttagggctgcaggtagccgccaaggcaaatacggcctagcagttatagaatctaaagacagcaatgcctctgccgtatttacatcaaataaggtagtggcagctccagttattcatacaaaggaaatgattaaaggcggtaaaatatctttagtcgttgcaaacagtggaaatgcaaactgctttactggtgaggatggaatagttgactgtgataagacaattgattttgcgtcaggtatcactggaatctcaagatctgagattgcaacagcatctaccggtgttattggtcgtaagatgcctatggatattatattgccattggtggaagagtccatttctaaattagagcattcaaatgaagcatctacagatgctgcaaaatcattaatgacaactgacacctatcataagcaatttgctgtagagacaagtattgatgggaaaaaggtcacaattggtggtgtaaccaaaggagtgggcatgattgcacctaatatgggaaccatgctttgtttcttggctactgacgcttcaatatctgctgaatatatcaataaggccttaaaaacagcagttaataaaagctttaacatgattgtagttgatggtgatgaaagtaccaacgacacagctatcctgatggcaaacggcaaatcaggtgttgaagttgtaaatgatggcgagattaaccctgatttccaggaagcattagacttcatctgcattagcttagctaaaatgatggctcgtgacggcgaaggagccaccaagtttatcgaatgtaaggtgaatggggctaaggatgaaaatgatgccattttagcttctaaatcagtcataagttcttctcttgttaagtcagctatttttggcggagaccctaattggggaaggatagttgcagcagtgggatattccggctgtgaaatggaccagaatatgataactgtgattataagtgatgacaatggaaaagaagccattttggtagataaaggtaaaatccttgcatttgaaggtacccctaaccttgacttggcagaaaaaatcatgcaggagaaaaatataaacatacttgttgatttatatcaaggggacgcatctgcaaccgcttggggctgtgatcttacctatgattatgttaaaataaatgcagagtacactacttaa

SEQ ID NO: 1023 - DNA, 642 bp, Methanobrevibacter ruminantium
  source 1..642: mol_type = genomic DNA
gtgaatgattacttaaacaattccgatactaatgacgctcttgtaaaattgcctgcaaagcaaataggaaagaatgagattggaactgtgtcaatagaaggtccttatggaaatacaagctctcctgttaaagtggcatatattctagggcagcatccaagggaattcagcgctcatgatgcaatttattacgctttacaaaacaactcaaatgaacttaattattcatattatgtttatagaatcaatgtaaccaatgaaacagccgactttgagcagagcaggatgaatggtcaattgttggctcaggagtttgtagtaaacgattcaattaacaagagctatgacctggttattgacattcactcttcaaatggaggatatatacaggacccttatatattcgctcctgtctctagcgatcttttagcatatgatgctgcaaataacattacaaaggcattgccttatgttacttattatgagcctgctagctatacaagtccacagtattctacaattcctcttgaagagggtggaattgcctctatcatatttgaaatgagaggaaatccggacaatagtttagagcatcaggctgatgactttgttaaggcagtggataaattggttttaaattag

SEQ ID NO: 1024 - DNA, 1185 bp, Methanobrevibacter ruminantium
  source 1..1185: mol_type = genomic DNA
atgattatcaatggaaaacgttccttagcacatgtagagaaagtagcttggattaagccaattgaaggagcagacaatattgggcttatcggagtccttggatggacatgcattgcaaagattggtgaatttaaggaaggtgaccattgcgtatacattgaaatcgattcaaaggtacctgaaaaggaatggtccgagttccttagagctaaaaaattcaaaatcaagacaatgagacttggaaagttcaaggttatctctcaaggtcttgcattacctcttgacaagtttgatgtggaaatccctaaaaaagtgggaacagatgtaacagagcttcttgagattacctactccaaccccaaggacatcaagcgtaaaagcgatggtccaaacaaatacgaagagatggctagacgcagaaaggcattattcagaaagccttgggccaaatggcttatgaaaagagaatggggtaagagactaatgtttttcatcttcggtaatgagaaggacggttccaaaagcttccctaagaagtttgaatacgttcacaaaaccgaccaagaacgttgcgaaaacatgcctgatgtcctaaaggacaagactccattcatccgtacacaaaaatgtgaaggatcatctggaacattcattcttgagcttacaaacagcagacttggaaaaagggaatacgagttttacgtatgctcacgtaacttaagagtctttgaggatgaaaacactgacttttgggatgttgcagttaaatacgacattgaaaacaagcttaaggattatcttgaaaagcataaggactgctcttatgtagcatggcaaggagaagtctgcggaccaagtattcaaaacaaccctcataagctaagcgaaaaccatttattctgtttccatatgattgacagcgaaaagggcatgtttgacatccgtgaagctaaagagctatgggacgaatacgaaatagaatcagttcctattgatgaggaagaatacatccttccagatgactttgaagaattcaagctaactgcagatgggttctacgaccctgaggtttgtgaaggacagaagaaatgcagaagagaaggattcgtttactacaagacaactgatcctaacttcagtttcaagaacgtgtctagaaagtacttattaaagattggtgaataa

SEQ ID NO: 1025 - DNA, 612 bp, Methanobrevibacter ruminantium
  source 1..612: mol_type = genomic DNA
atgggaaataaaactggacttttacctgctaatggacatcgcattcagggtaggtcaagcgagtcatttttagacgctcgtgaaattattatggaacttggacttgaaggaaatgaagtttttatggatgcaggatgtggagacggacatgctgcaatagaagctgtagatattttggatgatgatgcaacaatctatgcagttgacatttatgaaccgtctattgaagaccttcagaaatttgcagttgaaaagggttatgataatctaattcctatatgtgcagatattcctgattatattgatattgatgatgatactgtggatatgatattgcttattaatgtatggcatggattcaaggcaaccaggagaatggatgaggctattgaagagcttaagagaatcttaaagcctggaggcaagattgcaatcatggactataagaagcaggaagctaaacatggtcctcctataactgtaagaagcagtccagaagatcttgaagaggtctttaaagaacatggcatgtgtttgttctctttaaatccagatactggagaggacattcctcaaggcaagtcacattatttgattatatttcaaaaatag

SEQ ID NO: 1026 - DNA, 390 bp, Methanobrevibacter ruminantium
  source 1..390: mol_type = genomic DNA
atggataataaaatcaaagcaggcattgcacttgcaataatcgttttagtggctgtcattggcttttcattcattaatgaaagcaataatgttgtaaatcaactgtctccgcttactgaaagttttgactattccatggaacctatgacaacttgggatgattctaaaaaggaatattcctttaatcagaacatcagcagtgcaaacggtaaagactataaggacatcaccatcgatatattgatgtataacgatggaaaatccttagataagcataccagcactataaatagcactaaagacggttcattcaatttaaaattcactcaaaggctcgaaggagaacctgatgaattttattataatgtgacaaaggctactgaaatataa

SEQ ID NO: 1027 - DNA, 1029 bp, Methanobrevibacter ruminantium
  source 1..1029: mol_type = genomic DNA
atgtttaaagtaagcaaaagcatattaatcgtttgtttagtatcccttttcctattagtttcacaagctagcgctgcagactctaatggcttaagcataagagatattaattcagttgatgaaaactacaatcttgatgccagttatcttgactccctccaagattcaaatggcatgcattcagattcctctctaaactctaatggcttagatgataagtcaaactatgacaagacttcaataagtcagaatcaaacctcctctaacttaaaagacaatgatttagataataatgatggagaaagcgagattattgaagaggaagctaaagacaccgaaggtgtagtgatggctggagacagctacagctgcggacccgcatcccttgcaactgcattaaacaggcttggcttaaaccttagcctatctgaagtatcccagcataccaacaccagcaaggatggaaccaatatgcaatccttaatcgatgctgcaggatactacaatttctctgcagttggagttgaaatccaatctaaagacttagctgaaaactccatagtccatttggatattgatggagcagaacactggactgtagtaagcaaagtaactgaagaaagtgtctttttagctgactcaacaaggggaaacatcaatatgagcattgatgaattcaactccctctttagcggaaaggcaatcctattatctgaattgaacaaaaccaatgtttcaaatgtgatatccaacaaaaacattaaggttttagatcaatcccaatgcttaaacgttaaaggaaaaggatgggttagagtgcttgtaggttataagaccgaatggagatacggcttaatcaacacctattcatgggtgctaagaccaaaagtcatcaatggacatgtatcctattctgcatgggaatatgtaaaggtaaaacatcttagttggggaaaatataaggtcaaagtacctatctacaaatacaagtacatcaaaaaccaatatgaggtaaaaggaaagaaataa

SEQ ID NO: 1028 - DNA, 879 bp, Methanobrevibacter ruminantium
  source 1..879: mol_type = genomic DNA
atggaaagcattaatcttttggtagaagcgctaccttacattaagaaattttacaataaaaaagttatgattaagtatggaggccatgcaatggtagatgctgatgcaatggcttctacagctcgtgatactgtgctcttaaaatatgtaggcatgcagcctattgttgttcatggaggcggtcctgaaattacccgttccatggaaaaattaggaaaagagcctaaattcatcaaaggccttcgtgtaactgatgaagagacaatagacattgtaaagatggttcttgtaggtagcatcaatacagatatcgtatctcagatatgtcatcatgacggaaaaggagcaggattgtccggtaaagacaataagcttattcaggcctctaagaccatgcatgagattaaggatgacgataccggtgaaatcgagcagattgatttgggattagtcggtaaggtggataagattaaccctgaaatccttgagatgtatactgaaaatgattatattcctgttattgtccctattggaattgcagaaaattctaaaactttgaatctcaatgcagatactgttgcaggtgcaattgctagtgaagttgatgcagaaaaacttataattttaacagatgttccaggtgtcttaagggaccctaatgacccatcaactctcattcaaaagatccatattgatgaggttcctcagcttattgaagagggaataatcagtggtggaatgattcctaagattgagacttgtgttgaagccttgaataatggtgtaaaatcagcgcatattttggatggaagaattaagcacactttacttattgaaatctttacaaaggatggaattggaactatgatttataagtag

SEQ ID NO: 1029 - DNA, 735 bp, Methanobrevibacter ruminantium
  source 1..735: mol_type = genomic DNA
atgagaaaagtatttgaaagcatcatagaagctttaaagtatccattcagagattggaaaaatattattgtaattggctttcttctattaattgcttctttaggaaggaaattgccttttccagaggacccacagcagacagttgtttttataggtgcactcttaatactttttttgcaaacaggatacggttcaaaaatcgtttatagcggattgaagggagagaatattcctccaaaactaaggcccataccaaaactgatatgggaaggttttaaaaaaatcattatcatcatcatttatgtccatataatggtcatattcattagtgttggaaaaacccaattaagcgcaaataatattccaatagccataatactatttgttttagggggaggaacttatctcttgatggttggaggtctcttgaacaggtatttccaccatggaaagtttattaaggcattctatttaaaggaaatcattgcaatcattaagaagattggattttgggacatgatatccatcgtcatatgtgccatgatatctcaaacattaacaatttccacattcatcaatttagttaagggcatgttcacttcaatagagctggttttatgtataattgcattcttcttggcaccaatagccctaatgtccaccaaaagattgatctcattaaatttaagaagaatcttatcttcagatgaagatttggaaaaatttgcattctaa

SEQ ID NO: 1030 - DNA, 744 bp, Methanobrevibacter ruminantium
  source 1..744: mol_type = genomic DNA
atgggaaaactagatggtaaagtagcaatcattaccggagcaacctccggtatgggtagagaatctgcaaaactattcgctaaggaaggagctaaagtagttgtctgcggaagaaacgaagaaagagcagcagctgttgtagatgacatcaaggcagctggcggagaagcaatatatgtaatcgtcgacatggcaaaccttgacgaggtaccaaaaatctatgaggcaaccatggatgaatacggcaccattgacattctattcaacaatgcaggtgtattaagcatgtccccattgatggaccttacccttgaggaatggaacaaggtattcaatgttaacgtaacctctgcattggtcctcactcaactttgcgtacctgtaatgaaggaaaaaggaaaaggaacaattgtaaacacctgttcagtagcatcctttggagctcaccatggattcgcagcatacgtagacagcaaacacgccatgatgggacttaccagatcaatggcatgggaattaggtcctgaaatcagatgtaacggtattgcaccaggtcttatccacactgcaatggtagacagcattggaggccctggagcattgcaaaacatgattgaccaatgcccagtcaaaagatgcggtgaaggtcaagacattgcagagcttgcattattccttgcaagtgacgaatgtactttcctagatggtcaaattattaaatgtgacggtggattcgagatataa

SEQ ID NO: 1031 - DNA, 1485 bp, Methanobrevibacter ruminantium
  source 1..1485: mol_type = genomic DNA
atgttaaatataaccacatttttagatgctaatgcatgcagactagagaaggaagtcttttattatccaaatagagagctaagatacaattcaaaagaacttttaacaatagtatcaggaataggacaatcattaaaggataaaaatatagaaaaaggagacagagtgctcatctatttaaacaactctccagaatacttattctcacttcttgcaatatggagaataggtgcaattgcaatccctaccaacagaatacttacctctgccgaattagactatatgattagtgattccgatgcaaagctgattataacagatgatgaagcaagagaaaccataaaagacctaaaaatcaactcatacatcatagaggactgtgagagctttaaagatagcgaggtcttacctgcagaggaaacagaatgggacgacctatgccaactccaatatacctccggaacaacaggcaagcctaaaggctcaatgctaacccatggaaactggtttacagcaatccacaatgcctgtgacgtattgacatataaggaagatgacacattcctatgcatctatcctatggctcatgtaggtattctttgggcaatagctgcactgagagccggagcattatgcataacaatggacttctttgagataaacgaatacttaagattatgtgaagaggagaaggtaagcgttctctctggaatgcctcctgtaattcacaccttgacaaaccttgaagaggaaaaaagagaaaacctatccacagtcagagagataataagcggaggaggcccacttcatagaaagatctggaaaaagttcatgggacaatataatatcccaatcataaatgcttatgggctttccgaatcaatagtcataggaacaggcactgtaataagacctgaggactatgctacagcagacagatacgaaagcgtaggacatcctgtttgcttttcagagctaaagatagtggatgaggatgatccaaacaaaacattagataaatatgagcatggagagatagcgcttagaggacctgcaatagccaagggctattggggaatggaaaaggaaacaaaggaatcattccttgaagacggatggttcctcacaggggatataggttatatcgatgaggacaatcgtcttttcattacagacagaaagaaagacatgattgtaatgagcggatggaaaatctatcctacagaagttgaggaaacccttataaaatatcctaaggtagatgagattgccatattcagcataaatgatattcataggggagagcttccagtggctgcagttgtatggaaagaagatgaagatccagagggactgcttgaatattcaagggaatatcttgcaagatataaggttccaagaaagatattcactatggatgagcttccaagagtaaatggttggaagcttttaagaagggaacttagagagatgttttcacaataa

SEQ ID NO: 1032 - DNA, 999 bp, Methanobrevibacter ruminantium
  source 1..999: mol_type = genomic DNA
atgataaaaattgcaagaattgatggagacggcataggcaaggaagtgacagaggcaggagtggctgttctcgaatcattagacctaaacatcgacttcgtagaagctgaagcaggtcgagaatgttttgataagaacggaacaaccatacctgaggagaccataaggattgcaagaaatgcaaaggcaaccctatttggagcaatcacttcaacacctggagagaaaagcccgattatcaccttaaggcaggaattggatacatatgccaacttaagaccaataaaatcattcaagggagtggactgcctctttgatgatttggactttctcattgttagggaaaatactgaaggattatactctggaaaggaaagattggaagaggataaggcaatagcccatagggtgattacaagaaaggcgagcgaaagaatctcaaggcttgcatttcaagaggcaatcaaactgaataaggaatcagtaacttgcgtgcataagtcaaatgtgctaaagaaaacagacggcgtatttaaagactcattctacaatgtggcaaaggactatccacaaataaaaacaatcgactattacgtggatgcaactgcaatgtatcttttaacaaagccacaggagtttgatgtgattgtaacaagcaatctctttggagacatcctatctgacgcttcagcaggtcttgtaggaggattgggacttgccccatcaggaaacattggagacaagcatgggctctttgagccggtgcacggatctgctccagacattgcaggaaataatatatcaaaccctattgctatgattctgtcagtttcaatgatgcttgaatacctgaatgaggattatttggcaagtaaagtaaaaacagcctgtgaaaatgtcctagaaaagggaaaagtcttgacaccagacctaggtggaaatgctaagacaatggatgtggcaaatgaagtcataaaagaaatagagaaattagactaa

SEQ ID NO: 1033 - DNA, 468 bp, Methanobrevibacter ruminantium
  source 1..468: mol_type = genomic DNA
atggaaaaatctattgatgaattgattttggatttaaaggatgaggatgactttgttcgtgaagaggcaattggctcacttgaacttaaaggggaagaggcagtatgccctctcattgaagctttaggccaaagaaataaggatattaaaataggtgccgctcaggtattggcagctatcggggataaaagagccattccagcacttgtggccactttgggtgacagaaacaagttggtaagaagagaagcatctactgcacttaccaccatgggtgatgaagctatcgaacctgtaattgcagagcttgacaatcctaaatggagagtaagaggtgctgcatgctgggtccttggtgcattggatgctaaggaagctcttccaaagcttgaagagctattgaatgatgaaagctcttttgtgcaatacggtgcaaaggatgctattaatagaataaataatggataa

SEQ ID NO: 1034 - DNA, 363 bp, Methanobrevibacter ruminantium
  source 1..363: mol_type = genomic DNA
ttgggcctttatgagcacgacttgaatgatctcttaaaaagccttgaggataagggtcttgtccattatgaaggttcctatgttcagttaagggattttgaaggggtaataaatactgtggattcaaaagaggatgttcttacagctgaactgaatcagaaggagaaaaagtcctttgaaataatcaagtccttggcagatgagaacaatttggtttcaaggtatgagatagagggcaatctattgtatggtgatttgaagcttacagactttaggatgtatcatattattctgtctttggaaaataagggacttattgaagctgtctataagcataatggggactattataagattttatag

SEQ ID NO: 1035 - DNA, 792 bp, Methanobrevibacter ruminantium
  source 1..792: mol_type = genomic DNA
atggataaggcaaaagttaataacataattttaaactataatcttgaaggagaaggccgaacaatagtgttcatccatggactctcagacagcctgaactattggaggcccctccaggagagcctaaagggagattaccaaacattgtcatttgacttgagggctcacggagagtctggtgatgataggaaagagataaccatcgacttataccaaaaggacctttattatttattgaattatttgaatatagaaaaagcagtactgattggcctatcattaggaggaaatgtggcattggactttgcaataaatcatccgaagatggttgatggacttataataatgtcaagcttctctgagttttcagaccatttgaatgagatatttgacagctttgaagaagcaatagagcagggatttgaagagttctttgatgtaattctaccttacacgctacctgaagatgtcctaaaaaagcatgaggtagaattggaatacgttaaaaaggaaggagcaaagactgcaaacattgaaggaataaaagcaggaatcaaggcaggatatagcttttccataactgacaaactaaatacaatagatgctccgacaattgtgattgcaggtgctgatgatgagctgacagatctggagcttcaaaggaaaatatatgataatattgataattctgaaatgataattcttgaagacaccaagcataatgtccttattgggaaaaatataagcagaatcttggatataattaatgaatttatgttaaaaatagaataa

SEQ ID NO: 1036 - DNA, 495 bp, Methanobrevibacter ruminantium
  source 1..495: mol_type = genomic DNA
atgagaattagtatgtctttaccaaaaaagctattggctgagtttgatgaagttttaaaggatagaggttatcaatcccgttcaaaaggtattcgtgacgctttaagcgattatattttaaggtatccatggatgaatgaaatggaaggtaacagggtaggagttattactgttatctatgatcatcattttacaggagtcatggaaaaccttgcagacattcaacatgactgcatggaagagatcaatgcaagcatgcatattcacatgacccataagtactgtatggaagtaattgtcgtaaacggtaatgtgactcatatcagagaattggcagagagaatgatgaggcttaaaggggtagagcatgtaaagcttacaagtactgcaaatggtgagtctctagaccgtgagccaggtcttgaacactctcactcacattcacattctcatttaattttttttttaaagaatttcttttttttattttcttaa

SEQ ID NO: 1037 - DNA, 936 bp, Methanobrevibacter ruminantium
  source 1..936: mol_type = genomic DNA
ttgattcttatcactttaagctttttaagagattatgagcgtcttgccgtatttaaggaagcaattgatgaatttgctatttctaatttagataaggatttggattgttcaaattcaaatggcgatataaattcagatgacgataaaaagttagattgctctcttgcatacgatttaggatgtggaagcggagttttaagctatttagcatctgattattttgataagataatatcaattgagcaaaacaggtccattttcaaatgtgcaaataaaaatttaaagtcatttgacaatattgaggctataaatcaaaatgttttggattttgactttgaaaactatcccaaggcagacttaatcatctgtgagatgctggacactgccctaatcgatgaagaggaagttcctatcctaaaccattcaaagaaatatctaaaggaaaatggaaaaataattcctcaagggataataaactcagcagaacctgttttcatgaatattgattatctccagtatgaggatgatgaatatcagccaatctatgagattttaggaaaatcagttatttatagtgagtttgaattcctggatgacattgatgaggacttctcttgtataatcgaatttgaaatagatgataaatattcagataaaaaaacagatgcatcatttgaagtagatgatagatgttcagataaaaccgattattttaataagagtaatgataaaataaaagtaaatggaattaaactgacaagctttaccaaactgaatgaaaatatcatctgtggacctactcctatgttaaatccagctatgcttgttccatttgaagagatagaggtaaataatggggataaaattagaataaggctatcctatgtgatgggtggcggagtagagaccataaaaacagaagttttagatgtttaa

SEQ ID NO: 1038 - DNA, 525 bp, Methanobrevibacter ruminantium
  source 1..525: mol_type = genomic DNA
atgttaaatcttgatgaaatcagtgagaatattgatttgtttttagaggactgcagctctcttattgtattggggataggcaatgacataaggggagatgacggtttaggcccttatataatcaaccaactgactgatttgaaagagaatctatctttaaaggaaccacaatccttagaaaatgtccatttgcttaatggaggctctgttcctgaaaactttacagggcttatcaaaaggattgatccatctcatatcataataattgatgccactttaatgaatgaagagccaggatttattaaaattgttaataaagaagacatttccaatgtaagcatatcaacccattccatgtccctttcctatcttgtaaagtaccttgaaattgaaatcgactttaagctaatttttataggaattcagcctaaggatatggatttgacctttgaattgactgatacaattaagaattcttcagatacccttgttgatttgctattttccaagtttttaaagatttaa

SEQ ID NO: 1039 - DNA, 1140 bp, Methanobrevibacter ruminantium
  source 1..1140: mol_type = genomic DNA
atgaaagttttatttatcggatcaagattatatgatgacttggcttatcatgtggatgagctgggcatagaaagcataataacagaatcaaatgaagaggctcctcatttggaccttgcaagcaaatactatatagtcccaagaggaatggataagccaatggaagtggctattgaagagaaggtcgatgcaataatacctcttattggcatagaccctccattaaaggacttggctattatgaaggaaaaaatagaaaaggaaaataatattccagtgatttcatctaatttcaatgctgtggacatcgcttccgataagataaagaccaaggagttctttaagtcaatcggattgaatgtgccagaggcaaaggttctaaataaggatgacttctccaatgagggggagttcttggaaaaattaggattccaattcccaatagtcctaaagcagggagaaggacaaggcggaaaggacatttgcataacaagccagtttgaagatgttttacaatactttgaaagcttcaatcaggctttggtggaaaacttcattgaaggggctgaggtctccattgaagtaatcggatggaatggtgaatatttgcctttggttccggtatataagggagatactagtttagaaggcatacatccgataaagaggttaagatatggtccttgtgactttgaggcaattgacaatgaagagttcaggcaattggctaaaaagatagcagtcaatttaggctctgaaggaacaatcgatatggatttaatctattcaagggaagagaacaaggtctatgcaattgaaataaacacacgtccaagcggcacaaggtatttatcctatgcaactactggacttagcccattaggtcttcttgttgacattgcagctggaaactttgatgttaaagatttggaaaataaaataaagcattattattcattggaaatacctataggtgattatgaaggtcctgcacctaatgaacctgttaaggagtatgtaaatggcaatttcattgttcacggcccaaaagggtatcaaagaattactataagaggaaatactcgtgaagaaacctatgaaattgctaaagagttaactggcaatgattacaggtcttaa

SEQ ID NO: 1040 - DNA, 1074 bp, Methanobrevibacter ruminantium
  source 1..1074: mol_type = genomic DNA
atggatttgaattatataattgtattgtttgttctaacatttcttgctaccgtagccttcacttactttgtaagacatactctacgtgatgcagatgtttcagatagccctattgtcagtgaacatagacataaagcaggaactcccaccatgggaggaatagctttcctatttgccattctattcatagtgtctatctattacagaaatacaaatattctcatagcctcatttatcatgctcacaggaggtgtaatgggtcttcttgatgatctattaggtcttaagataaaggaatatcaaaaggtcgtaaagaatgtaagcgattcagttgttcctataggattattggaccttggccctggagaagaggcaagggtaaccaccgacaaggctaaaaaacaggtatatggatatgttgatgaaggaaaattggaaattgttgctgaaattccaatcaagtatgagccaagcgaaaagaccaagatcatcgttcagctattgcctggactgtttttggcattgactggggttgtaacaacccttgggggattcactttaggcattttggcttatcctatttgcataatcgctattcttggttcaatcaattcaataaatctcattgatggaatggatggattggctgccggcatcgttgcaattgcatcattctcatgctgcatttatgcttatatctgtggaaatatggatatgattcctgcatttgcaattttaactggaatatgtcttggatttttggtcttcaacagataccctgcaagcatattcatgggagacacaggctcctttgtattaggtacaggatatgcagttgctgtcatcttaggggacattccttactttggagtattggctttggctgttccgattgtatcagtaataataagcctgatgcatagggcacatataataaatctccctgtagagcctttgcatcacaccttgaactataagggaatctctgaagtcaagatagtcttaagctattggctattgaccgtccttgtctgtgcaatcggcatacttgcaaagctttatatctttgcataa

SEQ ID NO: 1041 - DNA, 1620 bp, Methanobrevibacter ruminantium
  source 1..1620: mol_type = genomic DNA
atgtcaaaaacatactttttaaatgaattagcagattcaatatcctctcaaaagaccttttcaatcgctcaacttgcagatgccattggaggcaagatttatggagcagatgactacaagtctccaaatggatttacaggcatctttgaaaccttaaacgaagctgtagaaggagatattgtaattaggcattggataaacggaaaaggtgttgaaatagctaatgataaaaacgttgcatgcattataaccctaactccaaaggaagatgccttggaaatggcttcaaagctcgcctttccagttattgtagtggataggattgaatttgcaaatgcatttgcattgaaatggacaattgataacctttcccctaatactcaaagggtagttataagtgggacaaatggaaaatcaaccagttcccatttgatttatcacattttaaaccattgcggatataatgtatttacaaatactgatgcaaaatcagaattcaatacactaatcgacccaatggttgcaaagctaatctcagagcaggtgatatcaaagcaggactttgatgttcgcaagttggactctgtagcagacctaaagaacctggatagcgaaggaaagccaataaataaaggcgcctttgactatattgttgttgaagtctcagaggttcagggctggggaagcgaccttatgaaagatcatgcccaaataatgtcttcagcaatcaatccggatgtaggggttgtcacaaatgttgcaatggaccatatcggccttgtaaacaatatagaagaggtgttccatgaaacttcagggcttgtaaaggctataaacaaaggaggagtggtcttaaactacgacgatgagaatgtcctggcaatgaaggatcttgcaaatgatggagtagacatattcttcacttcaatggaaaaggattcaatcctaaataatgattatgacaatgataagaaggtttattttgatagaaaaagcaatgcaatagtttatgataataaaaatatccttagatatgatgagttgccctttacaggagagcattttatcagaaatattctatctgcaatttcagcttgtatatctcttgagattccaattgaagacatctgcgaaggggtaaaaacatataatcctttaagcagaaggtttacacgtctttatgatgagccaattgttattgatgactttgcacataaccccgacggaataaaaaataccgtaagggcagcatatgacttggcagagcaatttgacaagggagatttatacattgcatgtgcaatcagaggctctaggggtgaaaccttaaatggccttaattcagaggcattggctttagtcattaaggaattgcgccatagaaatgatgatgatatagaaaaagacgaaaatgtcaagaaaagggaaatatacctaatcctttcttcaagctgtgacttggtagaccatctaaactatgttgaagactttgagaggggatatatttccttctctaatttggataaggagcacataaaatacattcatttcaataagctctacggcgctttaggatatattatgaaaaaatgcatatggaagatgatgttgtattgctga

SEQ ID NO: 1042 - DNA, 1854 bp, Methanobrevibacter ruminantium
  source 1..1854: mol_type = genomic DNA
atgggtgagtttgtatttagttttttagaagatcaatttagagacatctatcttgactgtgcaaggatggataagaatctcattgaaggagatggtgttgaatcaattcttattgcaggaagaatcgctgaaaagataacaaaagccatctttgtctttgaaggcataaaagataatgaagataatcaatatttgaggatagaaaagctttccaatgcaaatattcttccaaacaacattaaaaatgacctctcccaaattagaatactaagaaacaatgtctaccacaataccttaaacagtgacggaagcggcggatttgcttcatacaatgctccaaaatatgttcaaagcggaggattgagagactataagacaggctttaatgaaatcaaggaatattctaaaatatctaaacaaaattctaactctaattctaactctagttcaaattcaagccctaataacgagttcggcagtgaattgactgcagctcgtgaagcccataagcttgtatttaatgtctgtgtctggttttatgtaaactactctggcgataaggacttcatcagaccaaaatataagctaagcagaagaacccaagatgctgacttcctaatcagactaaagtcagcaataaacgatggaaacgactttattaaattgcgccaaaacaatccaaacaatgagatcattcagatactcaatgagatttacgtcaaaaaggctcctcaagagccaaaagaggagcaggtctatggcataaacaataaggatattaaaatcagacagcctgatgttccttattcaaagtgtttaggcatctcttatgatgatgaactattcatgtggcatgcagagcatgggggaaaggacttaggtcttttcgagtcttccaaggaagcttatgaggcaagggagatttatataaattccatcccaatgccaagaaaggtaaatggagcatattcaaaggcaagaggcatttcattcagcagaattcaaaagctatggtctgcaagcgtaaagggacagattatatcatatcatggaagcgaagctgaagcaatcatggctcgaaagaaatacttaaagtctcataacctagttgacattaaggtaaaagacggatataagacaatcacccttgaagagaaggctaaattggaagagaagattagacaaaagaaggaaagttcaaaatctgatattaagacaatcccttcaaattcaaatacaaaggacgagatggaaaaggagaatattcaaaagataatggatggcgtaaagaagcttaaggatgatttgaatgaatctagtgcttctacttatattaaatccagttcattaagctcacagtccagttcttctgattctgtttcaagttattccggttctaaatccagttctttaggttccacttcttctagttctaagtctggttctttaaactctaaatccacttcaaatgaaaattcctctttttatgacattcataacataggttcaggagataaaactaaaaagaaagttaaaattgtaaatggctcaaaagtccaagcaagtcaaacaactaaaaaagtaaaggtttcagctggaaatagagtttctaaaaaacataaatccagttctaagaattcaactgtttctaataatgcaaatagttctaaaaagtctaaatctgttgccattaataagaaaaaatcctctaaatatgaaggtgtgttctatgaggatggattgttcatgtggagtgcagaggtggacggcaagcatttaggtctattctcctctgaaaaggaagcttatgaaaaaagggaagagtatattaagaataagtcaaataataactaa

SEQ ID NO: 1043 - DNA, 594 bp, Methanobrevibacter ruminantium
  source 1..594: mol_type = genomic DNA
atgtctaaatttaaatactgtccaatgtgcgcagagccaagagcagataattcaaagtactgctccaaatgcaattttgaatttttaactggaaaatatgtaaaagtccaagaggaagagataaaaatcactgaaaaggtctcccaagaggagtttgtagaatctaatcagctaatacaagatacaagtcttaaaatcaatgtattgataagcaggtatttgaattattcactaagcaataagtttaatgaaaacttaccattaagtataataagggaatacatatccagctgtttaaacagtaaagtcccatctgactttgatgacaattatctccaatccttagatgctcttttaaatgatgagggctataaaaattctattaatctttttcttcaatggatcgatgagaacagatcccatctgccagggcttgtattgaatcaatacatgattccacatcagaacaatgtcaataggattgaagagatccttgatttggagttagagaaaaatgaggataatgatttgttctttgatttattgaataagtttttaatcagtgaaaaagagtttatagaacgtttaatttag

SEQ ID NO: 1044 - DNA, 189 bp, Methanobrevibacter ruminantium
  source 1..189: mol_type = genomic DNA
atgcctgttgtaagaatttccggaaatccaaatataagtgtagagacaaaaagagaaatggtaaagaaagttagtgaaattgtagcagaatcctacaatttacctattgaaacaattactgtgcttatagaagcctttgaaagagaggacataggtgcaggtggaaaattattgatagatagagattaa

SEQ ID NO: 1045 - DNA, 837 bp, Methanobrevibacter ruminantium
  source 1..837: mol_type = genomic DNA
gtgattgaaatttcagacaaattttatgataagacattcaagttattcagatacaaaaattttgagaacttatgctcaaattgcggtatcttcattgaatttgacggtttcaatgacaaggaattagtggatgatggcggcataacttatattatggatatttcaattaatgataaaaggggatattcagtaattattgaatttcaaagttctgttgtagatgaagcggatattgaacgctttatgaaatatgccactttaacttatattcaatacaaaaaaccagttgaaatttatgttctcagtaccgttgaagaaaagaatagagttattcgccgaagatggaatttcttcaatgagtttactatatgtgtcaaatcgttaaagtctattgatggagataaagttttaaatagtttaaaaaagaaaagcagatttgatgaggattttactggagatgacattgtagatttgctgaccattatttttatgaaatccgtaaaaacgacggttgagctattgaaggaaatctgtctattggttaatgaaattaacgcattggatgaaaaggaattgtatgatatcaagacctttttattgatgtatgttaaaaaattcgtggaagataagcaagaggcaagaattttggaagagttgataggaatgagaaatgatttgtttggtaggacttgggcttccgttagaaatagggcatttttagaaggggaagctagagtggttaggtgtatgtttaatgaaggtattaaaattgaagagatttctaaaattgttggcttggaggagtcccagattttgaaaatgattgggtcaagttag

SEQ ID NO: 1046 - DNA, 1131 bp, Methanobrevibacter ruminantium
  source 1..1131: mol_type = genomic DNA
atgtggtatgatatgaaaagaagaaggttttatttaatattatttataattctattgattttagcagctatagcaatcataggaacattttcaagcttcagtgatgtttccggatatgatttgggaagtgatgacctatccattgccgttacaggggatgtgatgttcggtcgtaagatgccgggagtcctagattccggagcaagcccattcaggaatgttgaaaatgttacaaagtctgcagacattttgcttgtaaactttgaaaacccggctacatattccaccaatccagtgaaaggggacgttcctttaaaggcagaccctaaatatgtgcatctgcttgctgaggccaatgagattgtcattgcatctcaggacaataaccatgcattggattatggggatgaaggattgaacgacagcatcaaaaaccttaaggatgcaggaatctatgtgataggagctggaaacaatctctctgaggcatctaaacctgtagtcatagaaaagggagatagaaaggtaactgttttaaactatatggatgcggataactttgcagaatatgcaagcatcatgcctccggcaactgcaaactcatcaggattctgcgcatatgacagcgagcttgcaagaaaacaagtggctgaggctcgcgagaacgaatccagcatagtcattgcctatatgcattatggaaacgagtatagcagaagccctaatgagtatcagataaacatgtcccatgagctgattgacagcggtgcggatattgtgataggttcccatgcccatgtgactcagggagtggagatgtatcatggcaagcctattttctataatttaggtaatttcatattcgatcagtccaatccagcaacccataggtcttatttccttaacttggatcttcatggtgacaattgtacagtgactctctatccgactgtgatagttggctacttgcctcaattcatggatgctgattcagctaaggcattattggcagagttgtatcctcaatgtgaccagctaaaggtaaatgatgatggaactgctcaattgacctttaagttaggtaatattactgataattccactcaatcaaatgatgtaaggctgtattaa

SEQ ID NO: 1047 - DNA, 459 bp, Methanobrevibacter ruminantium
  source 1..459: mol_type = genomic DNA
atgcttggtgaaatagaacttaaaaaactctttccagactttgaagatttagttcaaccatctggaatcgatttagagcttgatgaaatatttattcaaaaatcagagggctccctaatagacaatgagaagaatcttccagatattgaagctatggaagggccaatctataccctaaagccacatactgcctatttggcaagcattaggaggaaggttaagattcctaaaggatacactatgttatatctgccacgttctaccttgcttaggtcattcatttccgttcagactgctgtaggggacccggggttctatgggacccttatgtttatgatctataatcatggcgacttcgaatacaaaatcaagtctggagatagaatagctcaagccgttgtatttccagtggaaggctctggagagtataatggctcttatcaggaagaggaaatctaa

SEQ ID NO: 1048 - DNA, 1146 bp, Methanobrevibacter ruminantium
  source 1..1146: mol_type = genomic DNA
ttggttgaaatatcaattgtaattccagtctataatgttgaaaagtacttaagggaatgcttggatagcgctgtcaatcaaacattcaaggatattgaaataatatgcataaatgatggctctacagacagttccttagatattttaaaggaatatcaagagtctgatgatagaattatcatattcaatcaggaaaatcaaggtcctggcgctgcccgtaatcttggaattaataaatctaaaggcaaatacgtatatttcttggattctgacgattatttggaactgaatgcattggaaaagctttacaatatctgtgaggaaaagtcattggactttgtacttttcaagctgcttaacttcaatgacaaaactggaaaaaccttccaaacaaagtattataatatggctttcctaaatgataggataggagataatgtattttcatataaggatttatatgattgcgtttttaatttggcagtgtctccaccagctaagctatataagagagagcttattacagatatcgattatccggaaggcatcatctttgaggataatgtattctttttaaagacccttctaaaggcaaaaagaatctatttccttgatgagtttctatacaatcgccgcaggagggatgactcccttacaagctcaggatctgatgattattatgatataattccttcaatgaattatctatttgacatttgtcgagacctagatgatttcgaactcctgaaggaaggattgtattataaaaagttcaaggagctttatataagattctccaaggtcaatgatgtccataaagaggagtttttcaatctaatcagagaggattgcctaaagcataaggaagaaatcgatgaggatatagcaaatgataagctaaggaagagatctaagttcatatatgaatctgtgctttcttcagatgactataaggagtttcattatagaatcagactttatgataagaataaagagataaatgacttgaaaaaggaaaataagtctcttaaaaatgagaataaaaagcttaaaagttctaataaaaagttaaaaaaggaaaataagcatttcaagtcaactaaggcatataaggtctggaaaaaatattctaaaattaaagattaa

SEQ ID NO: 1049 - DNA, 987 bp, Methanobrevibacter ruminantium
  source 1..987: mol_type = genomic DNA
atggtagaaattactcttggtcttccaaagggaagcttaaataatgtaaacagaggaaacacttatcaattgtttgtagatgcaggttatgaggtaagaggatacgaacctggaaatgaatcttatgaaataaacattttaaatgacagtgaaatcaaagcattcttaacacgtccacaaagtactcctgttgagcttaacaggggcatggtggatatttccatcgttggagaggactgggttaaggaggaatccgtcttaagcgataacgacatagttaaaataggtgacttgaattatggcgaaactcgtttgattgtagcgattcctaaggaatctccttatgacagtctgtctgaattctttagggcaaatgcagatagggaaagacctattcttgttttcacagaatatccaaatctcacaagaaagcatatcatggaaaatgaggcatatcaagagatttatggagatgcagttcctttcgtccaggtaaggggattaagggacggagacaataagaaggttcaagtaattaactctgacggagccactgaagtctacattgcaaaaggggcagaccttattgtggacaatacccaaacaggaagcagcttgagaaaggcagggctaaaggagcttgaaaccatattgcattcctctgcaggactctatgcaggagtctcatgcaccgaagagaagatggtaaaggctaaaatgatttatgaacagcttttaggtgcagtgactgcaagaaaatactttgacgtcaagttcaatatagcaaatgaggatattgaaaaggtgtctaattatctaattgaaaacaagttctgcagtcatgagccaactgtaaatcatggctcaagcttttcccagatcaatgtattgattcctaaaaacatcttccctgaaatgctagatggtatcaaggaattgggagcaagctcaattataagaagcgatgtcaagcagtatgttatttaa

SEQ ID NO: 1050 - DNA, 1224 bp, Methanobrevibacter ruminantium
  source 1..1224: mol_type = genomic DNA
atgaaaattacagttgcgggtgtaggatatgtagggctttcacttgctgttctgctcgctcaaaaacatgatgttacagctattacaacaaccgaatcaaaggcagaaatgctaaatcagttcataagtcccattcaggacgatgagatagaaagattctttaaggaggttcgtgaaggagagagaacccttaatctccatacaacaactgataaggctgccgcttatggggatgcggatcttgttatcatagccactcctacaaactatgacgatgtaggcaatttctttgacacctctgctgttgaggacgctatcgaatggacccttaaggtaaatcctgatgtccttatggtcataaagtcaacaatacctgtaggatatacagaatctgtccgtgagaagtatggaattagaaacatcatcttcagcccggaattccttcgtgagtcaaaggctctctatgacaacctccatccaagcagaattgttgtaggctgtgatgacgaccagatggaagagggtcagatgtttgcagatctacttcttgaaggcgctagagaagaggagaaaagagcaaactctcttgaacaggacattccaatattgcttacacacctaacagaatctgaagctatcaagctgtttgcaaacacttaccttgctgtaagggttagctacttcaatgagcttgacacatatgcccagaccaaaggccttgacacacagatgattattgacggagtgtgcatggaccctcgtatcggaggccattacaacaacccatccttcggatatggaggatactgcttgcctaaggatacaaaacagctcttggcaaattataaggatgttcctcaaaccatgattgaagcagttgttcattctaattcagttagaaaggaatttattgcaaatcagattatttcaaggaatccaaagacagttggggtctatagacttacaatgaagagtaacagtgacaatttccgtgcatctgcaatacaagatgtgatgaaaagtataaaggcagagggaattccaataattatctatgagccaacattagatgatggaagtgaattctctaggtccgaagtagtaaatgatattgaacgatttaaacgagaaagtgatataatccttgcaaatcgtcttgactgtgatgtccttggagatgttgctgaaaaggtttatacaagagacctctttagaagagactaa

SEQ ID NO: 1051 - DNA, 927 bp, Methanobrevibacter ruminantium
  source 1..927: mol_type = genomic DNA
atgttaacatctgttcaaaaggaaatattgcaaactttaataaacctgtatcagaattctgatggcaagtcaatcaagggagaagacattgctgaggtgatgaatagaaaccctggaaccatcaggaatcagatgcagtctcttagaagcttaagtttggttaaaggggtccctggacctcgcggtggctataagcctaccattgaagcatatcataatctaaacatttctgtaagcgacagcaatgccaaggttccggtatataaggaaaataaaaaaatggatgatgtttctgttgcaaagattgaatttacaagcgttcctcaccctggggaatgtgaagctgtaataaaggtattgggaagcattaaggatctccatttgggagacgtgatccgtgtcggaccgacccctgtaaacaatcttggattaatcggcgaaatcgtaggaagggacgatatggacaatatcctccttcttgatatcagcacaataaggagcatccctaaaaatactgtatttgacattgcatcactggaccttatttatctaaagccaggagattcaatcaaggacgctgcatacctcttgtcccacaatcaaatcgatggagctcctgtaataaccgaaggggtagccataggcatggtttcattgattgatatcgtcaacgcattggcggaaggaaaggaaaatgaggacgtaagggacattatgtctaaaaggcttttctttattaataaggacactttgatagccaatgcagtctataagatgtataagttcggaatcagcaggctgatagtggttgatgacgagcatgctcctatcggcgttgtaactcgtacagatcttattgaaaccattacaaactttaagaatttccctcttctttataatatggagatggatgaggaaatggaatga

SEQ ID NO: 1052 - DNA, 936 bp, Methanobrevibacter ruminantium
  source 1..936: mol_type = genomic DNA
atgaaagttaatcaaataagcataaaaaaagatatgaaggtaagcgaactcatggaggagtttaagggttctggcgtattgggggctggacgagtggctagagcatccaatctgcttgtaaacatgataaacgaccctgatatggacatcttcatgagcatggcaggtcctttggttccaggaggacttagatacatcgtaggcgaccttattcgaaacaaaagaatcaaggtgctgataaccagcggagctaacataacccatgaccttttggagtcctttggaggaaggcattatcgtgacttgggatttaatgatgaggaactgaatgatgctggaattggcagaatatctgatgtatacacccaatcagaggactttgaagtattcgagagcgaaataataaagatattcgaaacaatatccaaaaagatcgataacgataaggataatggaataatatcaattcaaaggcttttaaaagaagtgggttcattaatagaagacgaaaactccatactaagacttgcttatgaaaatgacgtttccatatttgctccagggcttatcgacagcatgttcggtcttcaattatggatgtttacccaagaccacaagcttgttgtggacgctgtgggagacatgcattacctatcagaccttgtattcgaatcagataagatcggtgcaataatgttgggaggaggccttcctaagcattatacccttgcatcaaacctattaaagggaggaatcgattcaggactccagataactatggaccgacctgaaaccggaagcttaagtggcgcccctttagaggaagctaaatcatggtcaaaggcaaagcacggttctaatctggtgacagtggttggtgatgcaactgcattgttcccattgatctatgcagctgctttggataaaatcgactga

SEQ ID NO: 1053 - DNA, 540 bp, Methanobrevibacter ruminantium
  source 1..540: mol_type = genomic DNA
ttgtttaacccaataatagcattatcatacatctcttccggtttctttatgaagatttcagacgatgagtatgatgagaagaacaacaagatacttgcaatcatatttggaatagtgtgcggagcatttacagctcttgcatcatcaatgagcacagatgcagcatgcatattcattgcaatactcattggaaacatattagcacagaaggtggatggaatccatcatgtcgttacaatgctttcatttttgattgtgcttgtttttcttggacttcctgcattcagtcgtccatccattcttgtcgtaatgatttgtgtggctggagccctaatcgatgagaagggaaatgacaatgagatactctatgaaaaaagcaagtttctgatgtatttctttgattacaggtttgcacttaaagtggttattttagcccttgctttatttgggcttgtggacatttggacatttgtttacttcttatgctttgagatagcatatgagatagcaagagtgctttttgagaagtttattttataa

SEQ ID NO: 1054 - DNA, 648 bp, Methanobrevibacter ruminantium
  source 1..648: mol_type = genomic DNA
atgaaagtaaaaaacaatattatacttgcaatggacctaatggatttagcatcagccgaatcagtatgcgaatcaataaaccaatacatagacacaataaagataggatatcccctcacacttgcagagggacttaagacaatagggctctttaaggaaaactttggatataaggttatctgcgattataaagtggcagacattccagccaccaatgaaaagatagcaaatctcacctttgatgccggtgcagatgcaatcatatgccatggctttgtaggccctgacagcgtagaggcctgtaaggcatctgctgaagaccatggaaaggaagtattccttctaaccgagatgtcacatcctggagcaatcagatttttacagaaggatgcagacgatattgcaagaatgggagttgaaatgggaatatccaattacgttgcaccatccacaagaccagacagactgtctgaaattagagacatagttggaaaggactcattcatcatatctccaggggtaggaacccaagggggagaccctaaagagacattgaaatattcaaatgctcttattattggcagatccatctacaatgcggaagaccctgaaactgctactaaggacattattgattcaatacaataa

SEQ ID NO: 1055 - DNA, 771 bp, Methanobrevibacter ruminantium
  source 1..771: mol_type = genomic DNA
atgatttttgcagctatcctggctggtggggtaggaaacagaatgggcgaagtggataagccaaagcagtttctaacccttggagacaagcctatcctcatacagaccgttgagaagttttatctcaacagcagaatcgatgaagttattgttctatgccataagtattggctaaaccatacaaaggacttgattgaagattatattccaaatgcagaaaacattgtggttgtagaagggggagagctccgtaacgacacaatcatgaatgcagttaaatatatagaggacaatcatgagcttagcgaagatgacataataataacccatgactctgtaaggccatttgtaacccataggatcattatggaaaacatagagaagacccaggaagtgggggcatgcgatacagtgattccagctacagatacaatagttgtctgccatgacggcaatatcataagcgacattcctaacaggaattatatgtatcaaggccagactccacagtcattcaagatattgaagcttaaggaatgcttcaataagctctcagatgaggataaaaggtcattatcagatgcagctaagatattcgtcctcaatggagaggaggttgcgatagtcaagggagaggtattcaacataaagatcacctatccatatgacctaaaggtggcaaatacaataattgacgatgcaaagctcaatatctcagatgcagagactggtgagtataaggtcaatctatatgacttcggtgaggaatag

SEQ ID NO: 1056 - DNA, 1023 bp, Methanobrevibacter ruminantium
  source 1..1023: mol_type = genomic DNA
gtgattaatatagtatataggctggtggctcctaagctcttggaggaagtttatacagagcttaatctggatgttggagttatagtaaggcctaaatatctatcaatatgcaaggcggatcaaaggtactattacggtaagagagtcccagagatcattgaaagcaagttgcctatggctcttatccatgaggcggtgggcactgttgtaaaggacaatacaggcaaattcaatgtgggggacaatgttgtaatgattccaaacattcctcgtgcaagagacaatataataagcgagaactatattccgtcaagcaagttcagatccagcggatatgatggctttatggaagagtatgtgtctctcactgaagacaggcttgtaaagcttccagatgatttaaacatggaagttgcttcttttattgagcttatttcagtggctacacattcaatcaagcgtttcaagcagttttcccaccaaaagaaagacgtgctaggagtatggggggacggaagttttggatacattacttcccttgttcttaaggtgatgtttccagagagcaaggtctatgtctttggaatgcatagggaaaagcttcatatgtttacctttgtggatgaaacctttttggtggatgagattccagataatgttagtgtggatcatgcctttgaatgtgttggaaaggctagcgcaaacaatgcaatcaatcagataattgacataatcaatccagagggcaccattgctctacttggcgttagtgagtttaatgtatcaattgatactaggaccatattggaaaagggaattagggtattcggtaccaacagaagcgctagggaagactttgtttctgtagtcaatctcctcgaggaaaatcctaatatgattcactatcttgagagtcttattactgagatagttgaagtgaataccttaaatgatattaaaagggcttttgagtcagataaaaaccttagatttggaaaaactgtaataaaatgggagatttaa

SEQ ID NO: 1057 - DNA, 1011 bp, Methanobrevibacter ruminantium
  source 1..1011: mol_type = genomic DNA
atgcatgaatatgaaattagtattataataccaacatataattcttcaaaaacaattgaaagaacaattcattcaattttaacacaggattttaaaaattatgagatggtttttgtagatgatgcatcaaatgatgatacagtaagttgtatacaagaaactttagcagataaaaaggtaaattatcagcttattgtaaataaaaacaataaaggtcctgcctattgcagaaataggggagtatttgcttctagaggaaagtatattgtctttgttgatagcgatgatctaattcaatttaaccatatttcctcattgcataattatgttaaatcagacaattttgattccgcctttacaaaaggaataaaaataaataatcaggatgagcttatagattttaaagtggataaatatgatggcttgattcatttggctcgtaaaaataagggaattgttagagccaaagatttgataaatcttgaattgcttatgaaaattccattttcctttgtattgttgatttatgataaggaaatcatcttaaataattccctagaattcaatgaagattatagatatggtgaggacactgattttgcacttaggtacttggcaaattgtggcaatgttcgtgtaattgataaatatacttatttttattatcaagaggaagattctatttcaagacaggtctctttggataggtttgaatctgtaaaactttttgaaagtctggattcctattttaaagaagatgatttgagagaaaagttggttcattcaagaatccctagatttatttttggcaatatgaattacttcttctacaatggatacaatagtgaagatgtttttaaaaagatggatgttcttgatttatttaacaagttaaggcagtttaaggtgtttgaaaaaagagattggaagttttatcttaaggttagattgtttttattgaatcatagattgtattataaattgtggttaaggtttaaaaataatctataa

SEQ ID NO: 1058 - DNA, 213 bp, Methanobrevibacter ruminantium
  source 1..213: mol_type = genomic DNA
gtgaatgatttaaaaaagttatatgttttgcttgcaattttaattgttatttatgtaggtattaacttttcatataatggtttagacaccattaatactttaactcatgttaatttagatttaggtccaagcatggacaatgctaacgatgcaaatcatattaaaatcggcagtagttcatttaccaaattaagcaaaatttttacctggtaa

SEQ ID NO: 1059 - DNA, 1008 bp, Methanobrevibacter ruminantium
  source 1..1008: mol_type = genomic DNA
atgacaaaaattttagttactggcggtgcaggttttataggtagtaactttataaaatatatgcttgataagtatcctgattatgaaatagttaatttagatgctttgacttactgtggaaaccttgaaaatcttgaagatattgaagataatccgaattattcctttgttaagggaaatatcatggatgaaggtcttgttgatgttgttgtaagcagcgtagactacatagtcaattttgcagctgaaagccatgtggaccgcagcatagaagatccgcagatattcatcaaatccaatataatcggaacacaggtattgcttgatgcagcctataaataccaaatcaaaaaattcctacaagtatccaccgacgaggtatatggaagcctaggccctgaaggatatttcaccgaaacaactcctctccaggctaacagtccatattcagcttcaaaggcaggtgcagacctcatggtaagagcatatggagaaacattcgaccttccaatcaacataacaagatgctcaaacaactatggcccataccaattcccagaaaaactcatccctctaatgatttctaacgcattggaagacaaggagcttcctatatacggtgacggaaaaaacataagggactggctacatgtctacgaccactgctcagcaatcgacctagtcctccacaaaggaaagataggagaagtatacaatataggtggccacaacgaaaagcaaaacatagaaatagtaaaactcattctcaaggaacttaacaaaccagaaagcctaataaaatttgtaaaagacagactaggacatgacagacgttatgcaatagactcaagcaagataacagaagaattaggctggaaaccaaaatacacatttgaaacaggaatagtggaaacaatccactggtatctagacaatcaagactggatggaaaaggtaaaatccggcgaatatcaagaatattatgaaaagatgtactctaaaaaataa

SEQ ID NO: 1060 - DNA, 564 bp, Methanobrevibacter ruminantium
  source 1..564: mol_type = genomic DNA
atgggcaagtttaagattgttaaaagtgaaattgaaggtgtatttacagttgaacctaccgtttttgaagatgaaaggggctactttatggaaacctacaatgagaatgactttaaggcagaggggattgatttaacctttgttcaagacaatcaatcaaagtcatctaaaggtgtccttagaggtctccatttccaatacacacagccacaaggaaagctggttcgtgtaataaaaggagaagtcttcgatgtgggagtggatcttagaaaagactcacccacatatggaaaatgggtaggggaaatactctctgaagaaaacaaaaaacaactatttataccaaaaggatttgcccatggctttttagtattatcagatgaagcagaatttgtatacaaatgcacagacttctacaaaggagatgatgagggaggaatccaatggaacgatccagaaataggaataaaatggccattgggaaatcttaaggaagaagatataattttatctgaaaaggacaaattatggaagccgatgaaagagactccaactgatttttga

SEQ ID NO: 1061 - DNA, 873 bp, Methanobrevibacter ruminantium
  source 1..873: mol_type = genomic DNA
atgaaaggaatagtattagctggaggttctggaacaagactgtatccaattacaaaagctgtatcaaaacagttattgcctttgtatgataagccaatgatttattatccaatttctgttttaatgcttgccggaattaaagaaatattaataatttctactccaagggatttgcctatgtataaagaacttttaggtgatggagagaatttaggaataagcttttcatatgaagctcaagaaaatcccaatggtttagctgaagcttttataataggcgaaaaatttattggtgatgataatgttgctcttattttaggagataatgtatttcacggacatagatttagtgaaatactgaaaagagctatgaaccttgaagaaggtgcagttatttttggttattacactcaaaatccagaaagttttggcgtagttgaatttgatgatgaatggaatgttttatccgttgaagaaaaacctaaaaatccaaaatcaaattatattatcccaggactatatttttatgataatgacgtgattgaaatagctaaaaatgttaagccctcatttagaggtgaaaaagaaattacctctgttaatgacgagtatcttaaaagaggaaaacttaaagtagaacttcttggtagaggcatggcttggttagataccggaactcatgacggcttgcttgaagccgcaaattttatagaaactatccaaaaaagacaaagcgtttatgtagcatgtctcgaagagatagcatttataaatggttatattcctaaagagaaacttctcgaattagccgaacctttaaaaaaaactaattacgggcaatatctaatcaaactggcaaaaatgaaaaaataa

SEQ ID NO: 1062 - DNA, 1482 bp, Methanobrevibacter ruminantium
  source 1..1482: mol_type = genomic DNA
atgaacagattttggaatgatttaattttacctttattttatgaatttaaaccagaagtaattgttgaaatcggttgttttaaaggagaaaatacaaaaaacattttagaatattgctattatactaattcaaagttaaaagttatcgatccaaatcctgattcttcttttgaccccatatctttaaaaaataaatatggagataaattcgaatttttaaaggaattaagtttaaatgggcttaatttaatagaggattatgacgctgtccttattgatggagatcataactggtatacagtttataatgagcttaaattaattgaaaaaagattcgatcaaaataattttccgctaataatctttcatgatgtttcatggccatatgctagaagagacctttattataatccagaacttattcctgaggaatttcgccatccttataaaaatttggctatgtttccagataaaaatgaattgggagatattggtttaaatccaacttttaataatgcagtttttgagaatactcctaaaaatggagtcttaacagccatagaagattttttagatgaaactaatttaaatttatcattcttctgtttaaatgcattctatggatttggtgttttgtttcctagtcaatcatgtgatgaaaaaacaatattgcaaattttttatgatagtgatgttatagggcttttagagaaaacttatttaaaattaagatttacacaggaacacattattaaaaataagaatattgaaataaataacttaaaagatatgaataactctttaaataaaaaaaatattgatttaactggcattaattctaatttagaaaaagaactagacaaactaaacaacaccaaaacagaaatagaaaaagaactagacaaactaaacaacaccaatatagacttaaaagaaaaactaatcatttcaaccaataaccaaaaggaattagaaaagctattagataatctaaaagatgacaaaacctacctagagaacgaactgaaggatttaaacaataccaaaacagaaatagaaaaagaactaaacaaggttacaaacgataaaacaaacttaaaaatagaattaaacaatataaacaatacaaatatagaattagaaaaaatagtagatgacttatgcaatgagaaatcttctttaaaaaataaaattaatgatctcgaatatgcaaatcaaaggactttaaaaactattgaaaatttgaatggagatatttactcaaagacatatgaaaatgacagtttaaaagaagataatttgctactgactaaaacaaataaagattttctagaagatattaaaaatttaaataatcttaattatgatttggagcaaaaaatattgaatttagaagaagaaaaaaactctattttatcttccaaaacttggaaattcggtgctccttttaggaaaataagcaatatatttaataaaaattaa

SEQ ID NO: 1063 - DNA, 1521 bp, Methanobrevibacter ruminantium
  source 1..1521: mol_type = genomic DNA
atgacatataaagtaagtataattattccagtatataatgcagcagagtttattattagggatactttaaaatctatagaaaatcaaacaatggattttgaggatattgaagttattttagttaatgattgttcaacagataatacagcgaaagtaattaatgaatatgctaaagaacatgagaatattgttccaataaatcttaaagaaaataacggtcaaccaggcattccaagaaacattggaattacctatgcaagcgcagactatcttatgtttttagatcaggacgatacctttaaaaagaatgcatgtgaaacattatacaataaaatatcaacggaaaatgttgatatggtatgtggtaaccacaatatcgtaagcaatggaagatctaacatttgctttaacttcgattgggccgaagaggatgaaattaaaatcaataagattgacgaaaacccaaatttcctaacaatgggagttgcagcatggtctaaaatattaagaagggaatttgtcttggataataatttgaaatttaccgaaggagttggggaagatatattcttctcaatcagggcattgttactggcagaaggaataattctgcttaaaaatttcatcgttgtggattacctagttaggggggaatccctttcacaccaagtcaatgcagaatatcttgatgaattctgtgagttttacttaaatttctttaattactgtgaaaaaaacataaaaaacgacaatttataccatcctttattcaatggcaggctgaaccatgtcctatccatgcttttcttcgctgatttgtactttgatgacctctcttgggtattaatcaagattcatgaattgtttaagaaagtggctgagaaaccattcgtttttgaagatacttcttatagaatcttttttgatacattgataaaagatgaatatcctttcgaaaatagcattaatatatacagcgccattaaaagtaatagggaaagaaaatttgacaaaggagtaaaatatctagaacaagaagcaaaactctacattgacaatggaaacggatttaatgaaaaggatagtatcatagcaaactataaaatttatgaattcaatgaagttgaatttaacctagaaaactttaaaaacattaaaagaatacgctttgatcccattacttggaattttattaattgtgtcatacatgagataaaaacaaacaatggcgatttgctctatgaagctataaattccatcaatagaagagaattatatggattaaataaagaagaacaatcatcaaatagaaattcaaaagaaaatataagatataaatcatctgatgattcttcggctgaaggaatagcggacatattcttaacaactgattcacagtatttattatacggcgattttaataatctcaaatctataaaaataaattttgaagtaaatctcattgataataatgaagtaagcaaaatagttgaaaatttgatagaaaactatgaccattaa

SEQ ID NO: 1064 - DNA, 1704 bp, Methanobrevibacter ruminantium
  source 1..1704: mol_type = genomic DNA
atgagtataaaaaataaattcttatctttatttaattcatcatctaataattctgattttgaaaatttaaataattattataaaaaagttctagaggatattgaaaatgaggatatatctggctatgatcgaaatttaaaatattacaatgacttaaaagactgtgaactttttagttctgaatattatataacaaaccaaggtttagagctttcagaagaatatgctttggcccattatctaaatgaaggttataagcaaagcagaaatccaagccctgaattcaataatgacaaatatctcagattatatcctgatgttcgcctagctagccttaatcctttagcccattatgtgttatatggagaaaaagaaggcagaagattgcctttaagcgaatatgaagaactggaaaatgagatagtttctgtaaaaaatttaatttatcaaaacagagtaaccgataatttagtcttgcttagagataaagtgtccaaaggcaagaaagtcaatgttgttttcgttttacctgcaatgatgtttgtatataaagacttatataactattttgataacgatgatatgtttaatgttcaaatcgttttggttccccacagattaggaaacagtcaaaagattacagatgttgcaaaagataagcattatcaaattttcagctatctcaaagaaaaacaatacaatgtaattgatggatatgacttcgaaaaaaatgaaggcatcgatttagtctcaacttgcaatccagatataatattttatgtcttgccttatatgaggattttccctaaaactatgaaaatcagtaatctcccatccaacatattatatgcatatatcccatatggggaatttgtagaagacaacttagacgatttattctttaatttcggatggaatgaaattgcatggaaaattttctgcagtaccgaagaatatctgattaattctactgaaaaatctattgtcggatcaagtaatgtagtcttagcaggttctgctaggatggactctttaattaattttgaagaatctgatgaggattataaatggatttacagcaaagaagaaaataaaaagagaattatttgggctcctcaccatacattagcaagacctggtatggatgacagcttatcctattctacatttgatgaaaattttgaattcttttataattatgctaaagaccatccagacattgaatgggttattaggccacacccattacttaaggaagtgctaagtaatattaacactaatatgagagttcaaggaattgctgatgaaaactttgcagatgattattttttcaaatgggaaagtttacctaatgcccgcttccatgaggaaattgactattttgacttatttgccactgccgatgcaatgataaccgattgcataagctttaaagcagaatatttatttgctaataagccaggcttaatcttaaataaaacaggagttgaacttgacggatatcaaggagaaattactgatgcatggtataattgcgatgggtctgactttgaaaagatagaagaatttattgaagatgttgtagtgggtggaaatgattacctaaaagaaaaacgtgaagaaatattcaataaaaacttcaatgtcaatttaggcagtgcatcaaaagtaatttttgactatattaaaaatgagttaacttaa

SEQ ID NO: 1065 - DNA, 3039 bp, Methanobrevibacter ruminantium
  source 1..3039: mol_type = genomic DNA
atgaaaaagaacaattttaataaaaagataactttcgtcgctaattacttttggactagcattaaggaaggttcaaaatccaattcttattttaattatgataattacctaaaaaaatatcctgatgtaaaggaatctggaatgaatccttttaaacactatctattgcatggaattgatgaagagcgcagtactaattttgatgaaaatattaattcatacagtttagttgaaaattccgatttatttgattatgaatattactgtgaaaaaaacaatctgaaatttgattcctatagtaaagcattaatgcattatcttgaaaagggatataagaaaggatacaacccaagtataaaatttaatgcagaagaatattatgaagttcgtcctgatgttaaaagggctgatgtaaaccctttagttcattatttaaagtatggaaaaattgaagtaacctcaatgactgaaaatttaaatcttaaagagtatcagctcgttaaaaattcaaatttatttgattataattattatatggaaaaaaatcatttggatttaagaaacgaaaccgaggcaatttatcattatttggaaataggttataaaaagggatataaccctagcaataagttcaatggtgaaatttattttaagaaaaatccggatattgaggaatctggctggaaccctttagttcattatttgaaatatggtcaaaaagaagagcgtactgataaatgtgataaaaacctgaaagaatattctttagttaaggaatcaggattatttgattatcaattttataaagataaatatgatttagatttaaattcatataagcgcggtttaattcattatttggaatttggttacaaaagaggatataaacctagcagaaattttgatggggaagaatacttaaaaagatatcctgaagttaaaaaagcaggatttaatcctttagttcattatttgaagtatggtgtgaatgaggaaagaataggattaagaagaataagctttaaaaatttcaacaagaactatgatgttgaagccattttagaaaatatagataatgatgttacaatcttattgaatgttgaagactcaaacaacttgaaagaatgtattgaaaacattaagagcaccactaaagactataagataattttaattcatgaaaatcttgatgatgaggatttggaatatataaaatccaataatgatatagaacttttaagaaggagccctcatgaatcattcatcaatgcattgaataatatattggacaatgccaaaaatgatatcatctttcttaaaaataacatcagaacttttgagaaatggattttcaaattaacagttgctgcatattcagatgatcgcattggatttgttagccctatttcaaattattctactgttagcctaataaatattgaagaagatgagaaatcaagcgaatttataagtaatatttcaaaaagagattatgaagaatctccgttacctaatgactcttgtgtctttataaaaaaggatgtctttaaggaattaaaatttgatgaaagttcaaacgaggaaaattggtttgctacttttatagaccgtggattagaaaagggatggaaatcaattttagatgattcaacatatgtttactatcagtttaatgaggtagaaccccaacaagcagatgaatatgattattcaactccctatgtattagaaaataggccttcagttaaatttattaattctgatgcatttaacaacagttttcaaaatattcatgagtatgctgatgataatcttgaagagaatattcaagaaaagacaaggaaaaatatcctatttgctatgcattatgggggaggagtggaatttacagtaaaagatattgttaatgcgataaaaaatgattatgaatgttatgttttaagggcatttaagaataaaatgaaattatataaagttttcaacgattattttatttctataaaagaatttaatattaaatatccttggactcctaaaatgattcacagtgatgaatataaacagatttatttttatatattgattaattataatatagacattttagaaatcgatcatttattattgcatacatttgacttgcaggagcttgcaaaaaaactggatattcctataatcctaacattgcatgatttttattatatttgtccttcatatttcctattggatgaaaataataaatattgcggtggttactgtggtgatcaacctagaaattgcagtaccagagtcacttggattgatttgcctgcaaatattgttgaatggaaaaatcaatggcaggaatatatgaaagaactatttggaatgtgtgattatattctcactgcaacagactttactaaggatatgttcttagaacattatgacagtttaaaaagtgatgatataacaattatagagcatggtcgtgatttaatacgttatgataataattatacagttcctaatatatatcaaccgattaaaatattaattcctggagttatagggcctcataaaggcttagattttattaaagaattgaaaggatttgatgacgacaatcgcttggaataccatttcattggacaagtggatgatgaattgaaatcaatgggcatatatcatggtccttatgaacgggaagatttcgctaagtgggtgtttaaaattaaaccatcattcattggaatattctctgtctgtgccgagacatattcccatacattgactgaatccatatgttctggggtccctgttttagcatctaatcttggtgctttaaaaactaggattgaatctcaagggggaggatggctggtaaatattgatgatgctgaagagacatatgaacaaattttagatatttccagtaaaaaagaggagtataaatttgtaacggaaaatctaaaggatattaggatttccagttcagaagaaatgggaagcaaatataaggaaatttatgataagctaaccaagaaagaagataaatga

SEQ ID NO: 1066 - DNA, 801 bp, Methanobrevibacter ruminantium
  source 1..801: mol_type = genomic DNA
atggaatttataaaatataaatctcaattcgaaaaaatgatagataataaaattattggtatgccagaattaattgattccaatataagctttaaaggtaaaaataatattttatgttgcaacaatattaaattagaaaatatagacatagatttcaatggaaataattctgtaatttttttaggttctaatctaggcgtaaattctcatttaactatttttaataattccacattattccttggaaaaaataatacttgcggatcttcaatttcaatttccgttgctgaaaatcaaaatcttatcattggagataattgtattgttgaaagtgatgtaaaaattagaacttcagataattacccaatttataattatgaaaacagtaggattaaccattcaaatagcgtatttataggggataatgttttattaggtgaatcttcatttatttcaagaggagttaaaataggttccggatcaataattagcccatgtagttttctgccacctctgtttaaagctttttcaaattcatatgtattagggaatcctggaagaatattgaaggaagatgtttactttgtaaatgattcaattaatgattatactattgaagagattaaaaactcttcaatcaatgaaaatgaaagtggactttttgattttgtagaaaaagaaacattatctttagacaagattgataatattctaaaaaaatttaactctgaagactctttagattttattcaaaaattatttttacagaacaagcataaaaaccgtttcttcattgagtaa

SEQ ID NO: 1067 - DNA, 1326 bp, Methanobrevibacter ruminantium
  source 1..1326: mol_type = genomic DNA
atgaaaaagccaaaaacaaaagcgcaaaaagaatctagagagaaaaaacctaataatctaaaaagtgattgtatgaaaaaaattttatatgttttacattctggagttacaggaggtactttcttaacaaataaagatttgatgaaaaatgtggaaaaggaatttgatgtttatttattgagtgctgaaaataagttcttaaaattatttagcttttccaataacaaattaaaattaataagaaaatatcatagaaattatggaatcaatgtagaaacagaagagacagaaacaaataatatctcatggtctgcaaaagatttccataattcctggctaagcaacatttattttgaaatattggttaattataacatagatattgtccatataagacatttgattaaccatagttttgatttgccgcaagttgctgaaaaattaaacatacctattgttttatccctacatgacttttattttttatgtccattttacacattattagatgaaaattataattattgcgcaggtgaatgttctcataataaaaaaaattgctattgtcctatggattcattaagcgatataaattccaaagaatttatatcagaatggagagttaatgttttaaaaatgtttaattatataaatgtctttgtaacaacttccttttttgtaaaagatttatttttatccatatactctaatgaagatatcatcaataacaataactttaaagttattgaacatggcagggatttcccaaaattaaaaaaacagatgtttgaaatcccttcatcaaacaaacctataaaaatcttatgcccagctaatcatttaaacataatgaagggttcgcaattgattaaaagaatcaaagaagaggataataaaaatctgatagaatttcattttttaggaaattgtcatgatggaattgaagaatatggtttttctcacggcacttttgaaagagatgaattccataaaaaagttgaagaaattaaaccttcatttgttggaatcttttcaatttggcctgaaactttttgtcataccattactgaggcatggagttgcggaattcctgtaataggtacaaatattggagtgatccaagatagaattttaaaaaataaagggggatggattgtggataggaataatcccaaaaaagcctatgaatatatggctgaaatatttgagaataaggaggaatatctagaaatcgcaaataatatcaaaactatggacttaaaagatacaaaaatgatgtctatagagtatattcaaatttataataatttactggaaattaaataa

SEQ ID NO: 1068 - DNA, 2007 bp, Methanobrevibacter ruminantium
  source 1..2007: mol_type = genomic DNA
atgacaaaagtttcagtaattattccaatatataacggtgaaaaatatcttaaggaatgtttggattccgtctgttgccaatcattaaaagatattcaaattatctgtgttaatgatggttcaactgataaaaccctttccattttaaatggttttgcatcaaaagacaaacgcataaaaataataagcactgaaaacagaggacaaggttcagcacgtaatactgcattaaaagaagcccaaggagaatatattagttttgttgatgcagatgattggattagtgaaaatgctttagaacttctatatttccatgcaaaatcaaaagatttggatatgcttttttttcaaatgattaattatatggacaattcaaaaaattatgttgaaactgaattatataatcatctgtgttttgaaagaaatgcaattgatgaagatacaatttttaattttaacgatataaaagaatttttatttaaaataccagtttgtcctgtttctaaattatataaaaaagaatttttagattcaaatgatctttatttcccagaaggcatgttttttgaagacaatgcctttttttacaattctttatttaaatccaactgtcttggatttttaaaaaagcatttatattatagaagacgccatgccgactccgttactcaaacatttgataaaaggaagtttgatattgttaaggcaacaaataaggtattagatgtgtttttagaaaatgaccaatatctaatttttaaaaaggaacttattaatcatacgttctccatgctgttggaatggtttaacaaatcccctctagaacttaaagatgaattttataggttaattaaaagagattttagaggatttaataatttaaaagaagattttaagaacaatttgaaagaggaatacttattaatatttgatatttccgataagaacaaatattatttggatttcttatctgaatataagctatcctcagcagattatgatattttcgataaagaaagatatttccatttaaacagtcaagaatacttggaatataagtctaacaaatcaaataattacaaaataagtgttgtcataccaatatataacaatgaaacattcattcatagaactttaatgtcaattgaaaatcagtcctttggattagagaatattgaggtcataatggttaatgataattcaaaggataataccgaacttgttataaatgaatattcttctaaatatgaaaattttaaagctatccatataaaagaaggaacagggtcccctggaacccctagaaacattggtttatatgaatctacttcagattatgtgatatttttagaccatgacgattattttgaaattgatgcactagaaaaattatataatgcaatcaatgaagaggattgtgattttgtttatggcacttatgcaagtgttgatgaggatttgcctacaaagattatctatccaaatgaacttcatggctattttaaaaatatttatggaaatccccgatctatagcttttccgccaccttccatttggacaaaactgttcaagagaagctttttaattgaaaacagaattatttttccaacaattttaggtgaagacgccatttttatttctaaagcattattttctgctgatggaattgattatttatgggatgatttgatttgttatcataccttaaacaaaaagtcttttacaaaaaatgtttcttacgattatttagttcagggttttgtttctgaagaatacttatacaatatctataacgattttgaatcccaatcctatgagttaaaggagaacagcaccattccctctgaaaaatcctcagaaaacattgaaaaaatgaatttatataaaattagatctgaagggattttagacttttatttaaatcagttttatcgcagcgatttaaatgatgaggatatctatagaattttccccattttaagtgattttgtttcgacaagaatttaa

SEQ ID NO: 1069 - DNA, 771 bp, Methanobrevibacter ruminantium
  source 1..771: mol_type = genomic DNA
atggcactgattgagaaaaacgaactcttcttattggaggaaatcgtaaaaaagaattttgcagcaaaatataaagattcgatattagggatattttggagtattttaaaaccattattaatcatgattttacttacaatcatattttcaaacttatttggcggaagcattgaaaattatccagtttactttttatccggaaaaattatctttgatttttttaattctgctacatcagtatcaatgatgtcacttaaaggcaatataaacattttaaaaagaactgctgcaccaaaacatatttttacgttagcaggagtcgtttcagaatttttaaattttttaattaccttaataatattaattggtgtcatgattgtgaccagatccccattttatatattggaatcaatgatagcaataatcccgataatgtcattaatcattatgattactggaattagcttaatactagctgttttatgtgtttacttttcagacatacaacatttatggggcgttattacattaatgttaatgtatgcatctgcaatattctatccaatgaacataatccctgaaccgtttcacggaataatgattttaaatccaattttttgggttataggccaatttagaattcttgtgctatggggaacaataccaagtaggatgaatatgttgaatttagttcttttatcagtgattattttagtgtttggaataatagttttcaagaaatttgagaaaaagattactttgaaattttaa

SEQ ID NO: 1070 - DNA, 1467 bp, Methanobrevibacter ruminantium
  source 1..1467: mol_type = genomic DNA
atgaatcaaaaaagagatgaattaaattctaaacaaaatataaacttggattcagaaaatgaaatttcctcatcagaaattaatcttaagaaaagagatcctcaaaataaatcagatttaatagctcagcaacgcatgaaagctaaaagggaattaattgaaagatataatatgtctgaaagtgaggctgaaagtactctcaaaagcatagaaaataaggtaatgcaaaagaaaaataaaaaaataactaatgaaaaagagatagaaattaattcaaataaagttagaatggatgataaaaattgttctttggagaatagcgctggtgtttcagaaaacaaggataaaaatgatgaagctataaaaatacaaagccaaaattctcaaattgaaggagaatctgaggaaattattccagagcatgttttagaaagacaaaatcctaataaaattgataatagtgattatgaaataaattctgtttccgatacactgcctgtaatagaggaaggggaatcaaagcctattcaaaatgccgaggatgaaatcgtaaagaaagagcttgttgattctgtttctgatgtggtgcctgttgtgggagagaaagaagaaaataatgaacctataattaagaaagacgattcatcagatgtagatgatgtcttgtcatcaataattccagaatatcatcagaaatcatcaattgaagtaaataatgtttcattaagttttaatattgaaaatgataagatagataatcttaaggaatatattattcgtaccctaaaaaggaccaaagagaaaaaaattaaatttcatgctttaaacaatatcacttttaaaatctataaaggtgaaaaagtagggattattggatataatggtgcaggaaaaagcacattgctaaatgttatcacaggtatttatgaacctgatgaaggaaatgtgaaaacatatggaaaaatttctccattattgtctttaggtgcaggttttgattataattattctggaagagaaaatatctacttaaatggagcagttttaggttatgataagaagtttttagaatcaaaatttgatgaaattgtggaattttcagaacttcaagattttattgatttgcctattaaaaactattcttcaggaatgcttgcaaaattagggttctctatagcaacaattgtcgaacctgatattttgattattgatgaggtgcttggagtaggagatgtgaactttcagaagaaaagtagtaataaaatcaaatctttaatggatgggggaacaactgttctgcttgtttcacattctattgttcagattagagagatatgtgacaaggctatatggattgataaaggggagctaagagagtttggcgaagttaatgaagtttgcgatcattaccttaaagatgcccagaatgccactaaaaatcaagtgaaagatattagatttaattaa

SEQ ID NO: 1071 - DNA, 2454 bp, Methanobrevibacter ruminantium
  source 1..2454: mol_type = genomic DNA
atgaattataaaattagcattatcattccagtatacaatgtagaaaattacattgaaaaatcattaaactcaattatttcacagtcaataggtattgagaacctagaggtcatattagttgatgataactctacagataatagtgcaaatattataaaaaaatatgttagcaaatatgataattttaaaggaatatactgtgacattggaagtgggttctgtggcagacctagaaatattggtttaagctatgctacttcagagtatataatgtatttagattctgatgattggttagaagaaactgcctgtgaagtattatataatactatcattaatgaaaatgcagacattgtttgtgggagtcaaacaagactagacaatgagggcaatagaaaattttattatcacttatgggttactacattaactgatccgaatgaagattacaatactcgaatgaaaacaacacaggaaattatagacgatccgaattttaagttagtcgttacagatttagataaaaatccaaatattttaggacatgcaaatgtctgggggaaaatttttaaaaaggacctaataacagaaaatgaactatcatttccagaggacatagttgctcaagattcagtttttttattaaactcctttttcgttgctgaaaaaattgtatttataaacgacataattgttcattataacaatttacgttgcgatgatgatgataaatccgcttcctatgtaaaaactactaaaaatctatttggcagaatcaaagcatatgatttaatggataatattagtaaaaaattttcaaaggaagaatttttctacagatatttattagtaggcaaattaaattactggtttaattcatttttaatggattctaatattagcacatatgaaattaagcttctttttaaaaaatattctcatttatttagtaattgttataaatttaatacaaatctacgaaaagatattaaaaatatttttaaagaaatagatgagggaaattacgatattgctgcatcaactgtttcaaaattacaatcaaaatcattttccgcaagtgaaaacaaaattaaagtatcagtaattattcctatttataataatgaaaaatttctaagcaaatgtttagatagtgttataaatcaaacattgaatgaaatagaaataatttgtattgatgatgggtcttctgacaattctattgaaatattaaatcaatacgtccttaaagattcacgtttaaaaattatatctcaagagaatctaggggccgctacagcaaggaacaatggattaaaaattgcaaaaggagaatatatagcatttttagattcagatgattggttggagctaaatgcatttgaaaaattatatgaaaatataacaactaacaattcagatttagtcctgtttaactctattgaacataaggaaaatgctaatttaaaagaaagaattcatataaaaaatgattcaatccccgattacaattattacacatttaattataattataaaaaagacttagttatgaatggatatttagatatttggtctaaaatgtataggacttcatttttaaaagagaacaatattcaattttcaaaccatcaaatattcaatgacattcaatttcacataaaaactatgttaaatgctaaaaaaatttcttattgcccagaatttttatataattatttaagaattaatcacccttctcttcaaaataatcttagcttgggcaatgaaagttttattcttttagatataatagatgaaatcgaagactatttaatcgacaatgaattttataatgaattaaaatctaattttataagatttaaattaactgaattggaaagtacgctagaaaaattagaaaatccttatagaaatgaattctttaaattaattaaaaataactttaagaaaatgcaattgacagaatatcaaagaaaagaattacctccagagaactatcaattttttaatgatgttttaacatatgattcattttttgaatatgctttaaaaaacagtgaaaaggaacgacagaaattaagtaatgccttagcggatagtgaaaaggatcggcagaaattaagcaatgacttggaaaatagtggaaaggaacggcagaaattaagtgatgccttagtggatagtgaaaaggaacgagagaaattaagtgatgctctagagagtagtgaaaaggaacgagagaaattaagtgatgctctagagagtagtgaaattgaacggcagaaattaagtaatgctctagagagtagtgaaaaggaacgacaaaaactaagtaacgacctaaaaaacagcgaaaaagaacaggaacttattaaaaaagaatttacatcatccaatagttggaaagttacagaaccccttcgaaaaatcagaagaacaattaaaaaataa

SEQ ID NO: 1072 - DNA, 1599 bp, Methanobrevibacter ruminantium
  source 1..1599: mol_type = genomic DNA
atggataaaaatgagatatttactttatggataccagataatgacgacaataacctatcgcagttagcccacctatctttaaagtcttttttattgtgcgattatgatgtgattctttatacttatgaccatattggcaatgttcccaatggcgtttgtattagggatgcaaacgaaattttagataaatcaaaaatttttagatataaaggaggttttaaaacatattccggcttcgccaacctttttagatataaacgtctatatgaatatggaggcacttggctggatttggacctgcttttaattaaaaggctttccgatgaagatattataatcggttcccagacacaggaggacatctactccaatccaaataatgcactgtttagattccccccaaaagatcctcttataaagacaatactcgattattccgaaaaaagaggttcagatattaatcatgcagaaacaggaactttacttcttaaaaaactattggctagtgaatttccagaatataaccaatatctaaaacatttcaattattcaaatatcgtgaactggaacgatgttggggattatttagaatcaccggaaatatttttaaagtgcttaaataccaatgaaatctacggatttcatttattcaataccttctttaaaaaatttgtagaatttccaaaagattcgtttttcaccactttaaaagacataattttaaattcatccacaagtgaagagtatgcatttaatctaatgaaatacaacatcactacccaaaaacaatatattggcataaatgaatgggatttatcttatctaaatattttcaaagatgcgttttcaaaaaatgaattcaaatacacaattctaattgattcacagaatcttaaaaaaatggagatttacaacatcatccgcgccatcttcagttcatatggacttgagtctgaaaaagacattcaaatcatcatatgtggaaaaagcgacatcggccatgataaaattaaatttaaagacaacgtaatatttttggcttcggactttcaagatatgaaatactatctgaatgattatatttttggagagcatattttccccattaataaaccagttatttttaaagaggaatttttcaaaaataacaatttcacttccgatgtcgaacatcatgttttaaataattccaattccattctgaatgttttaaatcgggaatcgtataaattatgtttattagctaatatagatgttttcaatttagatatggacgttttaaaaacattaaatatgagaataaaagaagttgacaattctttaatttatgattattcatttagggacgatgatgtcctaaaattaatgaaattagtggatcaatgcgattcaaaatcttttttaaacgttaaatctgagttatcaaacttaaatattaaatttttatcccaaaaaaccagttatcactatttcagtgcatataaaaatattttaaattcaaacagttatgatgaatttattttaaaagagcataatgacaaattacaatgtttaaatgcattttacctaaatagaattaatcctcgctatgactattga

SEQ ID NO: 1073 - DNA, 999 bp, Methanobrevibacter ruminantium
  source 1..999: mol_type = genomic DNA
ttgttggatgcagatgagttcataatttctgataacggtcaaaatcctcgcgaaatcattaaaaaaattaatgaaaattattattatttaattaagtggattacatatgttccaacaaataatgatgactataatataaaatttattccaaaaaggataactcatgtacgggatgaaagtttagagcaatattataaggttattgtacctaaaaaagttgtaaatgatttcaatgttcgtgttgaaatggggaatcataatttaaaattcgataatttcaatagaaatgaattagttaaaaaagatttaaatttaaagattgctcattttccacttagatctatagagcaatgcatatctaaagtttcaattgggtggcccaatataattgcaataaatttatataacttgtcttggggtttccattggaaaatgctttttgacaaaattaaagaagagaatgatatttcgcttgatgatttagaattttttgcaaaaaattatgccttggtatcgacatcagatgatattctaataaaaaatcaaccaatcaatctagatttttgcgataagatagaaataagatatgattttgaatataattaccttagaaatattttagaaaactatgcttattttgccgaagaaattgtttctttcaaacgaaaattaaaatctgttccaattttagatgaccgtttcattcttaaattggcctctgattatgacgtcattgaaaaatcaggattatttgatgtaaattggtattgtaaaagatatagtcctccacgcaatattcatcctataattcattatttgcttacatatagggaaaatatgaatgaccctgcgggatttttttcaacggaatattattttaaaacacatgttgatgttgcaaattctggaatgaatccattcgttcactatattaaatatggaaaaaaagaaaatagaaaaattgcttcctcaaaatctgagaattttggggttcagtaa

SEQ ID NO: 1074 - DNA, 1224 bp, Methanobrevibacter ruminantium
  source 1..1224: mol_type = genomic DNA
atgaaaattacagttgcgggagtgggatatgtagggctttctattgctattctgcttgcccagaaacatgatgtaaccgcaattacaactactgaatcaaaggcagaaaaacttaaccaattcataagtcccatcagagatgatgagattgagaggttttttaaggagactcgtgatggaaaaaggaaattaaaccttcacacaactactgataaagaatctgcatataaaaatgcggatcttgtcattatagcagcaccgacaaactatgatgatgtcaaccatttttttgacacatcagctgttgaagatgccatagaatggactctcaaggtcaatccagatgttttgatggtcattaagtcaacaatacctgtgggatatagcgagtctgttcgtgaaaagtatggtgtcaaaaacatcatattctctccggaattcctccgtgagtcaaaggcactttatgatatgctccatccaagcagaataattgtgggatgcgatgacgaccaaaaagaagatgcacaaatgtttgtagaccttcttttggaaggtgtgagattggaagaaaagagatctgattctccaaagcaggatattcctattctaatagcacccttcacagaggttgaagcaagcaagcttttccaaaacacctatcttgcattaagggtaagctacttcaatgaacttgacacctttgcccagaccaaaggtcttaacacaaatataatcattgactgtgtgtgcatggacccaagaatcggaggacactataacaatccatcattcggatacggaggttattgtcttcctaaggatacaaaacaattattagcaaattgcaaggatgttccacaggccctaattgaggcaatagtcaattcaaatgctgtgcgaaaggaattcatcgccgaccagattatttcaaataatccaaaaacagttggcatatataggcttattatgaaaagcaacagcgataacttccgcgcatccgccatacaggatgttataaaaatgataaaagcagaaggaattaaaataatcatctatgaacctatattggatgatggaagtgagttccttaaatcagaagtggtaaatgatttagatatctttaaaagagaaagcgatatcatccttgcaaacagatttgaccaagatattctcggtgatgttgcagataaagtatatacaagagatatcttcggaagagattga

SEQ ID NO: 1075 - DNA, 2682 bp, Methanobrevibacter ruminantium
  source 1..2682: mol_type = genomic DNA
atggagataagatataaaaatttattaaaagtttttactatttttcttgttttactcatcagttgcggatttgcctcagcagtcagtgatttagatgaaggtaattctgcaaatattgttgataatggtgatttatcattatctgacaatatgatgagtgaatctgcagataattgtaaaaatttggaaactattgaggagtctcatactttcagtgaaaaaaacactgttaaagacgtttcatatggactttcaacacctatagatggaaatacttttgaagatatccaaactgctattgataatgctgctgatggagatattattgaacttaatggtacttattttggaaacgggtctgatataaaaattacaaaagatttaacaatcagcggaaatcttgaaacaatattggatgctaaaaacaaatcaggtattttttatgttaactcaaataacgtaactttacaaaacttaaaattttataattcaatagttcctgaatatggaagtgcggttcattttttaagtaatggttctgtgattaattgtacttttataaataatactgctggtggagtttatggtactattgattacttttggtctactggaggtgtagtatatttggccaagggcaatggctctgtgattaattgtacttttataaataatactgctaatgcagatggcggtgcaatttattgtggagttgatggcgggtctgtgattaattgtacatttattaataatactgcaaaagagttagggggtgccatctatattggcggcggtcatgacggtggcgctcattattcaaatgtttatgattgctatgtagataattgcgtatttattaacaatactgctggtgaaggtgctgggatttattatggcggaggcggtttaatatttaattgtacttttattaataacactgctcgttttggagattcaattctagtaaataatatgtattatcctaacactgtgtctgatatgaaaactcttactattaaggaatgtgattttaagagtaataaagagggttggggatatgtagtagttaattataaagcatacaaaaacactatctgtggactttgtgaaattattgattcaaatttctctaatgaacaagcagaagattatataaatatttataatcaaggaaatatttatttgtctggaaacaagatttcatctaattacgctacaatatctaatgatttaatagcttatggtaataatgcaaatattacctcacaaacaagccttgtaattttggataatactactaaaagtgtagaaaaatattctccatttgatgtttatgcagttcttgtagatgatcaaggaaattatattcgtgatgaaaacattagtttatttattggttctaagaatgtaactggcgtatttgataatgtaaacttattcaaatatcatttaaatgatttaagttcattaaattatagaactcttgtttcaggcaattatgatggagcaaaagatttggttgttaaaacaggcgttttacagttagatgtagaggtcgatattgacttggattatgaggatgataatgttattataaaacttaaagattctgaaggaaatcctatttccggagagtctgtttcacttttaatagataataatactagctctgtgaaaactgactcaaatggtgaagctaaagttccagttaatgaaatatctatggtcaaggcaattttcactgatggttttggagttaatgtcagttcctatttagtggtaaaagcagttgaaaaggtaaaacttgttccaacttttgccaatgcaaaaatttcattagatgttgaagataattgcagtgctgttattgtcactttgaaagatttatccggcaaccctatcagttctgcaaaacttgatgcacttgttaatggtgctggcaaaactttaatcaccaacgcttcaggtcaggcaaaaattgatattgaaggtaacgctacagtggaagtgacttatattgatgcagagaatgctaatgcaacagtatcaagcagccttactgtaataaagaatgttgactcagttccggttattccaaataggacagccactaatatcatttgtaaagatatgaatacaactgcagtagccaaaccggatggaagaataggaaaatacttcgaggtcactttagttgatgtaaatggcaaggcattagctaataaatcagttaatataggattcaatggagcagtttataatcttacaacaaatgaaaccgggggcgcaaaacttcaaatcaaccttggatacgaaggcaaatacacctttgcaatagcattcctaggtgacgacaactatactggatcttttaaagtggcccttatttcagtaagtaaacacagtccaaaactttcagcacctgcaaaaacatataaggcaaatgcaaaaactaaaacaattaccgctacattcaaaacatcaaatggaaatgcaatcagcggcaagaaaataagtttcaacattaatggaaaaacttatagcggaactacaaactcaaaaggagtcgccagtgtgaagataagtttaaacaagaaaggaacttatagttgcactgccaaatatgcaggagatggaatgtataaagcaacaagcactaaattcaatgtaaaaatagtataa

SEQ ID NO: 1076 - DNA, 2274 bp, Methanobrevibacter ruminantium
  source 1..2274: mol_type = genomic DNA
atgaagataagatataaaaatttattaaaagtttttactatttttcttgttttactcatcagttgcggatttgcctcagcagtcagtgatttagatgaaggtaattctgcaaatattgttgataatggtgatttatcattatctgacaatatgatgagtgattctgcaaataattgtaaaaatttggaaactattgaggagtctcatacatttagtgagaaaagcactgttaaagacgtttcatatggactttcaacacctatagatggaaatacttttgaggatatccaaatagccattgatgatgctcaagatggggacacaatccaactaaacggcacttatcttggaaatggaagcccaataattttttcaaaaaacttaactattggaggtagcggcgaaacaattttggatgctaatggattatctggcattatcaattcgtcttctgaaaaaattgtcttgaaagatttaacatttgttaatgggtctggattcacagttgatttgagggagaataatggtgataatttaaaatattgctcaataattaattgttcctttgaaaagtgttatggggataaaaattctgccgttatctgtttaaatggatctggaataatcttagattgtgattttcactatactaattgcactataaatattatgggttctgaggatgtttccattttaaactcttcttttaattatactggcggatatgctatccattctaattcaagcaccattgttaaagcatgtgatttttatttcaatagtttctttgaaacatattatgagaatactaataaagtgtacaatggcaatattgttgacttatgtaagaattcatcaatcagtgattgtatgttcaaaggcacatattatgaaacaattattgattccctagttgattccaatacttatcaattcagcacactccatgtctgtgatgaagttgatgttataaattgtactttcattagatctataacagaattttctggttctgccatttaccattttggaaacggatctataatcaattgtacgttcattaacaattctgctggaggaagccatggaactccttcttacctttatacacaggatggcgttgtatatataggttctgatgattgtttagttcttaattgtacttttataaattgtcattccaatacattcggaggtgctttatatattaatgcaagaaattgctatgttataaattccactttcattaaaaatagtgcttatgaagggggtgcgatttatcttgctcaaggggattgttatgtaataaatcctgttttttctaataataaggccaatcattcactttataatgatattaacgatttaaatgctgtttcatatgaaaatgacacctctgatgataatcagactgaaaagattattaacccttcaattgaattagattatttggatgataatcttattataattttcaaggatattgaaggaaaagcaatttctggagagtctgtttcacttataataaataataagactatttctgtgataactgattcaaatggagaagctaaagttccacttaatgagacttctatggttaaggcattctatgtagatgccaatggtttgaatgttagctcttccatgatgattaaaatagtcgagaaaactaattatattcctataaaaagaaattcaagttttattgattgtaagaatatgactacctctgcaataactaacagtaaaattagggatggggaatatttcgttgtaagcctaaaggatgcaaatggaaagccattatcaaataagccaatccaaataggattcaatggaaaagcatatgacagaaccactaatgaaaacggctctgcaagacttcagataaaccttgcttatgttggcacttacacatttgcagtctgttttttaggtgatgattactacaatggatcatttgtagtggcaaaaattgatgtaaatgcacaaaaagccagcttaaatgcaccttccaaaacttataaggcatcaacaaagacaaaagcattaacagcaacattgaaagatgcaaaaggaagattggtcagcggaaagtcaataagcttcacaataaatggaaaaagctatgtcgcaaagaccaataccaatggagtagccacagtaaaggtaagtctaagcaaaaaaggaacttataatttcactgccaagttggacaatgataaaacattcaagacaactgcatcaagtggaaaattagtaataaaataa

SEQ ID NO: 1077 - DNA, 3858 bp, Methanobrevibacter ruminantium
  source 1..3858: mol_type = genomic DNA
atggcagcttacaatagcggagcatatatccaagagactctagactcactaatcaatcaaagccttgactttaaggaaaacatccaagttattatcgtaaatgatgcaagcagtgacaatacagagtctgtatgccaagagtacatcaaaaactatcctaataacatcatactaatcaacaacagaatcaactgcggccctgcccatacaagaaatgtgggcctccattatgcagaaggggagataatcaactttttagacagtgatgactacatatcaaagaagacctttgaacgtgtagattccttctttgaagactttgttcatgtggacatggcatcaatcccaatcaagtttgtagggtccaagcgtggagaccatccattaaactataaatataagggcacaggggtcataaatctcctaaataatcctgatgccatacagctatcctctgcatcagcattcttcagaagcgacattcttaaagctagccttttcaatcattccaggtctcgctacgatggatctgtctctgttgtttacaatgacaacagtcctgtttcagattcaattcctatgatattcaatgaaaacctatcagtctctgaagatgctcttctaatcaatcagatgctccttagaaaccctcttcttggaatactctcaaactgcacttatttttataggaagaaagcaactgataacacttccctaatctctgattccgccaatcacaggtcttactttacatccagagtaaataactatatgataaggcttattaacgattcccttgacctttatggaaaggttccagaattcattcaatatgtggtaatgtatgaccttcaatggatcatggagataaggcaggtggatcacctattggacctagaagaccttactcacctttatgacaagctaatctccattctattctatattggagacaaggtgatattcaatcaaaggtccatcccatctatcctaaagtcacatatccttcttctcaagtatttcggatggggatatcttgatgataagacatttaattttaaacagattgataaaaagtattatgatgagcatggtaacctcataccatatattgaaaaagaccaactatctttcattattcaaaagttggagttaaataaaatatatcttgacatagttgatattaaaaatattaagtctaaaattaatttaaataataacaataatggcactccagatgatgataaaaaggatgatggaaagaatagtcatgatttctatctttcttctcaagatgatgaagacagacaggagctatatctctctggaatgattacaagctttttcaacagcgacttcgacatctatgctatcgtaagcgaaaaggacaagagcagctcccatattcttgaaaaggaaatcaaggtcaaaaagataagctatcctcagcgggacaacctttcccttaacttcaactatggatataaccaatgctttgaggttaggatacccttgagcgaaaagacaagtagaatttccttccgcatgggctttaagagcctgaatgaggtctgcaattccctaggcattgagactctcagcgaggattcatttgactatataaatcatcatgaccttgcattttccggagaccttcttatagactataatcacacttcacgcctatctcaggtgtccaactataagatatccaaggattatcttatcctggacaacggaaatcatatgatagttagaaaaagaagcctcctaactactataaagtatgaattggtcacctttgcctctatccttggtgaacgagaggagggctggagaaccggaatccttcttagggctctttactttattctttatcctttctatcgcaataagcgcatctggatatttatggatcttccatatactgccgatgacaacggtcttcaattgttcaagtctgttcggaatatggacaagcttaagttggaggactataataagcttttggacttggatgaaagccttctttcacgtgagaggcatccatacaaatacgaattgtttgaaggcaaggacataggtttggtagggcttataaaaaacgtatttagttctataaagaatgtattctctagggattctgatgatgatgaaaatggaaaggtcaagttcatcaaggggggctctttaggtttggatgataagtatgatgagcttgaggataatggagattattcagattacttgaatgagcactttggatttgccgatgtgaatgaggactatttggacaaccaggacattcaagtggaaggctctagctttgaggatgacattgagcatagctccaagttcagaaggaatgtctatggaaaggccggatttgttaagtcattcgatgccaaagtggatgcaaagtataatgattctctgaatagccttgagaataggtttgataagagagtcagcaatataaagacaagaacaagaaatgcagatgtcagggagaaagttggcttgtctagagatagggatgacaatttctccaagggatttagcccgattgactttatttatggctttgacttgtctaagttcctaagcgaaaacagctttgtatatcttgtgaattatatattgtatcgcatctctaagctgcttttaagacctagaaagatcaagaggattgacaatagaaaaatcaagaagtactttactttggagcagtctacaagccattttaataatgttcgccatatggaaaaccagtatattgcaagttccaatagggataagcttcgtaaattgcttgcccgtgaaaagcagagcaatgagtataatgctcttaaaaagataggtcctgtacttgcctataagtcattgaagcataggatctatgcattatatgctgaggtgattgtctcatctcatcctgataacaatcttatctatccattctatggtaatttcccgcatgtggcgggccttgttaaggctaagactgtgttccttcagcatggagttacaaaggatgatgtttcattctggctgaatcgctttgacaagaaccttgacatgatcgttactgtatctgatttggaaagggattcattcttcccacgttttgatggtgatggtgagtatattagttcttattatggctatgataaagagactgtccaagtacttggatttcctagattcgactatcttgagagtttagaggataaaaaagagatagtgatcatgccaacttggagaaggcagttgcataaccttaaaaaggaagagtttgtaaacaccaatttctttaggacattcaatgcccttataaatgataaggtattgttggattatttggattctcatggatataagcttgtatttaagccacatcctaacttaaataagtatattggtctttttgataaggattcaagggtcgaatttgacttgaatgacttgaattttgctgaaaacagtaaggatgggactgccaaatatggatctcgaagatatgcagatatattcaatcattcctctttgattgttacagacttttcttccgtttcctttgacttcgcctatcttaagaagcctatcatttattatcattatgataatgactatcactttgacagcgagaatggctactttaattatgagtctatgggctttggtccagtcataaaaagtcataaggagttggttatgagcattattggctctattgagtctggatgcacaatggatgagctttataagggtcgtgttgataagttctttaagtatcatgatagggacaattcaagacgtgtttataaggccatattggagatggataagtattattag

SEQ ID NO: 1078 - DNA, 1017 bp, Methanobrevibacter ruminantium
  source 1..1017: mol_type = genomic DNA
ttgcgttatatcgcagatgagcttaaaggtcgcaagacttcagatggaaagccctatgaatttgaattcattccaaaggatgagttttcattgtctaatatgaagaaattagccacctccaagtacatttttctaactgacaacttctttgcacttgccttcatgagattcaataagaagacaaagctcattcagctatggcatggaactggaatattcaagaaattcggctatgaccttcttgaggatgaacagaagaagaccatgcttaagttttcaaacaagatcaccaatcttatggtcagctcacacaatgtgattgacatttatgcccgcaattttgcaatagataagtctaaggttcttcctttagggattcctcgaaatgactattactctccagagcatctggatgaggactatgtaagacaattgaggggcgagtttgaacagaggtatcctaatcttaggggtaaaaagatagtcctatatgctcccacatttagggaagaccctaaatacaatgctgtgtttaattattttgacattgaaaagttcattgatgagctcggggatgattatatattatgcatcaagcttcatccaaactacaataagtttgcagatagtgctaataggattgaccttgatgagctcactgacacttataacatagttaactttacagaatataaggatgagcagaagcttttcttaatctctaacattcttattacagactattcctctgttatggttgagtatactcttcttaataggccaatcattctctttgcatatgacttggacaattatcttgaaaatgagagaggattctatttcgattacagaaaggaagttccgggcagaattgtaaaggatacagatgagttggttagggtaatcagagagaaggattttaatctatctaacttgaaggagtttgcagagtttcagtttgattattttgatgcatatagcagcaaacgtattttggattatgttttggaggaataa

SEQ ID NO: 1079 - DNA, 285 bp, Methanobrevibacter ruminantium
  source 1..285: mol_type = genomic DNA
atggctggaactacaaaccttgtggatgcaatgcttgttcttgcattgggatttctcatctttgcagttatcggctggaacttacaaagcgttatattcagtgatatggaccctcaggagcgacaggccactatggagtcaattaatcaaatcactaatgtaactcaaggagaacagttaaacagtactccagacacatcaaaccagtctggagaaggttatgtagaacaaggtaaagtttataaggattcgaaaacgggtaatctgattatggttgaaacttaa

SEQ ID NO: 1080 - DNA, 732 bp, Methanobrevibacter ruminantium
  source 1..732: mol_type = genomic DNA
atggaactgatattcagcgtatttgcagtaataagcttggcagctatcctgcttctagggatagagctaggattattatcaaaattctttaatctttcattaaagaagcatttgattcttgtacttgcttattctatcataatatttgcagtcattgtgattctctctccatcttatgaggcagtccttaattcaacattctatagcttctattattatataataatgggctttgtatgtcttgcccttgggcttttgacccttttctattggagcaagatggagtggtatcctcctgcattgaaatgtctgctgtattttgattttgttcctatttcacttagtcttatgctgatttcaacagctctcatggctccaagctttgcatttaaggtacagaacttctctcttaatcttactatggtcaattcaggactaattctggtggttctaatggctatattgatggtgatattctatctattttccgattttgttgaggattatagagtgactcattatgctattataattggaagcttgcttcttatatttgcattggcatactttgtgctgggattcattattccaaatatggctccagtatttgcaaatccttcaacagagttgactttaatgcctattgagtcaatagttgttatggttgttcttatagcattattgcttggattgggggccttatttagaaagagaactaatagattagaatga

SEQ ID NO: 1081 - DNA, 642 bp, Methanobrevibacter ruminantium
  source 1..642: mol_type = genomic DNA
atgacaattcctggtggtgacttcttaaccactggacttaatttaatttcacaaagtcttttgataccggtagttatcatactattggtttttgttgtagttgtagtgatttcacttggagggcttatctatgaatacacttcaaggacaaaggtatctgtagatgacgtgtccaatctgattctggagatttccgattcagggtctgttgattccatgaagtctgcaatagcaaactctccgattcctaagcttcaaaaggacattctgcttaagatagcaagcacaggaaatatgagccctaatacaagagaggcatttgcccgtaagctcatcgagaatgaagaggggctaactgacaagtcccttgagataactgacataattacacgtatcggccctacacttggtttgatgggtactcttatcccattaggtacaggtcttgcagcacttggctctggagacgtcaatactttgtccgagtccttgattgttgcatttgatacaactgtagtgggtatcggttccggtgctttggcttatgttatttcaaagcttagaaataggtggtatgaggaatatctatctaatttagatgttttatctgatgctgtattggattttatggctaaacattag

SEQ ID NO: 1082 - DNA, 882 bp, Methanobrevibacter ruminantium
  source 1..882: mol_type = genomic DNA
atgaatcaaaaactatcaaattacttcaatatgggattgtcactatacctattgcttgatttaatccttataacattcacattagtttttaagatagaaaataatttatattatataataatagccatagacaccatattatgtgttattttaatatatgagttttataatagattcaaaaccgctgaaaataagattcacttcagcatcagaaactctacagaaatattagctggaatccctattgacctgattttccttccatttgctcctaatcttactgtttttttaaccattttcaatcttctcaagtttctaaagataatcggactctttttggaattctttgaaacaattgacgtattccttaaaaagacccatcttgatgagattttaggattggccattcttgtaatccttgtatcaacccttggaatatacctctttgatccaagcataaacagcatattcgacagcctatggtttgtcctatccacaatcacaactgtaggatatggagacgtgcttccaaattcatatattggaaaagtaatagggattttaatattgatattcggagtgctaatcttttcagcaataacaggagcaatgacctcctactttgcaagaaaggtattcgccacaaaggactttaacattacagaaaatgacgacaatatccggcttctaaaggaagacttaagcttcaacaagaaaaatctaaacaatgcaaatgaaaaaatagataaaatcaataatgatgttgaaaagcttaaaagagaattgaatgaaatgaaagaggaattaagagaatctagacaattaaataaggaacttaaagaagagattgttattttaaatgagaatttgaaaaataaatga

SEQ ID NO: 1083 - DNA, 840 bp, Methanobrevibacter ruminantium
  source 1..840: mol_type = genomic DNA
atgcaacgttcattatttgataaagttaaaacatccttatggatgcttccatccttttttggattggtaaacggcttgggatttatctatctcggacgaaagaattccaacatcaaatggaccattgaaggaattgtctatgaaattccttggttaatcgcaatcctaaacatctttaacctttcagttgcaatcactgcattttctttaggatcatttatggttcttataagcattgtccgctctgtaatggttaattatgaatatcagagattgcttgatgaggaatatgtggttcgtccttctgttgaaagcggttctcatggtttggataagcaaatcaagaatggtcaattcaacgaaaaggaagcttctcctaaggaagagaaagttaaatataatccttatgacttaagcggcatcgacaagaattatgatgggagaatcaagttcgacaagtataaggctgaaatcaaggaaatggaaaaggaattcaatgagaagaatgataatgtaaaggaattggttgaaaaaagattctcccaatctggaatcacttatgaccgattcatgtttatcataaaggattcagaggaccttttcaattcccaggcagccaatgctttggatatgattgatcttgctccagaatatacagagacaatcgatgcagagataagaaagaaaatggaaaccttaaggacaatcattgagaaaaatgatgaattaagggatgagttgatcattaatatgacaactgagactggttcagagatggaaatcaagaatctctttgaggatatgggacatctgaccagttccattaagcattatgaataa

SEQ ID NO: 1084 - DNA, 360 bp, Methanobrevibacter ruminantium
  source 1..360: mol_type = genomic DNA
atgactatgaaaacagggagcgaattaaaattcaatgacgattatgaatatatgacctttgatcttgaccaggaatttctattgggggaattaggccaagatgaaataagggacaagatcataaccgctcaagagatattggataatcatttggccaatccttatgaggcaggccaagagattgaaattgagaatccctttgaaaagcctattctaagaaagtacatcaaggtaaatgaggtgactgaggacatgatagatataatatattatcaggtccgaaatcattatgaagtttataaatttgttactttgactgacccggctcataggggacgtattttaattcctaaagactga

SEQ ID NO: 1085 - DNA, 474 bp, Methanobrevibacter ruminantium
  source 1..474: mol_type = genomic DNA
atgcaatttgatgaattgatggaaaaaggagatcaagctagaaaggataggaattatgaagaggctttggattggtatcaaaaagcattgaaagaagataaaagacgtagcgaagcttggaatatgaaagcaagtacattaggtctcttaggtaggcctgatgaggctatcgaagcttttgacaaatccttggagcttgactttaataacgaacagacctggtttttaaaaggaatgaccttatttgctgtagacaggttcaatgaggctgattcctgctttgataaggctgtaaattcagacccacacaatccggtttattggaagtataagggaatggtattaagccagttaggtcacaatcatgacgccttggaatgtcttgacaatgcattggaattgaatcctgatgatgaggctattcttgtattcaggcatactgttgttgaagccatagaaaaagaagataattaa

SEQ ID NO: 1086 - DNA, 1956 bp, Methanobrevibacter ruminantium
  source 1..1956: mol_type = genomic DNA
ttgaaagaattcaaactgaaatcaccatataagcctcttggagaccagccacaagctatcgaatcattatcaaacggaatcaaagagggattccacgaacagaccttgctaggagtgacaggctccggcaaaacttataccatggcaaacattatacaaaacgtacagaagccaactcttatcatatcacataacaagacccttgctgcacagctttatgaagaattcaaggtctttttcccagataatgcagttgaatactttgtcagctactacgactattaccagcctgaggcatatgtccctagaacagacactttcatcgacaaggaagcctcaataaacgaggacatagacataatgaggcattctgccacacagtctctcctatctcgtgacgatgtcatcgtagtaagcagcgtatcctgcatctacggaataggttcccctgaagactatggggagtttgcattctccataaatgtcggagacatctacgaccgtggagatatacttagaaagctgatctttatgcaatatgaaagaaatgacattgcatttgaaagaggtcagtttagggtaagaggagatgttatcgaaataaaccctgttcatggaactcccccaataagaatcgagctcttcggagatgaaatagatgcaataagcctcataaacccagtgactgggatgagagaggaaagcataaataggtatgtaatatttccagcaaagcactttgtagtaggtgcagacagaatggatcaagcccttaaggacatagaagcagagcttcaatcaaggctcaatgagctgaaccttgagggcaagtatcttgaagctcaaaggcttgagcaaaggacaagattcgatttagagatgcttcgggagatgggatactgtccaggaatcgaaaactattccatgcacctttcagggagaaactggggagacatgccttattcccttcttaaatacttcccagatgactatcttacaataatagacgagtcccacgtaaccgttccccagattaggggaatgtacaatggagacagagcaagaaaggaaacacttgtaaactatggattccgccttccatcagcaaaggaaaacaggccacttagatttgatgagtttgaagcaagccaaaaccaggtattatatgtttcagcaacaccagggccttatgagctatcaagaagcaagaatgtggtagaacagatcatccgtccaacagggcttgttgaccctaaaataacaataagaccagttaagggacaggttgaagacctcctaggagaagtaaggcgaaaggtggagcatgaccaaagaatacttgtaaccactttgacaaaaagaatggccgaagacctgaccgactattatgcaaagattggaatcaaggtaagataccttcattcagagattgataccctggaaagggttgaaataatagacgacctaagaaggggagagtttgatgtccttgtaggagtaaacctcctaagggaaggacttgacctgccagaggtaggccttgtagcgattctggatgcagataaggaaggatttttacgctctgagacatcccttattcagacaataggaagggctgcaagaaacgtagacggagaggtattgatgtatgttgatgagatgactgattcagtcaggaatgcagtggacattacaaacaagagaagaaagctgcagatggcatacaatgagaagtataatatcactccaaagaccacacaaagaacccttaaggagaagaagcttgccgacagagccccatcaagagatgacttaagaggcatgcctaaagatgaacttaagctattgattaaggaccttgaagcagaaatgagagaggctgctaataatcttgagttcgagaaggccgccagcttgagagatcagattgttgccttaaagagcattaaaaaatag

SEQ ID NO: 1087 - DNA, 1917 bp, Methanobrevibacter ruminantium
  source 1..1917: mol_type = genomic DNA
atgaaatttaagaattcacatatcttactcgtttcattaatatccattttcctattgttgagcataagcgcagcttctgcagctgactctgatattgcagcggatgacagctcagtggatattgttgaaatagaagatataaatataaaagaaagccactatctctgtgatgatgcctctactggctcagaagatctaagtggtgatgaaaatacaagtgcatcaggcactgatgacgctacaggtggaaatgacactgatgctacaggtggagatgacactggaaatgctacaagtgtaaatggcactgaaaatgttactgatagcaatggtacaaatgccactaatggaacaaatgcaaccaataataccaagtatgacggtcctgtaaccaatgcaaccatcattcctgtaagcacttctgctgattatcaatatggaaacttcacattcaaggtagtggacaatgcaaccggagagcctttggcaaatcaaaagatatctgtaagcggagtatatttctttacatttaataacggatcatccatatccactacaaaggtattcactaccaacagcaacggtttgcttgtcattgcaaacaagaacttaaataagaaccttgacacacttggtatggtatataatttcaccgctcttgatgtgggcaaatacgaccttaccttcagcggaaatgacagcttaaagattgttgtcaacaataccctcccaatcactgtaaataaggtcaatgcagaaattaaggcaagcaacttcaaagatgaagttggaacaagtaaaaaatatacatttaagcttgtaaataagaatacaggtactgttatcaaattagccagcctcaagttccaaatcaagttaaacagttcaggatatacaacctataattcaacaaccaacctttcaggtcaagtgggatataacctgaaccttttggccggcacatatcctgttagaatcgtcaataatgattcaaatctaaaggctagcactgtaagccgcaatgttacattgactaaaaaggtaggtgtactctctgcaagcaacagaactatcctttacaactcagcacctactgcaataatcaaattgactgataagaaaacaggcaaggcagttgcaggagcagtcctcaaggtcagagtatacacaacaagcaaaaaatatagcgatttggcattttacactgacaataaaggacaagtcagcttcaaggcagcattaagcttaggcaagcacaagatgattatcagcaccttggacaataactacactgcaagcagcattaccagatatgtaaccttaaagaaaaccactggtaagataagcgctcctaaaatcagcgctacctataagtctggcaaattgtatacaattaccttaaagaatgctaaaaacggcaatgcaatgtatggatccacattgaacatcaggatctttgttacaagcaaaagctattacaaatacactggcatgactgacggaaacggtaaggtcaatatcaacaccagttccctaaagccaggtacttacaaggtttctgtatctagcggagattcaggattcactgcaaaggcagctacaggtcaaataaaaatcactaagatacctcttaagttgtccccaactgcatataaggaaaaatacaattccggcaaaaccttcaagatcaaggtaactaataagaataccaataagatcatttcaggcataaaggtaactgtaaaggtttacacttcagccaagaaatataagacatacactgtaaagaccactaataagggtattgcttatttgaaggttactcaaaagccaggaacttataagactgtagtaagtctttctaacgcttattactcagcaagtgcagtaacttccaagataactgtaacaaaatag

SEQ ID NO: 1088 - DNA, 693 bp, Methanobrevibacter ruminantium
  source 1..693: mol_type = genomic DNA
gtgtatagcgaaaccaaaatagcaattccaatatttcaaaagaaaaaggaagatgtgatatctgttgctcaagactgcatcataaaaggtgcagatattcttgaactacgaatagacggcatggaaaatcctaatccaaagctagtaagggagattattgaagagataaactttccaataattgcaacaaacagaacaacaagggaaggaggattcttcaagggcaccgataaggacaggatagccatattaagagaatgtgcagatgtggcagactttgttgacgttgaacttcagacaaaccgaaagcttattgaatccattacagaaactggagtaaaaacaatcatttcctatcataactttaagcagacccctgatttggactttttgattgacattgtaaatcaggaaaaagagcttggagacattgcaaagatagccgttatgccaaataacttagaagacactcttactgttctagcgattctatctcactttgatgacactgtagcgatttcaatgggagaattaggaagttatacaagggttattgcatctaaattcaatgcccctttcacatttgctgtggctaatgacactacagcccctggacagatagacattgatacaatgagggtcttgctaaatagtgacttgatcaatactgatgaatttgagaacaatgaataa

SEQ ID NO: 1089 - DNA, 726 bp, Methanobrevibacter ruminantium
  source 1..726: mol_type = genomic DNA
atgaaagttgtagctattggtgcggatatttcaaacaatgatgtaagcgtttccaagtcattggttgaaaatatagagaaggacattcctaaactcattgatttaggagctaaaagggcagcattgacaaatgtcacaggagatgatgtggtaatctctgccttttgtgaagatgatcttttagaaactgtcaatcgtggaattgcagacatactaagggcaaatgcagagagcttaggtgaccttgctggagtttcagatgaccctagcaaggcaggagagggactctcatatgccgaggcaagcttgaacgatgacggctatcaggatgcaattatcatggcctttgacacctatggtggagaaggctttgtaaaggatgttgcaaactctgcaattgaggctgcaagtggcatgaagtctgtaatcgacgtttcagatagaataggctcaagaacagacattccaggtgttggctatgtgtctgaaaatgatacagatgatcctgttgtggttgtttcagtaaaagacctagaacagatagctgtggtggctggagccatgattggcgcagcacttggatgcaagaacacctatcttgtaaagcggcataccccatgcaatgtgcttcctggaagtgtgcttgtatctgtaactgcattcatgaatggaaatatgattgacctatctataccattcgagaacaaaacaagaattttaggctaa

SEQ ID NO: 1090 - DNA, 870 bp, Methanobrevibacter ruminantium
  source 1..870: mol_type = genomic DNA
atgataattttagatgaaaatgtaaaatgtttagttcaaggaattactggaaaacaaggttcattccacactgaacagatgttaaaatacaatacaaaaatcgtagcaggagtaactccaggtaaaggcggacaagagattctaggagttcctgtttttgattccattgaggaagctaaggaaaatactgatgtgaatgcttcaattatctttgtgccagcgccatttgctaaggatgctgcctttgaatcaattgaccatttggatcttgtaattataattaccagagccacattccctatccatgacaccatggaaatcatggcttatgcaaaggctaagggagtgactgtcataggacctaacactccaggagtaatctctcctaaagtgggcaagcttggaatcatgccaacccatattttctcagaaggaactgttggtgtcatctctagaagcggtaccttgacctatgagattgcaagtcaattgagccgtgcagaaatcggacagagcacttgtgtaggaattggcggagaccctgttatcggtaccccttacattgaagtcttgcagatgtttgaagacgatcctgaaaccactgaaatagtcttaatcggtgagatcggaggatctgctgaagaggatgctgcagcatacattaaggaaaacattacaaagcctgtcgttgcatacattgcaggtatctctgcacctcctggaaagaggatgggtcacgcaggagctatcattgcaggtaattctggaactgctaaaagtaaaatggaagctttggaatctgctggtgtaaaggttgctcgcaagccttctgaaatcgtagaatacattaaggaaattcgtggagaataa

SEQ ID NO: 1091 - DNA, 1203 bp, Methanobrevibacter ruminantium
  source 1..1203: mol_type = genomic DNA
atggacaaggaagaaatcattaataaactaatggctggtgaaatgaagctttatcagattgataaattcacagaaaatgctacagaggctttggatattagaagggaatttatagaaagacattccaattgtgagcttaatcagatagccaattacactttggatatggaaaaggcattttccaaaaacattgaaaaccctataggaaccgttcaagtacctattggagttgtcggcccattaaaaatcaatggggaacatgcagatgatgaattctttgttcctttagccacatctgaaggcgctttgcttgcttcagtcaataggggctgctctgctattacagcatctggaggagtcaatgcaagagtgattggagataagatgactagggctcctgttataaagacagattctgttgtagaggccgttaaggtaaaatcatggtttgagactaagtttgatgagctaaaatccattgcagagtccaccacaagccatggaaagctggtgaagatagatcctatcataatcgttggaaactatgtctatcctagattcgtatactctacaggagacagcatgggaatgaatatggttacaatagctacagaaaaggttctctctaagttatatgatgatttgggagttcatgcgattgcattaagcggaaatctttgtgtggataagaagcctgctgcaatcaaccttgttgaaggaaggggaaagactgtagttgcagacatattgattccagaggaaatagtaaaatccaagcttaagacaactgcaaaggcaatggaagaggtaaacattgcaaagaacctgattggatctgctgcagcaggaagcatggctttcaatgcacactttgctaatatgattggtgcaatattcttggcaactggtcaggatgaggcccatgttgtggaaggttcccttggaataacaacagcagaggacagggatggagacttgtattttgctgtaagcatgccggacttacctattgcaacaattggcggtggaacaaggcttgaaacagcaagcgaaggattaagcattattgattgtttaggttcaggcaaggtcaataagtttgcagagattgttatttcaactgttcttgcaggtgaattatctttagttggagctttagcagctggacatttggctaaagcacatcaagaactaggcagatag

SEQ ID NO: 1092 - DNA, 405 bp, Methanobrevibacter ruminantium
  source 1..405: mol_type = genomic DNA
atgtctgataaggagtatattgattttaaaaaggaatttaaagactttgctcaagatttggaaaatagcaagcctatttttgatgatgaagatttgtcctttgatgattttgataatctcataggcaatattggagaaaataatctttcagatgattctattgacagatatggttcaataaatgatgatttagataaattggatagtctttttggaagcgattgtccggaaatcactcttgaaacagagaacatgctaatgaatttaagcattaaaaaggattattcaaagattaaagacttcaatttaagaaagaaagagttttttaaggatttaaaggatttcattgatgaatttgaatcaactgaagaatcagatgaattgatgaagttttatgatgattag

SEQ ID NO: 1093 - DNA, 156 bp, Methanobrevibacter ruminantium
  source 1..156: mol_type = genomic DNA
atgtgtagttcaggaggcccaatggctgacctttcaatgaaaaaattgaaaacaaaaaaatacaaatgtcttgattgtggaaatgaatttaaaggattaggcagaaaggtaatctgtccttcatgccaaagcgacaatgttgaattaagagaatag

SEQ ID NO: 1094 - DNA, 405 bp, Methanobrevibacter ruminantium
  source 1..405: mol_type = genomic DNA
atggtaggaatagctaaggctggagaggataagatgctttttataggaactccagacaatgatgagattgttcagtatcttgaaaaggatgatcttattgcagtttcctcattcaatcttggcaagaagtatgaaaaggggataaggtctctcatttatcttacccgcgatatcgaatctccgataatcgttcttccaaagaaccatcccgcttcaaagcgacttaagatggtcttatcagttggtgaaaacgttaggttggattgtggaataattcctggaacccatccagagcaggatatattatgctcctgtgacagtttatctggattgaatattgtgaaatccgccgatggtgttataatagagggaaatgttcctgattataagattgagcctttttga

SEQ ID NO: 1095 - DNA, 714 bp, Methanobrevibacter ruminantium
  source 1..714: mol_type = genomic DNA
atgttattgcatgaacaggcattccagttgataggtgaatctatagttgttttagtggttcttataatcatcatactaattatagccttaatacttggaatcatactccttagaagaaacaaattggtatttccttcactcattatctttgttgtgaatgtattctattcccctttgaagagtttggctaatttcttaagattggatgacgctttggttgaccatattggaatagaggtgaggaataaggtaaataagccaaagtttgaccagattcctcctgaagagaagataatcgttcttccacattgtcttaggtctagagactgtgaggcaagccttaaggaaagcggaatcaaatgcacattctgtggaaagtgtgcaataggaactatcaagtcaaaggcagagcctatgggatataaggtgtttattgtacctggatccagctttgtaaagaagataatagagcaaaacaagttcaagtcagttgtaggggttgcctgccatgtagatttgaaccagaccatgatggcactttcagacttctatcctcagggagttcttttatccacttctggctgttttgagacaagagtggatgtctctaaggtcttaagcacaattgggtattatgagtataaggaaaaaaataaatccattgatgatgaaaaggacgactctgaagacataggtaggataaaacctagttaa

SEQ ID NO: 1096 - DNA, 390 bp, Methanobrevibacter ruminantium
  source 1..390: mol_type = genomic DNA
atggaagaaaacgaaatttctcctttctttacaattaaaaagataagagaaggagactccattcaattggatcaaaaatacattaaggtcagatcaaatacagacaaggtaattgcaattcactataaggcacctatagaaagaacaattgaacttgaaatgttctttgaagattataatcctattgaaaggttaaattacaatattggcgataccggttgggtaggtgcaaatttcagaggtctcatcgatggaaaggacaagtccttgccagttgattatgattataagatattgctattggaagaatataaatgtttaagcaaggtagagcttaaacatgtaaaaagaagttctaaatttaggcctaactatactatagctaaataa

SEQ ID NO: 1097 - DNA, 672 bp, Methanobrevibacter ruminantium
  source 1..672: mol_type = genomic DNA
atgaattctaaaaagatagcaattgttcttggaataatattgctttcatttgcaattgtaggctctgcatcagcttttaacttatttggcggacctactactgactttgacaataaattcatgtcaggtacctttacaggggatgtaagcagaaacaatataagcaccaatgactccctatccgactgggtggactcctatgaggataaggaaagaaatatcacttataatatgtcttgcattaagggaggctcattcttaactgacctatatgaattgcagggtatggcagctcctgaagtgaggaatttcaatggtgaagattggaaggtctattattctcaagcagttcctacaacagatgaaaacaagacagctaatgaatccagtgtaataaatgtctacatctgtgaggcagatgtggataatgtgacctatatgattaatatcattgcatatgacaatgaatcaattgactgtgatggcagtctctactgcggattctttaaggatgacattcagcctttattagagagcattactcttaaggatgctaagaaggctccgcaaatatatgatctcttgaatatgactaaagatgattttaaacaattgcaggattatatagaacaggtcaaaacaggaaatattcctgaaactgctgaaggatag

SEQ ID NO: 1098 - DNA, 519 bp, Methanobrevibacter ruminantium
  source 1..519: mol_type = genomic DNA
atgaaagtcactgtttttcatgcaaacgaatgcgataagaagaaatgcacagcctttaagatggaaaagcaaggaaagtgcagaatagtctataagattcatcagattcctcgtggtgcagttgtattgaatccatttagcgaaaaagcagtatcctttgaagatagggggcttgtagaggataagggagttgtaggacttgactgctcctggaataaggtgtcaaagtctgctagtttcttctccttgtcaaagtatcacagatcccttcctttccttattgctgcaaatccggttaatttcggcaagccatgcatattgtcaacaaatgaggcgatagctgccacattctatataactggattcaaggaagaggctaatcatattatggatggatttaaatggggccattcatttattgaactaaattatgacttgcttgaggcttatagctctgtaaaaacaagtgctgaagttgtggagatacagaatgagttcttggctgctcatgagaaatga

SEQ ID NO: 1099 - DNA, 162 bp, Methanobrevibacter ruminantium
  source 1..162: mol_type = genomic DNA
atggaggatgttgaaatggcaagatttgaagaagcagaaaacagaatgttcaatgtaaaaatctgtttaaaatgtaacgcacgtaatcctgctggagctaccacctgtagaaaatgtggttacaaaggtttaagattcaaagctaaagaacctagaggatag

SEQ ID NO: 1100 - DNA, 189 bp, Methanobrevibacter ruminantium
  source 1..189: mol_type = genomic DNA
atgctatttttattgtttaactacgtttttttatatgctattcttataattgctaatctctctttttctattgatttatccactaactctttttctatttataatcactatcttatttttttcaatatcccattattccttttaaaaaaaatcaccctgttaaaggtttttttaaatattttaaaatag

SEQ ID NO: 1101 - DNA, 750 bp, Methanobrevibacter ruminantium
  source 1..750: mol_type = genomic DNA
atggaaaatgttgagcaacatcttaaagaaattttaaagactcgcaaaattcatttaactttaatagatcctgatgaacaaagcccagatgaagctgtcaatatagctaaagaggctattgcaggaggcagtgacggcattatggtagggggctccactgtagacactgctgctcttgacggaacctgtaaagccttatctgaaaatatagacaatccgattatactcttccctggaaacatcaatggagcaagcaagtatgcagatgcaatattcttcatgagctatctcaattcaaacaatccttactggattattggagctcaagcattagctgcacctgcagtgaataagacaggaatagaaaagattccaatgggatatgttgttgcagagcctggcggaactgtgggctgggttggagatgcaaagcttattccaagaaacaagccaaagattccagctatctatgctatggcagctgaaaacttaggaatgaggtttttctatattgaagcaggatctggtgcagatcagcctattcctcctgaaatggttgcatatacaaaaagggcaaccagcgacatagttcttgttgtgggagggggaatccgtgacggcatagcagcttatacagcagctaaggccggtgcagacattgttgttacaggaactgttgtagaagaaacttcagatgttaaaggtaaaatccaagaaatagtcgcaggagttcgcaaagcttctgaatag

SEQ ID NO: 1102 - DNA, 1086 bp, Methanobrevibacter ruminantium
  source 1..1086: mol_type = genomic DNA
atgttaaattcattatatactgaagccatcaataagaaaggccaactgaaagagcctcttgaagagcttaatgaaagcaagatagatttggagtcaaaatggaatgatacgcctatcatcccctctaaatcaaatcatataatagctgcaggtgacggaagctataacaagaagaaatacctgaacttcaatttctatgcagttgcagcggaatcattgatttataatcccactaaggaggagaataagctatcctctatagagtctgttgaattggacataatgccacaccaatccttcttggaagaccgattgagaaacatgatgagcatatttgaaatcaagacagcaatcaagacctttagggaatatgaaatcgattattatttagatgacggctcaatattgggagatcttattaggccaattcctcttgagaccatctcctttgaaaagaaacaggaaattattgattctgcctatctaaagattaaaaaaggctatgaaaatatggactctgacatatcatcattgaattataaggaagagtttaaggaattctttgatgatgaggagattgatgagcatgacttaattaggcttttagagaacttagagaacttgatagcattgaaatatcttttggaaaacagaaagaagattattgcaatatcaaagacctcatcaagcaatgagcttttctatgctaacattccagatatggcaattctagaccgattcacaagaaaggaaggcttttctaaagcctattataggaaggtttcatataaagtcaagcatgactttccaatagagaatgagtttttccgcaatcttggctttacaacagtctttgcacgtctaaaggactataagaacatcataaagatagagtttccttattatattgatgatgatgaggaaataaagaatatcctctcaatattaaaggataattccacagaaggctatccatatcttctaaagaaggcacataaggatgttgtaatttcaaatcagaatatgacaagtctgtctaatgtaataggatttttagacaagtctggaagggaaatgttggattag

SEQ ID NO: 1103 - DNA, 1509 bp, Methanobrevibacter ruminantium
  source 1..1509: mol_type = genomic DNA
atgattggaagatgcataggggaaacatccctaattgaactgagctttatttctaaagagatgccccaagtcggcgagtatgtcagcatagagtatgatggaaaggtcattttgggaatgatcgaatcaatggttagaggcagcgtttcattgaatgatgacatatacgaccctgacaccatagaaaagatacgtgagatagagggagatgacttttacataaagggaaaggtgacaatccttggagatataaatgacaatcttaggcttccacggactccagcacctcctggaactcctatctatagggcttcatcagagattctaaaggacatttttcaaatggacaattcacttaagctaggtcacctgataagtaatgaagaagttgaaattggagttaacataaatagtatggtttcccgacacttggcaattcttgcaatgaccggagcaggtaagtccaatacagtttctgtaatcattgacggccttcttgagtataatggctgcatgcttatctttgacatgcattcagagtatgtggatgcagagtttacaaatggcgaggttaatgtaatagatccaatcatcaatcctcagcatatggaattcaacgaaataaagaaattggcaaacattccttcaaatgctccccttcaggagagatacttcagaagggcctttaatgaagctagaaagaaagttcaggaaggtgttgccaaaccaacagatttcattgaaattctagaggatgtccttgtgagcatgcatgaaagcgagcagtatgaatctgccgataagaaaaagatattggatgtaatgaataaaattgaagacttgaaggtaaagtatgataaattattaaacaccaatgtgggagatatcctaaagcaattgaagcctggaatggcaaatgtcttggatttaggacaagtagatgagaatactgctgaagtattggttgcacatgtcttaagaaggtcccttagaagcagaaaggcttatgtaaaaaataaggataagtctgccttatcctatccaatattcttcatagttgaagaggcccatattttggctcctcaaaacaggaatccaaattccaaatattggattaccagaatagctagagaagggcgtaaattcggtcttggactttgtttggtaagccaatctcctaaatctgttgatgcagagacattatcacaagcaaataatatgataatcctcagattggttgagccaaaggatcaaaggcatgttcagacagctagtgaaaacctcagtgaggaccttgttcagcagctgccttccttaaacattggggaagctttggttttaggtcttatgacaaaggttccaacccttgttaagataaatgagtttaaaggaagacaaagaggaggagacttggatatcattgagcaatgggcttctcaaaagaaagagaaaaaggaaactttgcaaatagaattaaccagattcaatgacttaagcggaggatattag

SEQ ID NO: 1104 - DNA, 1392 bp, Methanobrevibacter ruminantium
  source 1..1392: mol_type = genomic DNA
atgcgttttgcacatatatcagacagtcatttaggctgtagacaattcggcctattggaacgtgaaaaggacttttatgaagtcttcaataggaccatagataagataatagaagaggatgtggattttgtaattcatagcggagacttatttgacagtaaccgtccatctacagaggcattgctcacttttcaacaagcattgttaagattaaacgaagcaaagatacctgtttatgcaattgctggaaatcatgattccatattaagaaaaggatctttgcctccacaagtcctattcaaggacattggacttaatataatcagtccggaacatcctgttcatcagttaggtgctgttttaatctgtggagttccatttgcaaccagttcacagaagaatgcattggttgagaattataatatattatcaaaagttgcagacaccgcagttaaatccatcttggtttcacaccaaggaattagcaaatggatgcctgaggatagctatgaaattgatttggatgatttgccaaagaattttgactactatgcaatgggtcaccttcataatttctatgtagaggactatggaaaaggcaaattggtttatccgggctctatggaaataaaccgtacaagcgaattgaatgataattttaaggaatttggaaagggtttctgtatagttgatttaagtgaggacattccaactgttgaaagggtcaccatcgatctcgcaaggaaattttacaatgaaattattgagtatgacaaattggatgaaaggctttctgtaattgaggaagaacttaaaacattggaagttaaaccaatagttgatataacagttcgtggcggtgattttgaaagcgctgatgtctatgaaaagattaatgaaaaaattggtaatgatgttttaagtttcagacctacattcaagccagataatgttttaataggagaaaatcaacttgatggggataaaacattggatcctaagacattattaaagcagacagttgataagaaatttgcccgagaggaagtcactaaattgtctgttgatttattggatactttatctgaaaaaaggatgggggaagccaaatatatctctgatgaattttatgatgaatattattatcataaggatgaaaatgaagtcagttccgaatcagagtatggcggttctgaattaaatgttaatgaacataatgatgatggtacttctcacttagagtcttctgcttatgattcagtttcagacaattcatccagtttagatgactatttaaataagaacttagattctaaagaagaagtatccgataaggaaaaatcaaaggaaaatcaagtcaagaccaaagaagtaagtcttgataacttttaa

SEQ ID NO: 1105 - DNA, 2799 bp, Methanobrevibacter ruminantium
  source 1..2799: mol_type = genomic DNA
atgatatttaaacatcttcaattaaagaacttcaaatcacatgcagacactgaattggatttggatcttggcataagtctaatcgttggtgaaaacggtgcaggaaagtcatcaatatttgaagccatatcctttgcattgtttaagaattacacaaccaacaacatcaccgatttggttagaactaacaagaatttggatgaaaagatagaaatgtcagttaagctaaccttcctttgtgagggaaatgaatatatggtggaaaggggaggcatattatctccatcaaagaccaaatcaaagcctaatttcaagtcaatatcaaatctgtttaaaataagcaatggacgagaggatatcattgcatctggaaacaaggaagtggacaggcaaatagaagagctcttaaacatgaactcctcaacatttctaaatgcaatctatatccgtcagggagagatatctgccttgatagatgacactccagcaaaccgtaagaaattgattaccaagctcttgagaattgaggaattggaaactgcatacaataacattccaagcattattgaagagtataaaacaagaaaggcagtattggaaagcaatattcgtccggaatccgaacttaattttgagttgaagaaggctaaggaagaccattttaacttagatgaccagataaaaaaatcaaaagaggaatttgaaggcctcaaggtcgaacttgaaaatataaaagaggaaaaggaaaaattggacaaggaaaaatctgattttgaatctcttaaattaaagcatgctcatgaagaggaaaatctgagtgctctaaacaaaggcaaggaagagctcttcactaaactaaatgagatcacaagaaatgaaacagagatgggcattcttaagccattctgcgagaaacttcctatttataaagaattcaaagagtcctttttagctttaaataagttaaaagaagatgaagagaatcataaaaagaccttaagtcagattgaagaatataagactgtcattaaagatgagcaagaaaatcatgagaaatacattgctttagaaggtgaaataaaggtcttaaacaataagaaaatagagatgtcctctgagattaaaaatctgaatgaattggaatctcgcaaagacaccctgactcaagaggtcagtctaaacaatcaaaaattagagacattctttaacagttctaaatctgttctctcacaatttgatcttgaagaggaaatcagccctataaaaaccaatgatgacttcaataaattggaaagtattgtagaagaccttagaactaatcttagaacttcaattgacaatacaagcactgaaatagataatttaaagaaggaatcaatcagtctaaagcaggaaataaaatcattggatgagccattggctgatattaaaaaggttgaaaacaaatgccctgtctgccaatctgaaattagtgaagataagaagaatgaacttatcaatgggtatgaggccacaatatctggcaatacaaagaggataaatgaaattaatgggtttctccttaaattaaatgaggataaatccttgaatgagtctaaattaaagagccttgattcaattaaaaacgatatttatgctaataagcatattgtagatgaccttgacaagtccaataagactcttgaaacattggatgctaaaatcaaagagcttcaagggaaaaaggaggagcttgaaagtttagataaaatgatagaatccaaaaatggagaattcattgaacttgaagcccataataagaaatatctggaagcaagcactcttcttaagtctttccctgatgaaactaaagtcaaggatgacttatatgcaatatatggcaagatcaagactgaggatgaaaagcttaaaacatatatcagttcagattcagagctttctttaaatattaccttggaagagcttgatgagtcaattgaaaaactatccgaaaaggataagagatataatatcttattaggttcagttaaagataagaaagagtatgaagataaatatgagaataaaaagaaagaaatcgaatcaaaaactcaagagattgaggagattaaaaagcagatagaatcttccagctatgatgaggaatattataatcatgtaaatatcttgcttgaaaggttaaacaataaattcacttattattctcaggacattgctgttaaggagactaatcttgccaattttgaaactgtaatcaagaatattgaagagatcattcaacagaacagagaatataaggaagagtatattgcagttaccgaatattataatctccttgaggactttagaaaactatacagcaaggacggaattcaaagggatcttaaatcacaatccagaccgttgattcagaagaataccaaggatttctttgataagttcagcttcaagtattcagatttaatcttggatgatgactataacatttctatttttggccctgagggtgaggcgaatatagatatggtcagtggtggtgaaaagattgctatagctcttgctttaagattgggaattactcaagccatgtctaagggtaatattgaaacaattcttttggatgagcctacaattcatttggatagcttccgcagacaggagctgatcaatgtattgaggagcatgtctataattcctcaaatgattatagtcactcacgatacagagcttgagactgctgccgatactctgatttcagttgaaaaagaagagggaatttctaaaattgaaaatagttaa

SEQ ID NO: 1106 - DNA, 426 bp, Methanobrevibacter ruminantium
  source 1..426: mol_type = genomic DNA
atgtttgaagaagatgaaaaagtaaataaaatatttaatcttataatcacacaaggaattgactctgaaaatgaatataaaatctttacagaaagattatactcaaagccagacttcttatggaccgaatcctttgcaagagactatgcaccatttggagaacagttcttttctaaagtagacattatcgttttattgtctggtctttacaatgacaataaggaactatttgataccttgattaaaaaatcagaagaatttgatattcctttgcttttagtgcgcccttatggtatggaaatagttccagaagagcttgaagaaaaggttaaaagcgttgtaggatggaatgcaaattgcattatagatgatataaaaagcataataatgggtgattatgactttgatgatgattttgacatttaa

SEQ ID NO: 1107 - DNA, 1074 bp, Methanobrevibacter ruminantium
  source 1..1074: mol_type = genomic DNA
atgacatctcgaagagcagaacatgagagataccttaaaagcatcctatcaaactcattatcttcaggacatccatctaaagaggccatagaaaggtataggaaatcatccccaacttactataataagctaaagcttggacttatgaacaaatacaaggactgggacctcttggacatagaaggaagttcagttattgaaaacatctatggagagaccttaaggattaggcgaagggaaaagctagactttcacctagaggataagaaagatgagataaagaatgagctttcctcaaatttgaagttaattccaggtatcggctatcaaaccgaatccagactgaaggaaaataactaccatacaatctatgaccttcttcaacatgacaaatactcccataaggcccaaaaggcattgaatcggatagaaaggaactgttttgtatctgatttcaagcttttaaaggaatcatccaaatatcctatggatcactcccagccgattgacaagaacagaacccttaaggcattaagctcccttgatccgtttaaccttaaatttatggatatagaaactttagggctttcaaatgtccctatcatccttattggaattgctgagataaaaggcaaatggattgaatccaaccaatatctcctaagggacattgaggaggagcctgcagtgatagaggcttacctttcccatctggatgaggcaagcgttcatgtaacctataatggagcaagctttgatataccatatatcaagaatagggcacattattatagaatggactataatcttgaccagatacactacgaccttatatatccggctcgcaatctatggaaagatgtattacctaactgcaaactaaccacaattgaagaaaatctgtttggcataaaaagggaagatgatgtccctggagcgtttattccagactattatcaaagctatttaaaagaaaataatattggtccattgattccaataattgagcacaatcgtatggatatagtatctttagccagttttttaatgaaaatttatgaagaatccttttga

SEQ ID NO: 1108 - DNA, 309 bp, Methanobrevibacter ruminantium
  source 1..309: mol_type = genomic DNA
atggaattaactgctgaaaagagaaaagaactgcaagagaaagtcacaacagacattaatgcaatcctagaaaagcatgaacttccttataggatggatggaatttcagtaatgaaaacatcaaaaggaaccagttttttaggaaacattagagttcatgatccttataaggtaaaagatgttagaaaagaggttgaagactattttgaaagctatggaaacgttactatcacttcaagggatgtagtgccttgctgtgaattgccttatacatatataactttccatattgattattttaacgaataa

SEQ ID NO: 1109 - DNA, 2757 bp, Methanobrevibacter ruminantium
  source 1..2757: mol_type = genomic DNA
atgtctaccgaaagcaaagataagcagatgggcaaaatcgatcaattcaaaaacgacattcgttttagaagaaagatcgaatatgtggaaaccattccagggaaagatgcaagctataagaaggtagatgtattaaacaaaagaattctccaatatcttgaggataagaagataaagctctacagacatcaggcattggctattgaaaaaacaagagaagataagaacatcataataaccacccctacagcaagcggaaagacattggccttcaacctgccagtcttagaggaacttattagcgataatgatgcatgtgcattatatatttaccctgcaaaggccttatcctacgaccaattgaaggtcctaaggaactttgaggatgagatgggccttgatctaaacccaaacccttacgatggggacactccaaaggctaaaagatataaaatcagacaggagtctcgcatcatcttgaccaacccataccagattcatcatatattggcttggcaccaccaatgggagcgattctactcaaacctaaagtatatcatcatcgatgaggcccattattataagggaatcttcggttccaatgtggcgtttcttatcaggagacttaaaaggattgcaaagttttacggctctgaacctaaattcatattgtcctcagcaacccttgcaaacccattggaacttgcagagaagcttacaggagagagttttgaactcattgacgaggactcctcccctagcggagagaaggattttgtattgtacaatccatataagtcaatcaaaaaggattccaaggaccaatttgacatggatgagtattcacgctctgtccatatggaaacagagcgcatattcctgtatctgattttaaaggacatacagacattatgctttacctcatccagaaagattgcagagctcattgcactatggacaaaacgtgatatggaaaaggtcaaaaagcgaaacgtcgaaaagattgcagcctatcgggcaggttacttggcagaggacagaaggcagatagaggacggattgaagtccagagactatttgggagtcacctccacaaatgcccttgaattgggaataaacattggaagccttgatgctgttataatatccggatttccaggatccatgatttccacctggcaacagggaggaagatccggccgtacaaatcagaagtcccttgtcattttggttgcattcgagaatcagctggaccagtactttatgaaaaacccggaattcttctttgacaagcctcatgagaatgtggttattgacctaaacaatgaaaagctacttaaaaaccatatcatctgcgctgctaacgagcttccacttacattagaggaagcaaaagaggaattcaatgttacagaagacttccttgacaatatagtcagaaacagggatttaagaaaaagcagaggattctacatctatccatatgatgacagcccatcctttaacttttctttagaccagatttcaaatgagatatttacagtgatgaatggaagaactgtgatagagcatatggaaaagtccaatatgtacagggaagcccacgagggagctgtgctgataaaccaaggacagacctatattgtaaataaggttgatctagacagccatttcatctttgtcaaaaagaaggatgtggaagcccatacaatagcattgaaaagaacaaacatcaagattaccaaaaagattaaaaagcataggataggagagtttacagtccatttcggtgaacttgaagtagaggaagactattttaagtataagctgatgcaatattcaaaggttattggagaatatataatcgatctgcctccacttaagttcaacactaaaggaatttggtttactatcccagatagcgttaaggacaagcttgaagaaatctacaaggatgaaactgaagtctttgcaggaggccttcatggaacagagcatgctatgattggactcttcccccttcatgtgatgtgcgacaggtttgatataggtggactttcaaccaattaccatgaggacacacaggaagcgactatattcatctatgacggatatgagggaggaataggaatctgtgaaaaggcgattgacctaatcaccgaacttacaaaatcaactagaaacctgattaagaattgcgaatgcaaggacggatgtccttcttgcatttattcaccaaaatgcggcaatgataataagccacttcataagaaggccacggaatatattttagattatatgtgggatgagatgaataagctaagcccagaggaccttgctaaattagaggaagaaagaattaatactgaaaacagtgattatgataatctaaatggacattctgatgttgaagttgaatatgataaaaaaccaaataatgctgaaattgaaatagatgatgaaagagaagcggataatgctgaaattgagatagaagatgatgaagcccaagaggaatatgaaaaggcattggaagagtttaataaggaaaactattcaattgcaaaagacattctaactgatataatcataaattatgacaatcaatctgcagatgcttattatctcattggtaagatattgtttattcaaggagatagtatgggagcattgtcctttgttaaaaaggcattgtctattgagcctgctcatgaattggctaatgaattttactttgagttgaagaatagttattaa

SEQ ID NO: 1110 - DNA, 2568 bp, Methanobrevibacter ruminantium
  source 1..2568: mol_type = genomic DNA
gtgataagttacgaagaatttgaaaagctggttgtagagatattagaaagggatatctcttccaattcagaccaaaaggccgctatatctgctgataagtcacaatccttatttattgtagcaggtccaggctctggaaagactacagttatggttttaaagatacttaaatttatttttgtagatgatgtccagccaaaggagatacttgcaactacatttactaaaaaggctgcttcagaactattatcccgtatattaagctggggagataagcttaagaaaaaaatccctgtttttattatggataaggtaatgaatggggaaatggcagatggctctgttgtagataaggttagaaaaatcgatttcaatcaaatcaatgtaggaacaatagacagcatagcagatgagctcttaagggtccatagggatgcaggtacaagccagcctattctgattgaggattttgttgcaaattcagttatgattaatgaatgtcttttaaagaatgatatgtatttgcatgagtccttgcaggagtatttggctgagataacaggaaaggaatctcaaattgaccaaaagcctaaggttaaaaaccttacagccatggcagatatcctccttagcattaaggagcatatatattacaatatggttgacattaatgatatactggctgatacaaaggataatgaaaggggaaagaaaatagcattgaatcttattatggaatatgaaaaaacccttagaagtcagaatatctttgattttgccatgttagagactgaatttttaaacagattgagttcaggtaaattggatagctttttagatgatgttaaagtgattttagttgacgaatatcaggacaccaatctccttcaggaaagcatttactttaggattgcagaatctgccattaaaaatggcggtaacattactgttgtaggagatgacgaccaatctttatacagatttagaggagcaagcgttgacttgtttaccaatttcattgaaagagtttctagaattggcatagaagcgaaagagataaatcttaagacaaattacagatcaactgaaaacatcattgacttatgcaatgactttgttgaattggatgatgagtatcaggatgctcgtgtaaaggaaaagcctaaaatcgtttttcctaatcttgattcttctgaagatacttcagaaaatgaatctccagaagacctacctaatgaggatgaaatagaaacccaaaagattcctgttttaggcatgttccgttcatctgaagaaaagcttgcaatggatttgactaactttttagatgaactaaacagaaaaggaaaagtaaagagaaaagtaaagagagtcttaaacaaggacatcaataaaaaactaaattcagacagtgaagatgccttggaaagctataagaagtctggctttgagcttgctcaaagcgaaggggaaatcataatagagcttgatgaggagacaggttccatagatgatgttgcatttttaacatattcccctaaggaagtcactcataactctcgcaaattcccatttattcttaaaaaacgcttagaacaccttagaactccaattagagtattcaatccaaggggacaggatctgcaggatatcgaatctgttgcagtgttctgcgggttgatgcttgaatgcatagatccaaactcctattaccagaattcaaataaaaagcttcctcgccttgcaagacgaaatatgtctgtatggagaagaaaagcccaatcattcatcaaggatgtaaatccagagcctcactctccaatttcccttgaggatttcataattcattggcaggtaaggcagcctttcaatacaaacggttcaaaagacctgaaatggcctaaggaagcaggcctaatggaacttgcttataaattggttacttggattgaagagtttcaggatgatgacgaaggactggtatacctaaaggcgattacccaaacaatcaatcagacaagcttctttaataaatactcttcaaacatagttttcacttcccatgaggctgaagaggaatcaatcaatgaggcattgatgaacatattcgtacctattgccgttgggggagttaagattgatgaaaacctatttgaagtcatacctccaaacaggtttaatataatgtccatacatcaatctaaaggcttggaatttcctcttgtgattgtagatgttgggtccaggtttaagaagaatacggtaagggaatccaacctaaggtttcctaaaaaggcagacaagtcatcaatcattcaggatagaatacgaaaatacagcagcttaggtgaaagcgaaagggattcaaaggatagggcctttgatgatcttacccgactatactttgttgcattctcaagagccaaggatgttttgctattagttggtttaaatccaaatattgatggatataaacaaaaagataaattgcaaaaaatacctaatgttgctttaggttggaatagggatgaagaattcatagggtttgatgacatttatttaatttaa

SEQ ID NO: 1111 - DNA, 1410 bp, Methanobrevibacter ruminantium
  source 1..1410: mol_type = genomic DNA
atgaaactatcaacacgttctaaagagtatattattccagaatatagtctaactggagacttattgtcctttctcacttgcaatttgcaatatcgctatcagaataagggaaatcttcctccttccatgcctattcaattgtggtttggtgaatttattcatggagtcatggaagaggcttatttaaaatggaataaccttagtgatgaagaaaagaaggatttcaaatgggattgggaaagagatataaagcctatagaggatataatcacaaaaagacttaaggtaaaaggccttaatcctccaatcaattatactgaaaattatggtcctaaggaaaacatgtacagtgccagagtggacagatcaataaagatttggggacctcatctctttccattgatagaggatgctgaagttttgataaagggcattcgagatatgcctaaggacaatgaaggacattcaaggtctgagtattattctataaatggggtgatagatgtattaagctcagtcaagttagatgagatatattcaatagagaatgattttaatggtgataatgaaaaatcaaaaaatacattcaaacaaacaactttagatagtttctttgttattgattcatgtgacattgataatgttagagataaatcctctaagaaatcaggaaataaaattttagaatatttggctaataatgaagagtttaaaactattctggaaaatttagaagatgatgaatatgaaataattatagattataagggtatgagaaggcctagcgctccaaataaaaatgatattgataaaaataatattcatttgttaaatgaggattctaatgatgaaaactcattggaagattataaaacttggattcagcatgaatggcaaattttaacttatgcttggctaagatccatgcaggaagatgctaaaccagttatctgtggaattattttctatctgaatgaattggttccttctactgaggatttgttattgataagggaagatttagaaaacaataaaacggacattcctaggcaatccattcctaaggactgggaaatattaaagaattgggatgaaaatggtccgaaggcgattcacgatgacttgtctaaaaaatttaagatggaccggtcaattaggataataaatataaaggaagatttaatagatgattctctattggaatttgatgaagttgtaaatcagatagaaagctctatgattagggaattaaatggttctaagattaaggaagcttggaatgcaaatgctgaacagagaacatgcaatgcttgtgatttcagtacattttgtaataaaaaagatttagaagaaaatactaatgagaattcaaatgaagaagataataaacctgttttttcagttccttaa

SEQ ID NO: 1112 - DNA, 681 bp, Methanobrevibacter ruminantium
  source 1..681: mol_type = genomic DNA
atggattatgatattaatgaaaatgctaattattctaaaatatttattgatgagctaaagcttagcagattgcctgttgcagttaaattcatcaacgatgaaagtgaagttccagaaggtattgaaaagattgacgaatcattaagacactgtgaaatgattacaaaagcagctaaaggcgaatcattctattcaactgctgaagagcaaagatgtgctggcggagcttctgcaatgggattaatcgatcttcctcctaagattgcaagcggtgaattatactataatttaggcagatttgaatctattgaaactgctaaaagcgttcttgacaatatttatagaaaggatgaaagaagctttggcattgtatatgcgccattggaaaaagctaatttcgctcctgatgtagttgtagtcattgcaaatcctaaaaacggaatgagaatcactcaagctattgtctacaatagcggtgaaatgttcaatgcaaaattcgctggaattcagtcattatgtgcagatgcagttagcggaccttatgttagcggcaagcctaatgcaactttagcctgtagcggttcaagagcatatgctggcatagaagatgaagaaattgcttatggtatgcacagagacaatataaaaccaatcattgaagcatttgcaaatatgaaataa

SEQ ID NO: 1113 - DNA, 741 bp, Methanobrevibacter ruminantium
  source 1..741: mol_type = genomic DNA
atgagcaatttgaaaattatttcatggaatgtaaatggcataaggactaggataaaaaataaggacatcaatcctgttttagagaaagagcctgatattattttattccaagagactaaagctagctatgagcaaatggataagaaattcttaaataagaatccctatgattattatttcttaaaaggtgaaagcgctaggactggcggactagcaagctttaccaatattgtacctaaaataatcaaaagattctttattaaatctcaagatgcattccatagggcatgtgtattggattttgaagactttacattaattcatatttatgcacctgctggaactggtaaaaaagctaattttaatcaaaaattagattatttcaacagtctattaaaatatgtagaaaagaataaggacaagaatttgattattgcaggtgactttaatattgctcataatgatatagacatatccaacaaggacactaaagttagcttcaccgatgaagaaagatctgttttagataaacttgaatcatttggatttgtagatgccttaagattattcaatgaagaagaatctttttcatactggaaaaataaggaagaaaacgatggtgcacgtttagattatttctttgtttctgaatctcttaaggataaggttaaatcttcttctatattagttgatgttgaaggttctaaacatcttcctattgaacttgaaattgagatttaa

SEQ ID NO: 1114 - DNA, 657 bp, Methanobrevibacter ruminantium
  source 1..657: mol_type = genomic DNA
atgctaagtgtttcagcagtcataactgcagcaggaaaaaattctagaatgagacaagatcaagagaaaaggaatcttccgttgcagaataagcttacactcccctttaaatcaaaaactgttatagaaacaacaattgataatgtattgaatacaaagggtatagaagaatgtgcaattgtattaggtcattatagcagcgaaatattacctttaattaaggatattgatgatgaaagaataaagatagtcatgaataatcctattgatgtaggattatctgtctctttattaaatggattaaataatataaattcagacatcgccctttgtgtaactgcagatcaaccaactgtcagttcaactacttttaataatattttagattctattttaaattcttccaatcctaataagaccatttctgttttaagacgtttggatattggtaaattagacactgctaaaggattagggatgccttttgctgcaagcagatgtgaattaattgattatattaaagacaaggatgacaatttaaatccaatattaagagaaatctttgcagatggctttgaattttatggagttgaagagaatcatcctgatgagttaattaatataaattattattcagattatgaaagcttgttatga

SEQ ID NO: 1115 - DNA, 1230 bp, Methanobrevibacter ruminantium
  source 1..1230: mol_type = genomic DNA
atgccaagattattcaaaaaaacatcttttaagatttttattgcattaattgtaataataattttactaatacctatctccatggcaatgacaagtcaccataatactcaaaacatggctgaaatttccaaatatgagaatggatccactgtcttcaatggagataacataattgacaaaaacaaaataaacaagtaccctatagtttcagatataggtgcattgactgatcaaatcttaagaggagacattgcagatgcattcttctcaatatccacaggagtggtacctacccctgcatctgaacttgtaaccggaaacattactaaatccggcgagattcaaggaatcaaaggtcctgcttatatcgatattgaaaaagaccagatcaacattgttgaacctggaaactttttatatggattcaataccccatacacacaagcggtgattgttgaaggtggtattgacatcattaacaacaagacaaatgaaaccataaaacacattaatgccaatgacataactaatgacactcttccaggagacatggtaagtgaagagacaataaaatattggtataatacatcacaagttggttccaaatacaatatagaattctgtattgacggtcttaacgataaccgttcatacattactccaactgagcttaaagagaaattccctgaagcttataactattcaatcaaataccctggaggctctccagtaattctttataaagacaatgtaaatagcactgttgtaagcagcacctatacatacttaggttcacaccctcaatataacgatgcaaacagagaatataatgccagacaattcgttacagcatggaatggaactgtaattcctgcaaatacctctggatgtggaagggaaggagtttatttcagtgctgttaaagaagcaaatgcacagtctggaatggctacacacggtgtatgtcctccagcaagagctttaagaaatgctgtattagctttaggattcagtttgcctgtaggtatggattatggtgaagatgctgtactctttggatacagtccttcaactggaatcagagttaccaacactcttgactatcctatacaaatcaatatgtggactgaaggtgccggtactggaatggcaatatatgcagatgtagttgaatatattccaaataatgtaaccactaccaacagtacagaaacaggaactactatttag

SEQ ID NO: 1116 - DNA, 1332 bp, Methanobrevibacter ruminantium
  source 1..1332: mol_type = genomic DNA
atgaaggctgctataataggtttaggcgtagaagggaaaaaagcattgaattccctattaaaacataattgggatgtttatgcaagtgacttgaatgtcaatatcaaaatggacaatctgcctataagccttgcccaagtgaatgtatctccatctaaggataaaatcactttccaaaaggataatctaaccattgatttaggatttaacaatcaggaaatcatcaattccgctgatgcagttgtattaagccctagcatttggggaagcagaattgcagagcattataaaaactctggaaaactcctatgtgacgttaagaccaagcatagggatatctttacaattggagtaaccggaaccaatggaaagacaaccactgtgtccatgattaaggaaatcctagaaaatgccggcaaaaatgttttagtcggaggaaatggtggaggaggctttgaaggctattatgaccttatcctagaagcagatgaggaagaatatgatgtcttgcttattgaagtttgtgatatgactgtcggattctgcagatattgctttgactttgacattatagccctaacaaatatgggaaatgatcatatggacgttcacggttcaatggaaggatataaagattccctaaaggagtttttcaaagataaaacaatatttttaaataagaaccccgagtttccagagagctttaaggaagaatttattggcatttctaaaaataccatagaatacggcgaaacagattatgaaattgatcttttcggcagattcaatagattgaatgcaggattaagccaatcattatccgaatacataaatgaaaatgtttttgagatagatgaggaaatcattaaaacaagcctagaaaactttaaacctgtaaaaggaagattagagcttcttaagctaaatgactgcacaatctatataggaaaatccgacaattcagatgcgattaaggtcattcttgatgaagttgacttcactgcaatcttcattggaactccaaggcataatgagaatcatagattggacatcttaaatgaagttgttaatgcaaatcccgatgcaatcattctattccctggacttgaggataccctagatcaggcaatctacagattaggcctgctgaattatgatggaagaatcgaaatagccaataatctggatgagatagttgcatttgttgcagaattctcacatgaccctgctatatttataggaggaaacggtcaagagaccattattaaaatacaggatagattaagagaaattgctgattcgataaatgaaagtgattatgagtgcgattaa

SEQ ID NO: 1117 - DNA, 1104 bp, Methanobrevibacter ruminantium
  source 1..1104: mol_type = genomic DNA
atgaaaggtgaaatgatgacatctgatgaaaaaattaaattagtagaagaactctgtatgactccaggtatctctgggtttgaagaaaagattgcagagattattaaaagagaattaaaagatgtagcagataaaattgaagtagacaagatgggaaatctaatcgctactaaaaaaggttcttctaaaaaaggaccaaccgtaatgttggcatcccatatggatgaaattggtttgatggtaagctatatcgacgataatggttaccttaagtttgcaaccattggcggaatcaacgatcaaatgcttatgaaccaaacagttgttatccattccaaaaatggtgatgtgactggagttatcggttctaagccacctcatgtaaccaagcctgaagagaaaaagaaagttgttccatatgatgaaatgtttattgatattggagcaaaggataaggagcaagctgaagagatggtttccattggagatccaattacatttaaaacatggtttgaagcatttccaaataatttagtaatgtgtaaggcattggataaccgtttaggctgttatgtcatgatggaagtcttaaaaagagtggattccaaagctacagtatatggtgttggaacaacccaagaggaagttggcttgaaaggtgcaaaagtaacttcatataagttaaacccagatatggcatttgctcttgacgttaccttatccggagatcaccctggaataaaacctgaagaggctcctgttgttataggaaaaggacctgctgtaatcttaatcgatgcaagcggcagaggaataattactcctaaatacattagagagcttttgattaacactggagaaaaagaagaaattccataccagcttgaagtaagtagtggtggtacaactgatggtacagcaattcaccttaccaaagaaggaattcctaccggtgtattatctgttccaaccaggtatattcacacaactgttagcgtagcaagtatggatgatgttgaaaatacaattcaattgattgtagctgctataaacagtttagaaataaattttaaatacattttcagtattttaaatactttttaa

SEQ ID NO: 1118 - DNA, 1161 bp, Methanobrevibacter ruminantium
  source 1..1161: mol_type = genomic DNA
atgtttggagtaaagaaaatgaaatacaaatctaaatttggttttggctgtatgagattgcccctaaaggatgaaaacaatccacagtcaattgaccaagaatactttaatgagatggttgatacctatatggaaaaaggatttaactattttgacacatcctatgcatatcataatggaatgagcgagattgcaattaaaaaagcccttgttgaaagatatcctcgcgaatcattccttatctgtgataagatgcctacttgggcccttacaagtgaagaagacaatgagaaatttgtaaatactatgcttgaaaggcttggaatcgactattttgatgtcttttttgtacataatattaatattccatggctagaactggctgaggaacataatacatttgaatatgtaaagaatatgaaagaaaagggcatagcaaagaagattggaatcagtttccatgagaattccgatttgttagaaaagttccttaataaatatgctaaagacattgacattgtgcaattggagcttaactatttggattgggaagatccagctatcgaagcccataaatgctacgatttatgtgtagagcatggccttgatgtctatgtgatggaaccattaaagggaggagtgattgtaaaccaacctgaagaaataaataatgatttcaaggagcttagtcaagacgcttcaatagcaagctttgcaatgagattctgtgcatcccttgaacatgtgaaaatagttttaagtgggatgagcaaaatggaagacttaatcgataatatcaatacctttgaaaacttcaaaccattaagcgaagaggaatttgacttcttgcttaaagaagcagataaattaagagaaaatcttgcagtgccatgcagcgaatgcggatactgtcttaaggcatgcccgttagagattccaattcctgagtactttagattatacaatcaccataaagttcagaaagaatcaaatatctatagattgtattttgataagttagctgatgagaaggttccagcaagcgactgcacacagtgtgaaacctgcatagattattgcactcaaaaaataaacattccaaaagaattagaaaaattgtgtgagcatttccaagagggttttagtccttatggtaattaa

SEQ ID NO: 1119 - DNA, 7899 bp, Methanobrevibacter ruminantium
  source 1..7899: mol_type = genomic DNA
atgaaatttagaacaccatcaaagaaagacaccaataaggatattgagaaggagtttaaaaacttaagaaaagagctcttggatctaaccttaagaaaccctcttcttaactttaaggctagaaaccgaaatctcagtattatcaatcaatctcctataaacatctataggacccttgttttagagaataaaaagatgttctttcaagcaaataagaaagaaactaaaaagtcaaaggcccatgcattcatagatgaggctaaggagtttctatcacaggaaagcgataagaccttaaaggcagacttatcacctagtgaacttcaaaaaagactcttttatatagatcagcaatctaagacaatggtacaggagcaaggttacaatatcctatacattgcaatcggatttatcgaatggattgacaataagaagccaagacaaaagaatttagcacctctcattcttattccagttgaaatggaacgtaaaaaagttggaaactctttttcattatcttggacaggtgaagacttacagaacaatatttctattcaagcaaagctaagggaaatcggcatagaattgcctaagtttgaacagacttcctatgtggaaggggttaaccactatctggaaaatgtaaggcaggcaatcaggccatttccaaaatgggatgtaaaatatgacatagcattaggattcttctcattcaccaagtttgtaatgtataatgacttgaatccggaaagttgggatgagaacatcgacttgacaaaaaatgagcttattcaagcaatcttcaacccaagcaagaatgtatatgaagatacctttgaagaggatgatgtagatgaaaagctccattataagacaatgtatcaggttttggatgcagattcctcccagattgcagctattgaaaatgtaaaggccggacataaccttgttgtagaaggtcctcctggaaccggaaagtcacaaaccattgtaaacttgatagctgagcttattgcagaggggaaaaccgttctttttgtaagtgaaaagatggctgcacttgaagtggtaaaaagcagattggatagcgtaggccttggcaagtttgtattggagcttcattcacataagacaagacgaaagaaattccttaaaaaccttcaaaaagccactaatgttcgctcaacaagggatttaaagttagatcaaacattaagaaagcttgaaaacctacgtgaccagttagatcaatatgcagagataattcaccgtcctatggcaaatgtcaagctcagcccatttgaactctatggtatgaaggagtcttcagaggattatttctcccgccaaaataggttattgcctttggttaggtttgacaatccagaagatatcaccatgaaggatctggatgatataatcatatcattggaaaacctatcagagctctattcaacaatatcaaaaaacaatccttggagctattgcaatccgaaaagcttgcttccagcagatttaagggaaatagaacagctgataatggataccctcgaggcactcactgactttagatatgagatggacataataaatgaggtctatggaatcaaggttccaaataccctgcaggaatatgaagattcaatcactgcattaagcctattaaatagcgagacagttaaccttattgacagctccatcctattgaatagggagtggtatagcaatcctgaacaggcacaaattctaatcaagctattggcttcatatcagcaatcatctaacctctttgataagtttacagattatcttctcattgctgatttggatacattgattcaagacttgaataaggacttgaataagaaatttaggctcttcggcggaaattcccataaggatgagctaagcagattatataagggccctgttcctagtgaaaaggaagccttaaatgaccttattaaggtacgtaaagaaattaaagttagacaaagctataatgataatgaaaaacttggaatcagatactttggagatttatggggcaagaatgccaatgttcaagagcttaaggaagtttcaatctggatgagaaagttcacacatcttttatctaatggcacattcaatgaaaataccgttaagatgctttctaatgaaatattccacccttcaatagatgatggaatcgatgaatatattgaaaaaggcaacagattctatgaaagccttaagaaactggaatccaaactcaatccgagaagcaagattatatttaagaaggaaagcgaagatgttccatttgacaagtgggaaattcaacttaacaaatggaaaggacaattgtcaagcctccacttatggtcacagtattccaataccaaaagggcatgcatgaacactcatgcttctattttcatcaagacagttgaaaagagaaatatcaaaaaggacgatgtaaagccactggtattaggtaattttgcagacagtctcttgaatattgtatttagtgaaaatgagatattggcaggattcattggagaattgcatgaaaaccgcattgctgactttaaggatttagatcgaaagatcatcaatctaaaccgaaaaagaatattcaataaactgaatagccaaatccctaagattttcggtggagcaaacgaccctgaagcaaagatcttagctggagaattcactagaaaaagcggacacttgccagttagaacccttcttgaaaaggctggaggaacaatcaaaaaaatcaagccagtctttatgatgagtccattgtcaattgcacagtacctcgaccctacaaatcctaaattgcaatttgatgttgtcattttcgacgaggcaagtcaggttaagcccgaggatgcattaggtgcattcatgagaggaaagactgctgtagttatgggagacactcaacaattgcctcctacaagtttctttgatcagatgacagacagcgaagggggagaggaagtggcaaccgctttggatatggaaagcattcttcacttatgcaaaatgtcattccctgtcaagatgcttaaatggcactacagaagccgccatgagtctttaatcaatatttccaatagggaattctatgataatgagctcttggtctatccttcaccttgccataatgaccctgaactaggacttaaattccattataatccaaatacagcatatcatagaggagaaggctctgctaacccattggaagcaaaggatgttgtaaaggaaatattcagacactttgaaaagtatggcgataagaagagcttaggtgttggaacattctctgttgctcaaaagaatgccatattagaggaattggagattgaaagaaagagccatcctgaatttgaaccactattttctgataagagagaggaaaggttcttcgtaaagaaccttgaaacaattcaaggggatgaaagggatgtcattctaataagcgtaggatatggatatgatacagaaggtaagatgtccttaaacttcggtcctctaaaccaagacggtggagaaagacgtttgaatgtgcttattacaagggcaagggaaaaatgtgttgttttcaccaatttcagagcccatgacattcatctaacagcaaaccctccatttggggttaagtctctacaaagctttttggagtatgctgaaaacctttcacaaaatcagttcattgaccaagaagaggatgaggaggctccatttgaggatgcaatctataatttcctagcagataacggatatcgggtcgataagagaatcggttgtgcaggatttagagtggatcttgctataattgatgaggagaatccgggaaaatacctcctgggaatccagtgtgacggccataattatgcttcaagcaaggtagcaagagacagagacagactaagagagcaagtattaaacggattaggatggaaaatctatcatatttggtcaacagactggtatagaaacagagacctagccagagctagactcttggagcatattgagaatacaataatcactacaaaggttaatgacttgaagtcaaagattcatgatgctgaatcaatgcagataaatccagtcactactgttgttattgataagaaaaataaggagaaagattctgatgatgattcagacagtgataaaactgataaaaataaagaaagccttattaataattatttaaaagatttagaagatgaatttggagacaatagtgataaaaaggacaataataatgaagatgatgattctaataatgatgatggaggattagtcattgattcaactgatgattctattgacaatccagatgatggaggattagtcattgattcaactgatgattctattgacaatccagatgatgaagggttagttattgattcagataccaatttaggtagtgaagagtttgatattggttctgattctgttttagatgatgattctgatgatgaagagtttggtgttgattctgattctgatttggatgaagaagaaatcattgaagattcagaaattaaattaagcgacactcttaatactgatttaaaagatgaagacatttatgaacctgaaattgaattagatgacaattctgattctgatttggatgaagaagaaatcatttatgaaagggaaattcaattaaaagagggttctgatttagatacagaagatgaaattattattgaagaaaataataacaatggttctgatattgatttagattcagatgatgtaactgtatttgaattaagtgatgaggattctagttctgattcagatgatgtgactgtatttgaattaagtgatgatgattctagttctgattcagatgatgaagaattagataatgattccaatattgatttggaagatgaagaatcagatgataatttcactcttgatttggaggatcaatcaaataatctgatgccaaaaagcactattgataaatctgagtttttaaaagatttatatggtgaagatgatgatttaagttcaactattgacgaagaaccgaaaatacttaatgataataatgaagttattaataaatcttttgattcaaaggataaaaagagttctaaaaatattagcaaatctgagcttaaaaatcaagaaaaagctaaatctaaaactaaatctaaaactaaatctaaagctaaacctaaaaatagaaatcaagagattaaaaatattgaaaacggcaaaattaaaaatgatgattctaaaaaagagcagaataaaccaaaatctaaaaataggtctatactaaatagattaaagaatattggtggaggtttgggtttatcaagatcagaagaatctgaaggtaaagaatttattaaggctgaagataaaaaatcaaaagaatttgtatccgatgccaaaaagtcaataaaaagaaaagacagaaaggcaaaagataaggattccaatgataaaaaagaaataaataaaaaacttaataaagagcaaaatataaaaaataataaagataatattgttgaatcagataaaaaacaagaggaaattaaagaagaaattcaaaaacctgttcctaaatctaaaccaaataatacaaaagagttaattaatcaaaataacaaaaccattgaagaattagaagaatatattaataatagttcaaataattctgatttagaatttgatggtgcttctgatattgatttagaaaaagaaattatttcagaagacaaaactaaattagacgtagaatcagatattcaaatggatgatgaatatgtgatagttgatgattctgaattggaagacgaatttgagtttatagaagaattagatgatgattctgaattggaagacgaatttgagtttatagaagaattagatgatgattctgaattggaagatgaagaatttgaatttattgatgatttagatgatgattttggttcagaagatgaatatgaactagttgatgattctgaattggaagacgaatttgaattaattgacgatttagaagaaaaatccaacaattatgataatgaagatattaatcttaaagaagatagtgaatatttagaaaaagaagagtctgaggatattatgagacaaaaggaaagtgtttcaaaaagaaaggttgagcatgaaatcattgatgattctctagatgttattgttcctataagtgctgaaagaagagcagatgaatataataattattctgaagatgctaatgttattattccaattcaagatgaagaggaatttgaagaggaatattataataatgattctcaagttgattctgaagagggaattgatgaattggaagaattaatctctgaaaacattaattattcagatgatgatgctagagaagaattcttaacaaataaagagtctaatcaagaaagtgaagaagattcttactattacagcgcagtaggaattgaaaattcacttaaaaagaatgctgttcaatatccaaaatcaagcaataggaataaaaaaggcattgtaggtgctgtatctagcttaaaagatgaaatgctttatatcaatgcttcaattaaagaaatagaaaacccaactgaaagagaaaaaatctatgtgatagacccttcagaagaggaatactataatcagccagatgattctatttactataatgattcccttagtgaaaataaggaaagatatgctaaatcaaaacaatatgaagatgaagttgaagtcatttctccggtatcagattctgatgagggagaaacaggccatattcaatctgattatattgaaagaaaagctgaagacagttctaaatctagttctgaatccttatttagtcctaaaaaacatgaatatttggataaaattaaggaatatgctgctgaatctgaatatgaagaggcagctgaaaaccctacaataagtccagttcatactgaaattgaagaaagtgttgaatcttctgtaattagcccggttcatactgaatatgttgaaactgttgaatcttctgctatcagccctgtccaacaggaatatgacaaaacagaggaaccttcaaccataagtgctgaagatcaagaaacagagtttattgatgatattcttttagaagaagatgaattatcaaatattcaagatactgatgactctgctttagctgaagaagaaccggaatctatagaaatagatgatgatgaatttgaaagcattatcactgatgtggatcaagattatcaagaacttgaaaaagagagaataaaggaagctaatgtattaagtgcagtagataataccagattaactcctaccggcaaattagaagattatatcgtggcatataaggaaattgatgatgtcattatcaaaagtgccacagaaatatatgatgatgagaagaaagtggctactgcagttatggacattgtaagtgcagaaggccctattcatgtagatatggttatacgccggattagggaaagctgcaatctctctagagcaggcactaaatttaaggaagctatatttaaggcaattgaccgcaatgaatctcatatgaatcttataagagaagaggatttcttatttatagattatgaccaaattgcagttagaaaaagagataaacctaatatagaccttatttctgatttggaaatagaaaatgctatagatttggtattaagctttgaaaaatcattaaaggttaaggaattagctagaatcgtttctagaaccttaggttttaaatccacttctaagaaaacttcagctaagattttagaagtcattgatgttatgatcggcaaagagattttagtaaatgttaatgataaaatagaatttagataa

SEQ ID NO: 1120 - DNA, 288 bp, Methanobrevibacter ruminantium
  source 1..288: mol_type = genomic DNA
atgtcaatcactcttatccatactcgaaggagattagcccataagaaaacatataaatctcctaatgaacgtaaaaagaaaactctagctaggctatctcataaagagagagctcaaagaaacagagacaagaaaagagctagattagataggcaaaaaaataaaaataagcctaaaagtcgcaaacctaaaaaatctaaaatgccttataggtttaaatattatcaatttcaggattataaatttaactcagagttagatcagctagaaaagattgattctgattaa

SEQ ID NO: 1121 - DNA, 180 bp, Methanobrevibacter ruminantium
  source 1..180: mol_type = genomic DNA
atgttttacagtacaataatgaaaattgattcaattgacagattaagagatattagagatgcattattagtagaacaaggaattaatcctacaagaaacggagaacaggcaattcgtgtagttgttgatagaattgatgagatccaatctactttagataaaaaaatagaaaaattataa

SEQ ID NO: 1122 - DNA, 2070 bp, Methanobrevibacter ruminantium
  source 1..2070: mol_type = genomic DNA
ttgtcaaacagtaatacagatagctctgataatgcatcagatgatgcttcaggatctgaaatagtatcaggaattaacgaagagcttgaatcaaataatttattaactgaagatttaagcgtagacgatgtaattttacaaactagcttttatacaagttatgcagttaaatctgcaaaatctcctactgtattaactttcaaaaactctacagtggtaaaaggagataaattatacatttacttaaaagacagttccaatcatggcatttccggcgaaaaggtaatatttaaattttcaaattcatcttatacaagaactaccgattcaaatggaatggccgcacttgacattaaacttaatccaaacaaatatgctttttcagcaatatatgatggcagcgataattatagcgcttccagaaaagactttactttaactgttgctaaagtcaatacaaaattgacttcaagctcaagtgttgtaaggggaagaaacctatacacttatttaaaggataaaaacaacaatgccctttcaaataagaagataagcattaccatctctggaaaaacatataccgttactacagacaaaaatggcagagcaagcctaaaattaagtttaaagacaggaacttactcaacaaaaatcaattttgctggagataaaacatataactcccagtctttatccaaaaagataaaaatatataccttaaagacagtcatgacaattccaagtacttcagttgtcagaggtcaatatatttatgcatatctaaaagacagtgacggaaatgcactctcagggcaaaaagtggtaatgaaattcgacaaaatctactttaacctaaaaacagacaaaaacggaagagtagccctgaaaataaatacaagacttggaaaaatcccagtaaaagcaagcttcgcaggatcaacatcctactcagcaagctcaaaatcagtcactattacctcttatgttgaaaaaaccaagattacagttgaaaattcaacagtgaaaagaggaaaatatttctatgcatatctaaaagacagcaaagataaaggaatttcaaaccaaaaggttaaaattactttagctaatataaattatacaaaaactacagactccaatggtaaagtcgcattgaagatagaggaaaatcctggaaactacacaataaaactcaactttgctaagacaaacagttactatgcaagcagcaaatcattaaagattaatgtcttgaataatgcaactgctaaaatcatagcaaaagatcaaaccgttcttggagaatactctgtcagattaaccgacatgaacagtaatccattggcaaatcagacagttgagattactgcagctacagtaaatcgtagtgtaggatctggattgcctattactaaaaagactgttgttatcaattctgataacatctataacaaagcaacagactcgcaatttattaaatccattggagaagtccttaaatccaaaggatataaagtaattatcaattcaaatatcggtccgaatgctcattgtacagatgcaatgggagcttactctgatgtttgtattttctgtatcttcggtggtgtggacagtggtatgtttgttgacatggcagcaagttggtatcagaatctgttgaagaaatacgataatgaagttgtattaggattcactcacactcaaagaaacctagctacagatacatggcttgaaagagctcatgacgatgattacagtcctaaaaacttcactggattgtcatatcctggaacatatctaaatgattatgatatggattatgtatatggaagaacagctacagaaatggctaataatttcattaaatatgctgtaaatggtttaagcattggtttaaacaatactgttccttgcaatgtcatggaatataatgtaactaccggcgataatggttatgcaaccataacagatttattgccaggtgattatgctgtgatttcttcttatataaataagacagcaggatatgttgcagatactgtgattagtataattgaagttaaataa

SEQ ID NO: 1123 - DNA, 852 bp, Methanobrevibacter ruminantium
  source 1..852: mol_type = genomic DNA
atgaattttaacttaaaagacatgattttaatttttatcagaggtttccttatgggctctgcagatacaattcctggagtctctggaggaaccatcgcattaatcacaggtatatatgaacgtctaatccatgcaataagcagcataaaattcggatttataaagccattaatcaaattggactttgccggatttaaggaaaagctctttgaagagattgattttgaactattcatacctcttgttttaggtataggtattgcagttttaaccttatccaaggtaataagatatcttcttcaaaattatacagcatatacattttcattctttttaggccttattttggcttctgcctatattttatacaccaaattggatgaaatcaatataaagcttatcatattaacaataatcggtataatcttatcatatatatttgtagggttaaacccaattgcagctaaccatagcctaattgtattattcttctctggtatgattgccatttgcgctatgatattgcctggaatttccggatcattcttattattgcttttaggacaatatgcatatatgctagattcattaaattcattaaatttcactgaaatcattgtctttattgctggagcattcataggaatcttaggattttccaaaatccttaattaccttcttgaaaactatgaatctgctacaatggccttcctgattggaataatgattggtaccttgaggctacctttcaatcagatcacaagcaatttaactggatcttggttaatctgcttgattttagctataattggagttgtcttaatagtggtcttagagaaaaagcttagttaa

SEQ ID NO: 1124 - DNA, 1896 bp, Methanobrevibacter ruminantium
  source 1..1896: mol_type = genomic DNA
atgggattatttggtttcttaaaaaaggataagaaggaaaaatcaaataaaaaatttgatgaagaatctaataaggatttagatgaagctatagaagaatcaactgatatgattaaaaaagattctgattctagtaaagataaatcagaatcagatgattctaaatctaaagagtctaaggattctaaagaaaaagaatctaaatctaaagagcctaatgattctaaatctaaaaaatcaaaaaataaagaatcaaaggattctaaagaaaaagaacctaaaaagtccaaatccagactatttagacgttctaaaaagtctgaagatagcatcgacttcgattccataaagcacttaagcaaagaggatatgcaagaggctaaggaaaaacgtctaaaaaaggattctagaaccaaagaagagaaactcaaggatgaaacctttaggcaaatagcaatgaaccatagcaatagaaataaccgtcttgcagcagttatggaaataaagtcccaagatatattggaggatgtatgccttgaccataaggacagatttgttagaaccattgcagcttcacgaatcacagatccgaatatcctagaagagatagcctataatgccaaatacacagatgttcgccaaatcgcctttgatcagttaggccaagttgaaaatgtatttgcagagatagcaaaatatgataaaaaaggtaaaaaccgctttgcagcaataaatgaaattgatgatgaacttatattaatggatattgtcatcaatgccaaagataaaaaggtaaggataaaggcacttgaaaagataaataatgctgaaatattggctgaaattctaaaaaacaccaatgataaaaagataaccaacctaatcgttgaaaaggaaagctttgataatgaggaagtcctctctagaatagcagaggatgaaagctatgacaaattcattagaagcgaagcaataaagaaattaaatccagataatgaaataataagggagatagcaatcaatgattcaaatgaacatgtccgattgatagctattgagaaattagaggatgaagatgatcttaatgaaatagccttaaattcagaatactcatcatctcgtttgcaagctgttaaaaaaatcaacaaccaagagatattaagtcagattgccttaaatgatgaggataagtttgttagaatggaaactttaagcaagatagatgatgaaaaaatactatttgaagtgtataataaagattcagatgaattcgttagaagcgaagcaatcaaatacatcaattctcctcttaatttagcagacattgcaataaatgatgacaatttaatagtatctaaaaatgctttaaataaaatcttcagtctttatgaggaaggtgattttgaagaggatctggatgaattgcttggaaaaatagcaattaaatcaaataaagatgagatatctgaattgtcaatcaaatccattgaaaaagaggatgttctagagcatattgtaaacgaatctaaaaacactaatactttattgcttgcagttgacaagattaaatctgaagacatattaaagaatatctcagagtcaaatgaaaattccaaaatccgagtcaagtccgttagcaagattaaagacaaggacaatttagaagatattgctttaaacggcaattataatgatgcaagagttgaagccatagtaaatgttcataatcaggagatattgtctaacttggccttaaatgatgaagattccaaggtaagggaagctgcttgtaggaatcttaatggattgaatactttaaaagaggttttagcaaaagacacagatgaatacgttcgtaaaattgctaaaaagagatatgatttgattagtaaataa

SEQ ID NO: 1125 - DNA, 2907 bp, Methanobrevibacter ruminantium
  source 1..2907: mol_type = genomic DNA
atgatgagttcagaaagaaaaaacatcatattaaagggtggaagagaacataaccttcaaaatattgatgtatccattccacgtgatcaattcatagtagtaaccggattaagtggctccggcaaatctacacttgcttttgataccatttatgctgaaggacagcgtagatatgtagaatcattatctgcttatgcaagacaatttttaggacagatgaaaaagcctgaagtggattatatagaaggtctctcacctgcaatatccatagaccaaaagactacaaaagtaaatccaagatcaactgtaggaacaattactgaaatatacgactacttacgtttattatatgcaagaataggaattccacactgtccaaactgtggaaaggaagtctctcatcaaaccataggtcaaataaccgaatccataatagaagaaggggaaggattaaagattcatgtgctagctccagtcattaaagaccgtaagggggagcataaggacatattggaagacttcagaaaaaacggatttgtcagagcccgaatagacggtgaaatccgtgggcttgatgaggaaattgagcttgcaaagaccttccgccatagcatagatttggttgttgaccgccttgtaataagggaaggaacagacttccaaagaaggttgtcagattctgtagaaacagcttgtaattttgcagaaggcatagtgactgtcatgtttaatggaagggatagtgaaggaaatgaaaccgagtacgaaaaaacatattctgaagactttgcatgtaccgactgtggcataagttttcaagaattgacacctaggatgttttcattcaatgctccgcagggagcatgtcctgaatgtaatggtattggaacaaagatggaaatgaatccagacctaatcgttcccaataaaaatctttcattgaatgaaggagccatagttccttggtcaaagtcaaataagaaggaaaactactattaccaaatgttacaggctgtagctgaacatttcaactttagcatggacacacctttcaaggacttaagcgaagagcatcagcatatattattatatggctcaaatgaaaaggtggcatttgcctttaaaagaagaaacagatcatatagggtgaatcgtaaatttgaaggtgttatcacaagaatggaaagactgtaccttgaaaccaaatctaattataaccgcaaatacatctctaaattcatgagtgacttaaaatgtccagtctgtggaggaaagaggcttcgccctgaagtattggctgtaactgtaggggacaaatcaatcatagacgtatgtgatttatcaatcaaggaaagctataggttcttccaggaactggagcttacagaaaggcagatgtatattggaaaagagattctaaaagagattaaggcccgattgaagtttttagttgatgtgggattggattacattacaatgtcaagatcctctggaacattatccggaggggaagcccaaaggattcgcctcgctacacagataggctcaggtctggttggggttctatatatcctagatgagccaagcataggccttcaccagagggacaatgtaaagcttattgaaaccttaaagcacctaagagacataggaaataccctgattgttgtggagcacgatgaagaaaccatattatctgcagactatgtcattgacataggcccaggagctggtgagcatggaggaaagatcattgcagaaggcagtcctgaagagattatggaatcagaagagtccattacaggaaaatacctatctcgaagggaattcataccaatcagagaggacagacgtagcggaaacggcaatttcctcaccatcaaaggtgcaagggaaaacaacctaaaggatattgatgttgagattccattgggactattcacttgtattacaggagtcagcggctctggaaaaagcagcctgataaatcaggtattgtataagggcctttctacaaagataaataagaaatacatgcatcctggaaagcatgattccattgaaggcattgaaaacattgataagatcattagaattgaccaaacacctataggcagaactccacgttccaatcctgcaacttatgtaggggtattcactcctataagggagctttttgctgaaactcctgaagccaaggcaagaggatacaaacctggaagattcagtttcaatgtaaagggaggaagatgcgagtcctgtttcggtgatggaatcatacagattgagatgcatttcctatctgacgtttatgttccttgtgaagtctgtaaaggaaagagatataatgaagaaaccttggatatccgatttaaaggcaaaaacatctatgaagtattagaaatgactgttgaagaagctttagagttctttgagaatattccaagagtggcaagaaagttgcagacattatatgatgtaggattaggatatataaagcttggacagcctgcaaccacattgtcaggtggtgaagcacaaagggtaaaattagctaaggagctttccaagacaagcacaggccaaacattatatattttggatgagcctactacaggtcttcactttgacgacattaagaaattattgaatgttttagacagattgactgatgcaggcaattctgttgttgttattgaacacaaccttgacgttattaaaacagcggattatattattgatttaggtcctgaaggtggagatggcggcggtgaagtcattgcaactggaacacctgaagagattgctgaatctggaacatatactggtgatttcttaaaagtagttttaaatgagaatagaactgctcttgcaaagcagttagttgaagaaaatagtgctaaatag

SEQ ID NO: 1126 - DNA, 969 bp, Methanobrevibacter ruminantium
  source 1..969: mol_type = genomic DNA
atgaaagggacatggaaacttaaattacgattatggctttctatggctgtcatgttcggtctggtttatgtactgatcatgcttgcaggaaatttcctaggatacagaggattctacggattctacgcaattgcaggactatttgtcctattcctccaatacatattcggtccaaagattgttgaaagctctatgggggttcattacttatccgaaagcgaagcccctgaactgcaccaaatggtagcggaattagctcaagcggcaaacattccaaaacctaaggtaggcatttcaaataccatggtgccaaatgcatttgcatatggaagatccaaacgcagcggacatgtatgtgtaaccaaaggaatattaggccttcttgaccatgatgagcttaaggcggtcttaggccatgagatatcccatatcaaacataatgatatggccattacaactgttgttagtgccataccattaatctgctattatttaggattctctttaatcttctccggaggtggaggagacaacaacaatggcggaggagcattaatcggctttttagctttgattgcatacttcctaggccaattgattgtactctttatctcaagagtaagggaatattatgcagatgctggaagcgtagagcttggatgccaacctgaaaaattagcttcagctctttataagcttgtttatggtgctgcaaggattccagagcaagaaatcaaggatgttgaaggaaccaaagcatttttcttaactgatatcagcaatgcaagaaatgaaatcaatgacttatcccagcttgacttcaatcgcgatggagttattagcaaagaagaattggatcagttaaaaaacaataatgtaaagatttcaggttccaataagattatggaaatgctctctacacatccagacatgcttaaaagaataaaaagattagctgatatgaattaa

SEQ ID NO: 1127 - DNA, 1593 bp, Methanobrevibacter ruminantium
  source 1..1593: mol_type = genomic DNA
atgttatgggtagataaataccggccaaagacttttaaggaagttgtcggtaacaacaaacaaaagaaggtcatagaggactggcttcaatcatggcaggatggaaatccgcaaaagcccttattattgataggacctgctggaaccggaaagaccactatagcacatatcatagccaatgagttcagcgaatacatagagttgaatgcaagtgacaagcgttctcaggatgtccttatgagcacaataggagaatcagccactaccaaatccctatttggtgaaaacaagaaactgattataatggatgaggtggatggtatccacggaaccaatgacagaggcggaaccagcgctttaaataagatcattaaaaacagcaaacagcctattgtaatgatggcaaatgatttctatagcaataagttaactacaatcaagaagaatgcacaagtcatcaagatggacaagatcagggcacctacaatcaataagttccttcgtgatgttgtccttaaaaatgaaggaatcgaagtggaccctgatgtgcttatgaagctttcaaaacgctccagcggagacttgcgttctgcaatcaataccttgcaggcattggttgaaaacggaggggaattgacagaagaaacccttgatacaaccggccagaaggacaatacagctacagtaatagacactgttacaagagtcctaaaaagcacaaatgcaatcaatgtaaaaaggtccctaagggaaaacaacgaagatcctacattggttatggaatatattgcagaaaacattccaagggaatatgaagataacaaggaaatcaaggatgcctatgaaatgataagcaaggcagacctattctttggaagggccagaagcagtagaaactatggctattggagatatgcttcagactttatgggtccaggtgttgccttatccaaaaagcagacctataaaaaattcactagggtaacaggccctatggcatttacattgatgggcagaacccgtggacaaagggcattaagggataggattgcagctaaaatggaagagaaaatgcatgtttcattacaggtcgcctataccattttcccatactttgaaataatgtttgaagatgacgtaaccgcttggcagatatcagactttttagaacttgaagaggatgaaattaaaagattcagaaagaaaaagatacctaaaaaggtcataactgctatggaaaaagtcaaagcggaaatgagagaagaagaaaaagaagagtggcgtaacagcattaaaaaaggtatattcgccaatgttccatctgaagcagatttagcagacaataatcttaataagaacttgattgatgaggattatattgaagatataacaattaaggaagatttaaataatatttcagatgatgaattggatgaaatagcaaatgaattttccttaaagccttccaaatcaagattggataaaggaaaaaatgatgctgataatgaggagaaaaaagataaagatgaagataaaaaggaaaagacagaggaaaaactagaaaaaggtcagactactttatttagtttttaa

SEQ ID NO: 1128 - DNA, 945 bp, Methanobrevibacter ruminantium
  source 1..945: mol_type = genomic DNA
atgttaggaccttgggtagaaaagtatagaccgcaaactttagacgacattgtaggacaaaagcatatcgtagaaagcctaaagaaatacgtagatcaaggaagcatgccaaacttaatgtttacaggtcctgcaggtgtaggtaagaccacttcagcacttgcacttgtaaaggcaatcttaggggactattggagacaaaacttcttagagcttaacgcatctgatgcaaggggaatcgaaacagtaagaacaaacattaagaatttctgtcgattgaaacctgtaggggctccatttagaatcatcttcttagacgaagtggacaatatgacaaaggacgctcagcatgcgttaagacgtgaaatggaaatgtataccaagacctgctcattcatactttcctgtaactattcttcaaaaatcattgacccaattcaatccagatgtgcaatattccgctttgcaccaataaaggctgaagagattgcagacagattaaaatacattgcagaggctgaaggatgcgaatacgaagaaaaggccatagaaaccatagtcctattcggcgaaggggatatgcgtaagtctgtaaatatgcttcagtctgcagcctccactggaaacataaccgaagaccatgtttatgaggttgtaactaaggcaagacctcaagagattaaggaaatggtcgatgcggccttaagaggcaagttcatggaatcccgtaatattttaagggatgttatgattcttcagggcacaagcggagaggatatggtaaaccagatctatcaggatgttgcaggcagagtcatggatggaaagatgagcggtgaagtctatatggaattgattggggcaattgcagacactgactttagaatcagggaaggagcaaacccaagaatccaattggaagctttacttgctaagtttttataa

SEQ ID NO: 1129 - DNA, 1482 bp, Methanobrevibacter ruminantium
  source 1..1482: mol_type = genomic DNA
atgatatgtccaaaatgtaatacagtaaacgatgataatgaaaaattttgtaaaaattgtggtttgcagctgaatacaactagaatatgtcctaattgtaacactgcaaataagccaaattccaaattttgtcataagtgtggtactaccttaagccctgtagatacatttaaaaaaggaattatagaagaaaatacaagcaattctttctttagtacatacaagatacctataatctgcgctttagttattttactggctatcggcgctgttacaggagtggctattttcggtggtgacggcaataatgggatcaattcaataatccctttggcaaatgacacatatgacgatacaaacttaaataattatggcgtaaatcatgacaatgtaagccaaactcaaagtgataactttacagaaaaccagactgacaacctaacagacaatcagactgtcaatcagactgttgaaaataaaacaaaaactgcaactgttcaaaatcagacagacaataataaaacaagcaataacgatacaaataaaacaaaagtctattctgaaaagactaacactacaaacagttcagcaaaagtcaacactgaaaagacaaatgcaactaacagttcagctaagacatatactgaaaagactaacactacaaacagttcagacaaagtctacagtgaaaagacaaattcaacaaacaatagtaaagtttacactgaaaagaccaataaaaccagtgatgataataaaaagaacgatacttcaattgatttgaaaactgatgataacctaacttcaattgacagtaagataaataatacagatgatgataataattctgtgattgtaatagataataagcaaaatgattctgatttaaatgattctgatgacttaaacaagaatggcttaaacgattcagatgatttaaacaagaatgatgacttaaatgattctgatgacttaaacaataattcagattcaggaaaagatacagacaatacattaaatgacacaactgatgataataaaggagatgatactatttctgacacaatagaaatgacagatgttccaaatcttgctcaagaagctgcaaataataattaccgcttctcttctataagttataaaggaaatgtatttacacaagcacaatgcattgacattttcagtgaatatatattgaatgtcaacaatggcgtattctctccaattaagattaattctgtcagttctgcatctagtccatctggagaagaccaaagtcagtctatttcccaatctgactatatcagcattgcaaacagagtccactcatggattgacagcaataatcaagttcctaattatgttggagtgagcgtaaaaggtcaagcggatctttctccaaataagatgcttgaattgttcggccaagttgtcttaaactatgcagttacaggagacatgccacaatctgttgatatctaa

SEQ ID NO: 1130 - DNA, 474 bp, Methanobrevibacter ruminantium
  source 1..474: mol_type = genomic DNA
atgaaatcaattgtttttaatatagactgtctgttgaattttttaaaggtaagaagatctgatttgttggaaaggaagtttaaaagaattataatctctaataaggtttataataatttatccaatccaagcatatcacaatacataagggacgacttaaatacacttattgataagaaatttattaaaatagaggaaatcaacttaaacacggctgttttcgagctttattatgaaattatcaataattatgataatgaaatattaggcgaaagcgaagcttcctccattgcacttgcagtcaagaataaaaagacacttgctttcaataatccaaaatcaattgagttttatctggaaaagtatgatataaaatgcattggcactaaagacattttaaatgatcttttagacaaaaaaattatatcaacagatgaattctatggcatactcaatgaattaaatcagtattaa

SEQ ID NO: 1131 - DNA, 777 bp, Methanobrevibacter ruminantium
  source 1..777: mol_type = genomic DNA
atgagagatagaataaaactaaattcatttgctgtcgaattgagaagagattgggagttgaacccatacagtccaatagacctattctctattgtattatccaaattacccgatttaacaatcattttttatccaatgtctgaaaatacaagcggcatgtgcataaaaaatattaatcttttcaatgaaaaggaattagaagaagaatgtgattccgatgacatggttgtatgcataaattcaaacatgtctaagggaaggcaaagattcaccttagcacatgaattataccatcttttatttgaagaggataaggaggacataattatctgtgaagattcaaataaggatgactctgaaatagaagctaatatatttgcttcttatttaataatgccttatgaggggttagagcgttattataaaacaaataatattggcaaatggaccttggaggataccattcgtgcagaacagttcttccagatgagccaccatgcaacgttatttagattaaaagaacaggaattcattacaaaagaagaatgcataaattttaggaaagtttttataggttatgaagccagaatcaatggattcagcgatgatctatatgttcaatccgaggaatctaaaaagtactattcattaggtaaatatattcgatcggttgaaaaagccttctcgaataagagaatatctagtggaaaaagagatgaattgcttttagatgctttcaggagtgatttaactttcaatttcaatgatggcttataa

SEQ ID NO: 1132 - DNA, 342 bp, Methanobrevibacter ruminantium
  source 1..342: mol_type = genomic DNA
atgaaaaaaataggacaacgtttacaaggattaagagaatcaaaaggattgtctcaatctgacttggctaactatttaggtatttcacagccactcctatcccagatagaagctggaaacagaaacctgaacctgtcattgctggataagctttgtgcattatacggatgcaccgattcctatattctttgtaaagatgacgaatataatgcagtaaacttttcctttagatcaaagaatgctgcaagggaagatttggattgcatttcttcagtacataagattgtcttgaacatgcgttttttaaacgaaatagacgaagatgatgagtctgaagaataa

SEQ ID NO: 1133 - DNA, 735 bp, Methanobrevibacter ruminantium
  source 1..735: mol_type = genomic DNA
atggcagttcctgaaataaatgaattatttttaccattgcttaagacaataaaagataaggatgaatataaggtaaaggacattacagatgaggttattgaaataatagaaatctctgaagaggataaaaacattaccttgcctaatggtgaaacattgatagaatctagaatcagcacagctaatacatacctaagaaaggctgatctaattgaatcaaacagattcctttactataatattactgatgaaggattgaaagtccttgaggaaaatccagatgaattgaaagaagaggatcttatggaaaactctgcttttaaagagttaaaggatgtttatactcatgatgatgtaactgaagagattccaaatccacaggacgctttaaaggcttctctacaaaagcaaatggaagatgtcagagcggaaatctccaatgatgtaattaaagagaatgaggttaaatacttcaggcctaaaaaccaaaaggaaaatgatgaaatctatgaaatcagaagccgcagggccaatctaaaagatgataaggataaatccaaaagaaaatgccatgacaagcatcatggacacaaacaccatcataaacataagtatattgtctataaggaattctctcctgcagatgaattgttaaagtatgcagaactctttgagagaggttatttaactaaagaagagtttgataagaaaaaagaagaattattgaaattataa

SEQ ID NO: 1134 - DNA, 1200 bp, Methanobrevibacter ruminantium
  source 1..1200: mol_type = genomic DNA
atgagttcaaaagtagatttagaaaaggcaagagaatacaataaagtaaagaagtatgaagagtccttatcatgctaccaatcttacttagaatctggtgaagaactacctgaaatagataaggaaagatatgcatgggacatatactttgcaagagtcaagaatgcaagcacaatagctgaattggaggaatatgtcaaggaactgaccaaatatgcaaagcaaaagaactcttcccgtagggaaaagccttgctcctataccatttccatacttaagctaatgaaattctattcagacaatatcacatttaacaacaatgcatataagcttatagcatgggctgataagttaaatcccgattacttaagcaataatcaggctaaaagggatgacactcataaatacaattcaaacaaggaaaactggtatctccagataaccaaagggctctttgaaattaaaaaatacgatgatgtgataaggctatccaatgaggccttggaaaagattccagaatttaataatttcaatgactattggttcaaatacaaaatagccaagtcctataaggaattaggagaatacgataagtccttagaatatttggatgaaatcgttaaggttaaaaacgattggttcatctatcatgaaatagctaaaaactattatttaaaagaagaccttgattcctctgccaaatgggctgctagagctgcattatctccagacggcaaggtagaaagcaaattgaaattgtatctattgattggagacattttaaaggccaaaggctatgaagatgaatatatcatgcataagtacttggtctatgtaatacgcaatgccaaggactggacccaagaggaaggctgggatgaggaattggcttcatatgagttggatcttgataatactgactacaaatcaatccataaggaactgtctgccctttggctcagcttaaaattcataggccaggaaagacaatatggtaagataactaaggtctttgaaaacaacaatggatttataaaatccggaaacaagtcttatttctttaatgcccgtgaattccaggatgataaaagctttatctatgaaggaacagaagtgtctttctttttagagaaggcttataataggaagaaagatgaagtggttgataatgctgtgaatatttactgtgaagagttttaa

SEQ ID NO: 1135 - DNA, 1197 bp, Methanobrevibacter ruminantium
  source 1..1197: mol_type = genomic DNA
ttgaaattttataacgatactgacatatttgtctttttaaatgaagaatatgctgattttgaaggaaatgaaatcgaatcaatcgaatctaatattgaagatgattttgattatctattcaatttttacgaggaaaaagaagaggattataatcatttagttgacttttatgatgaaaatctggagtcttttgaatttgattcattaatcaaggattatgaggattacatgaatcaaatagattcatttatcgatgataatcaatatagagaagataatatagaatcctttatagaagattatgaggatgaaggggaaatatttgatttgatcattgcaaaatatgaacaggaaagacaagaagaattggattactatgcagatgagtataaaaaccagataagtcccgatgatgtggaagagaaatactatgaccatattgaatctttagatgagatgcattataataactatgaagagtccatagaatcaaaatttgaggcctaccagtcaagtccaatcaataatcacatcgattatggcaacatgcatgaggtagataacttttcagactatttggattataaggacatggacactatcgattttgctttaagccaagccgattcctataatgagattgaccgctctccagaatgggatattataaatagtgatggtcctgaatacgatgaaccctttttcatagaggattttgatgattgcgacaatatagttgtggattatttggaaaacattcttccattagatgcagagcttgaaacattaattgaagatgacccatatgactctttagagaatcttattagctttgatgaggagatcaattcaaacattgaaggagagattgattttctaatttcaaataagctagaggaaatggaaaggtatgaatatgaggtagattcatatctggaatctcttttagaggataagaaagccattaataattcaatagaagcttatttagacagggaagaatacagagagtatgatgaatattatcagttcaatgacttggaacttgaagagatagaaaaccagggcatagattttgatgacttgaataatctagatggaacagctaatatctatttcaatagagacgaggaagatgaagagccatttgacttaaatgaggatatttattatggtgattatcagtacgatgagtaa

SEQ ID NO: 1136 - DNA, 4641 bp, Methanobrevibacter ruminantium
  source 1..4641: mol_type = genomic DNA
atggaaactatagcagaaaaccagaatacagaatttgaactaaatgaataccaagaggaagctgtcacatactatggcgaaaagcctctcttgattgaagcaggtccaggttcaggtaaaaccagagttattaccgaaagggtaaggtacctggtagaagaaaaggaaatggacccagaatcattcttaataattactttttctaataaggcagctcgtgagcttaaagaaagattaatggactattttgatgtggatataatcaatcaaatgcagatatccactgtacactctttttgttataaactattaatcgaaaacactaacattacctataaaatccttgatgatgattatggaacaaaaaagaacatgttcatatataagaatagagaacgacttgggtttaaaagagagtctacattaactagaggaaaggtaaaggatgtagtggctgcttttgacaaatattctacttttgatgtggatacagaaaaactggtagaatggataaaggagaatgaaccagtttcccaagattatattgattttgtaaacgaagaatatagaaaaaccggcaagtttccaagaaagaagatagatcttgataaaaagaaaaagaatctgaaaactgctactgattatcatgcctatgcagattcctggtataatgcattgcaccttcaagtggcaaaggcatatccaatctataaaaaacttttagatgagcacaattatcttgattttaacatccttcaggtaaaggctcttgaatacttaaaggaaaacccagaaacccaatatacaaacattcttgttgatgagtttcaagatacagaccctgtacagattgaaatatttgaaatattaatgaaaaatgctttaaatcccatagaaaaaagtaaagatgatgctgaagaagattgtccccctattagtgaattagaactagatgaagcggaaatctctgataagaaaataacatcctcatttactgctgtaggagatatggaccaaagtatatatggatttagaggggctttggaaaattactttgaatattttgataataaatattgctgtaaaaaagttggattaaacgtcaattaccgctctactaatgagattattgagttcagtgaacaatacataaagatgcaaaggggtaaaaaatctagaaagaatttaagagaggcccgtaaagagtcaagaaacatctactatatagaaaacgaagaaagggaaatggaagcggcaagcattgccaaaatcatcaaaggacttaaggatgaggaaaagattaaaaactacaatgatgttgccgtcttgcttagatctgtcctcacttcctctaaagacataatcaacgtattcaatgatgagaacattccatttcaggtaaagggattgcaggaccttgaaaacaaggatgagataaaatccatcttaactctattgcatttcataattgaagacgataaccctcaagaaactccaataatcacattctgggaagctgactggcttaacctaagggcatttacaaatgcagactttaagcagacctttataaaattatcctctgaaacagaggaaatattgattgaaaagcaaaaggaatttgaagaaaatgtctttaattatgctaaattaatttataatgacatcacagggaatagatttacaaaaagaagctataagggagttttagagcttgaagatgaagttcttgatgctgtttttaaggaatatcctaaacctgtattaacaaataaaacccttagagaatatggaattactaatgaagatgatttagaattcttcaatcaattgaatgagcttaaatttgaaatattcggtgatgataaggactttgatgaaaggcctaccatattgaatgtctattataggatccttgagatatgcggtttcttaagtgaagactatatatttgaccctaaaaacaagcaagctttggattatattgggctttttacccaaatcatctacgaatatgaaaacatcatatccaacagagacataagaggcctttactggttcttaaactctaatatcaagaattacagctatgacattgaaaatgaaaatggcgtaaacataatgaccattcataagtccaagggattggagtttccagttgtcattcttgcaggcttgaacgactcatctttcccaagggaatatgaagacctaagagaaaccaaatataagaatggaagcgctgtattctacactccaagggaatgcctaagatataaaagccttgataaggatgatgtcacactccattatgaggaagaggaaaggaatatctatgtggctatgaccagggctcaggaccttcttattttatctaaaaactttaaaaatcctaaaaagaccacttattccaagaccttggaaaaggaaatcaaagcaatcgagctaaaggaaaagataagtagtattaaggatgagcttgatgagctgatgaaaaaagaggatgttaatgatttatccttccttcttaagagcttgaatgatgagttaaaagatataagggcagaacttaaggaattgaagcctcttattaaagatcataaaaagattaaggttctaaataagcaattgaaagaactttccattgaaataaaatggaagataaaagacttaaaatacgaagataagattatggatgatcttattgacttattcaatcttgatgaggatagtggattaacaagggatgatttaaagaatatgttcttgaatgactttgacattggtgaaaataatgaggattctgatgaatctgagaatagttttgaggatataatcaatgattcaactattgataaagaattagataacgataatacatccatagattcattaagtagtaataataaacctatagaagactactttgaagataaagaagcattatcagacatattagtccgtactgaaaatgaaattgcaggattaggtgaggatatagaaaaatcactaaagagaaccaaaaagctcttatctaagcttaaggagcttcaagatgatgacttaaatgattcaatgtctgaaattcacttcaaatataagatggaaatccaatcaatcattgaaggggccattgaaagcaatgaagatgattccctcagcaagaatcaaattgccttaaatgcattgtactgcatgctccagtcaatcgagtctgaaataatggaaaacaaagaaaccatggaatcaaataaggagatcttaaagcgagaaaaagagttgaacaataaaaaatcatacttggattataaaatcaagctaattaaagacactgaagaattcgacaagaaatatgacatgggatatagtataagcagttatgaggaatacaagataaaagaggacttggatgaactcagcaaagtgcttatggatgattcagtcaactccattggagatttggcactcttaagagaaaaggttctggaagctggaagtccaaagctttgtgaggacttcataatcaattgggaattgattgaatctctatttaatgatgacaaatttgccaaactggaacttctctttaagataatggaatctgaagagattgataatattaggcatatgtcaatcctaaatgacagaacagagctcaaggagaaaaccaaactcttcttcatgttattctactataagaaccaagagattgaatataaggagaaattatccttcatcaataagaaaaaggaccatcttggcaatttaatcaatgcatatgatggaattataaagattgaacctaccgaaatcgacaaggtaatagatgaaaggaagattccaaatgttattgtaatagaggatgacaagaagctaaccttaagctacagttccattcagacctatgaatcctgtcctttccagtatcatttagcctacaactataagttcaagatttcagatagggaagcaattactgaaggaaatatcaatcacaattccttagaggaaataaataagacaatcattgaaagaaaggatgaaaaagaaggagaattagttggagaaatagacaatgaacttctcatttcaagagatgaaatcattaaaatcgtcaagagaatctatatggaaagccctaatatagaccgtgacgaaactcctatagactatgttctatcaaatatctttgaatattgggacaattatggcagaagatttgatatcattggctctgaatatcaatttgacatcaatagagaggactattttgttttaatcggttccattgacttattatataaaacagataatggaattgttatcttagactataagacaactgaaaacatctctaaaaaagctcaagagaaatataaaaagcaattatatacttatgctttagctttaaaggatgatccaatgtataatgatgcagttgttgataagctgcagatatatgcaatcaaatctcttgaaatgcttgactttgagctaaatgaagaagagagggatgaaagagaagagaagattagggaaattgcatctaacattaggaatgaggaattccattcaaaaggttatgacgagttctctgaatgttcattctgcagatatagttttatttgtgaaaacaattaa

SEQ ID NO: 1137 - DNA, 1209 bp, Methanobrevibacter ruminantium
  source 1..1209: mol_type = genomic DNA
atgaaatatgttattgttatagaagatggtgctagtgattatcctatagaagagatagatggaaaaactccacttaaggtagcagaaaagcctgcattggatagaatagctagagaaggacgtacaggccttattcaaaatgtgccagaaagccttcctccaggctctgatgtggctaacatgagcatattcggctatgatccattgctatactacacaggcagaggaccattggaagctgcaagcatgggagttgaaaccaaagatggagatgtggtcttccgctgcaatacaatcacagaacgtgacggccttatggcaagctcaaatgcaggacatatatcctctgaggaagctgcagaacttatggagtacttaaatgaatacttcaatgacaagtatcctggctttaaaggcaagttctatcctggagtaagctacagacacttatttgtatacaatgataaggaaaatgcagaaaagctagctaaattggacatggttcctccacatgactttgttggagagacaatcgctgataagatagagtttgattcctttgcagatgaagttaagtcaataatgctggaatcaaaggaagccctagaaaaccatccggtaaaccttaagagaattgaagaaggaaaagagccttccaatatggtttggttctggggtcaaggaacaatgcctgcaatgccaagcatgaaagaagtttatggcctaaagggagctgtaataactggcgttgacctaattaaaggattaggcgtatgttcaggatgcactaacctagatgttccaggagcaactgcattctttgatactgattataatgccaaaggagaatatgcaattgatgccttaaaggataatgacattgtatttgttcatatagaagcacctgatgaggcaggccatgctaaaaacctagaggaaaaggtcagaggcattgaaaatattgataaacatatattagcccctctacttgaggcacttccagaatatggtgactttaagatagctgttttgccggatcatcctactccaatagatgttggaacccacacaagagatatggtccctattgccatctattcaactgtagatgagccagatgatgtccaagtctatgatgaggacagtgttaaagagggttctcttggtgaattgacagggtgtaatctcttaaaattgctattggaataa

SEQ ID NO: 1138 - DNA, 1017 bp, Methanobrevibacter ruminantium
  source 1..1017: mol_type = genomic DNA
atggatgaatgtaaacttgtattaatcggttttggcgctgtaggccaaggtgttgcacgtgcaatatccatgaaaaaggaaatgatcaatgagaagtttggcataagcctaaaagtagttgcagctggtgattcatccagctctgcaatatgccaagacggtttggatgaggaattgctccttaagactaaagaggaaactggcaaattagcaaactatcctgaatatggaagcgacatctctggaattgacattttagatgcagttgactatgacgtactcattgaagcaactccaaccaatattgtagatgcagagcctgcaaaatccttgacattgaaggcatttgcagatggaaaggatgttgtaacctcaaataagggacaccttgcacttttctataaggaaataattgaagctaaggaaaaggcaggagtcgactttaagtttgaagcctcagtcggcggagccatgcctataatcaacctatgtcaggaaacattggcaagctgtggaatcagctcaataaaaggaattttaaacggtacaaccaattatatcctttcaagaatgacaacagaaggcatgacctatgagaataccttagcagagtcccaacaattaggtattgctgaaactgaccctacacaagacgtagagggtattgatgcagcatgtaaggtagtaatcttggctaattctgttttaggaatcgatgcaacctatgatgatgttgaagttaggggaatatcagatgtttcattagaggcaatcaatctggccaaggaagaaggctattatgtcaagttgattggtgaagtgtccagaaaacaattgaaggtatctccaagacttgttaagaaaaacagtccatttgcaatagacggtaccttgaaccttgcaaacattacaacagaccttgcagatgacatcactgtaatgggtaaaggtgcaggttccttggaaaccgcttcagccatgcttacagatttgattaatattataaagaataagtaa

SEQ ID NO: 1139 - DNA, 486 bp, Methanobrevibacter ruminantium
  source 1..486: mol_type = genomic DNA
atgagaatgaacttaattcttgaaatattggatgttcctggacaattggtttccatattaggccctattggtgagcttggagctaatctggtaaccattgtacacaaaagagagataagaactgaagaaggcaaagtgcctgttcaaatagctcttgaaggagaaagggaaaaccttcaagcagttgttgataaatttaaggagatgggagtaaaccttatagaagtggatgatacaatcaagaaggaaaagctaagcactatcctttacggacatatcatagacactgacttaagagacaccgtcgataagatcaacgctgtggaaggacttgtcgtaagtgatttacaattaaaattagatggcgaactcaaatcaactgcactgcttacaatcgagcttgatttaggaaaaagggaaatagcctatgataaggttatggaaattgctaaagagaaggactttttagtgattgatgaggtctaa

SEQ ID NO: 1140 - DNA, 216 bp, Methanobrevibacter ruminantium
  source 1..216: mol_type = genomic DNA
atggcaattgaaaaagatgcagaaaaaatattagaagaattttcaaaaaccttggatcaagttccagaattggaaggaacttattatattacagataaccttaatcttaatcgtgaagatgaatctgaagaaaaggacgctagtaaaattgtcagaaatgctagaactgacaaagatggtaatgttattgtaaaaagagcagattggactggttaa

SEQ ID NO: 1141 - DNA, 1812 bp, Methanobrevibacter ruminantium
  source 1..1812: mol_type = genomic DNA
atgtgcggctgtataggtctggtaggaaattttaataaagaattactattttctatgatggaatctactaaacataggggaatggattcaagcggatattatttatacaataagggttcatctgaatcactctatgaaaataatttcattttagataatagaaaatctttcaatgaatcatctatggaagataatgattccaatcaatgttctacaataggccttggacataatctattgtccatatttaatctaatcaatgaaaaaagagaaataacagacaatatcaatgaaaacagacagccgatcatattggataatcttgtattcatattcaatggagagatatataatttcaataagcttgaaagctttctaaaggaaaacaatgaaaattatgtaaagtccaaaagtgacagtcaactattggctaatttgattcaatattattataaagagacaaattcaggcaatcaggaaaatcctcttttagaatctgtaaaagaagtcgtaggtcaattggatggagactatgcgtttgcaatatatgataaggataatgatgatttggccatatcaagagattccattggagtaaagcctttattttatgctgtaactgataatctgaaaggatttgcatctgaaaggaaagcactttggaaggctggatttgaagatagtgacataaaggatttaaagccaggatccattctatacaactttgaagaaattgatttagatgatgatttgataaatgaaatcataaatactgactttaaattgcttaaatcttcatttgatgactataaatcctatttggacactaaagatacctatgatgtttataaagagctcttggctgatgatatatatgaggcagttgaaaagcgtgttgaaaacatagtagatataggccttatattctctggaggagttgacagtactattttagcggtcattctaaagagcattgcagaaaaaaggcaaaagcaaattgattcagttaataataaatcttcagatttggataacgtgtttttaaatggtttgggggaaactagcaatccatcaaataattcactagaaaatagcaaatcatcaaatgacttttcagaaaatgttaagccattaaacataaggctatatgcagtaggacttgaaaactcacaggatatcgaattcagcaaaagggttgccaaagatttagatttagacttaaagacaataattatagatgaagatacaatcagaaagagcgttccagatgtgctgactgccatagaagacccaaacatcatgaagcttggcgttggaatgaccatataccttgcaactaaggcaatccatgaagataatataaaggtagctctatctggacagggtgcagatgagctctttggtggatataacagatatctgaaacattttgataatcacactctatttgatgcatattttgacttggatgaagagatatatcatgacattgcaaacatatatcacgtcaatcttgaaagggatgatgcagttgcaatggccaatggggtagaactaagggttccgtttttagataaggatgtaattagccttgcattggatattccagggaaattcaagataaaagatggtgatgaccttcttagaaagcatatattaagggacttggctaaggacattggagtggctgaatatattgcagacagacctaagaaggctgctcaatacggctctggcataaataagattctaaaaaagaaagttttgagaagctttaacattgaagagtttgtagaatccttaaaacattag

SEQ ID NO: 1142 - DNA, 267 bp, Methanobrevibacter ruminantium
  source 1..267: mol_type = genomic DNA
atggcaaagaaaaatatataccttgcaatgattctttcttttttcattccaggtttaggtttagcgtatgacggtgtagttaaaaagttcctaggatattttattctgggattgatttttattggactatggttttacttcggtatgcctctagatgctgagataagcaatacaggtttctgttgttacttggcatatattatcgtttggatctttggtttatatgatactttaagaaccacaatcgatataaataggggagaataa

SEQ ID NO: 1143 - DNA, 1137 bp, Methanobrevibacter ruminantium
  source 1..1137: mol_type = genomic DNA
atggctgaatttagtcttgatgtagaagaaattaaagaagaagttgaaaaaagtttccaagaagaggaaaaaacaattcctaatgacaaaatcaagaagcaagctgagcaaaacgctatcgctatctttgaagcagactttgatgatgcagcccaaagggaaggaatcatcaagcctttagacgactttggtataaatgccattaaccgttcctctgctaaaaacagtcttttaagcacacgctttaaagagatgtccaaaggaggatcagaagctgacaatgtaggtgacaagttagctgacttaaaccgtcaggtcaaggctttagacccaagcaaagtggacttcaccagaacaggattcctcggaaaccttttccatccggtgagaaaatactttgacagatacgaaaaggctgaagtcgttattggaaacatcatcgaatccctagataacagtagcaaggtcttgcagaatgacaatacaaccctcttatccgaggaaacttatcttagggaattgaccaaaaagctcatgaccgacattgagcttgcaaaggaaatggacgaatccattgaggttcaaatcagaaacgctgaaatccaaggggttgaccaatacaagattgactttgtaagggaagaggttttattccctctcagacaaagaataatggacatgcaacagatgattgttgttaaccagcaaggtatcgtttccttgaatgtagtcagaagaaacaacaaggagcttatccgcggtatctcccgtgctaaaaacgtaactgtaaccgctcttagaaccggtgtaatggttgcaagcgcattgtacaatcaaaagattgcaatggataagatcaaggtcctaaatgaaaccactgaagacgttatcgaatccacttcaaagatcttaagggagcaaggaagtcaaatccaaaagacagcttctgaaaccatgatctctcctgaagtattgaagacttcattcaatgaggcattagctgcaattgaagatgtaagcaattacaaacagcaagctcttccaaaaatgcaagagaccattattgcatttaatgaaatggctcaggaaggtcaaaaggtcattgataaaattgaaatcggaaacaatacccaataa

SEQ ID NO: 1144 - DNA, 453 bp, Methanobrevibacter ruminantium
  source 1..453: mol_type = genomic DNA
atgactgaagagataaaaaagaagataaaggacatgaactttgagggagactttcaaagtcttgacttatataaggaagccttgtttgatttgaatcagcaattcttctcaaaaaaggcaaaactaagcaatttgattgaagaaaactatcaatatacaaattataactatgacaggctcttgaatattgttttccatctggaaaagatgttcaatgaggaatataagtcaatcctatcaataatacagctctcatataagaacaatgtggtgatagatcagctactgcagaagaagtttaaatcattgatatcaataattgataagacagattccttatatgatgatttggttcttaatttatccctttcggattcaaatgaaaatcaaagaaacatatctgttctagaaagcatggattctcttatagattctgttaaatactacaaataa

SEQ ID NO: 1145 - DNA, 510 bp, Methanobrevibacter ruminantium
  source 1..510: mol_type = genomic DNA
atgaaacgatataatcattgtatttattgtggctataaattacatagcgatgatgttttctgtcccaattgcggggtcaagatcggctatgtggacgatcagtccgtttcccttcccttaagcaaatacaaagagcaggtattagagctaagggatgaatatgaaaagaaggaaaaggaagtgctgagtcttgtagaaaaacgtttcgcaccgccacaattgacttatcatagatttataggggaaattgataattgcagggtattgttcttcagggaagctgaatcaatacttgacattatcaatctggtaaccgaacttagtccaaagatagaaactgaaatcaagaaaaagatagaccttctaaagaaaatcatagatcagatgaatgacctgatcaatgaattgattataaatatgggggataaggaagaatctgaaaatgaagttaaaatcgttttggatgatatgaaaaatctgattgattctgtaaaggattatgacttttag

SEQ ID NO: 1146 - DNA, 1287 bp, Methanobrevibacter ruminantium
  source 1..1287: mol_type = genomic DNA
atgactaaaaagtatggagatagaaccttagaagtgcatgcaggtcaggaagaggcagatccttttaccggcgcaagggctgcgcctatctatcagacaagctcatatgtatttgaaagcgctgaatatgcagcaaacatatttgcccttaaggagcctggaaacatctatacaagacttaacaaccctaccaatgaagtctttgaaaagagggttgcagcaatcgaaggaggcgtgggagcactatcccaagcaagcggaatggcagcaatcacccttgcaatactaaacatcgctcaatgcggagatgagatagtttccggaaacaacctttacggaggaacattcaacctatttaaaaataccttaagcaagtttggaataaaggtaaactttgtagattcccaagacaccaaggcctttgaggatgcgattaatgagaatacaaaggcactttactgcgaatcaatcggaaaccctaagctggatgttccggactttgaagttctagcggacattgcacacaggcatggaattcctttgatggtggacaatacctctgcaataggcatggtaaagccaatagagcatggagcagacattgtagtccattcagctacaaagatcattggaggacacggaacttcccttggaggaacaattgttggattcagggtaactttcgactgggaccaaacggcaagttccccagagtttacagagcctgatgacagctatcatggattgatttatactgaagcattcggcaatgcagcatacattacaaaggcacgtgttcagatgatgagagaccttggtacatgcataagcccatttaactcatttctacttcttcaaggacttgaaaccatgtcccttagggttaagcaacatacagagaatgcccttgaagttgcaaagttcttagacaatcatgagcttgtatcatgggtcaactatcctggccttgaagacaatccaaaccatgagattgctaaaaagtatttaggagacaaattcggctgcgttcttggatttggaataaaaggaggaatagaggaaggcaagaagtttattgaaagcgttgaactattatcccaccttgctaacatatgtgatgctaagacattggttgtgcatcctgcttccacaacacattccacattaagccctgaagagcaaatagcaaatggagtgactccagactttattaggatgtctgtgggaattgagaatgtggaagatatcattgctgatattgatcaggcgttaaaaaaaagcggttga

SEQ ID NO: 1147 - DNA, 648 bp, Methanobrevibacter ruminantium
  source 1..648: mol_type = genomic DNA
atgacagataatgaattgaaactggaaacaaagtgctatgatgcctgtgaatatggctacctttatggattgaataagaagatacctgatgaagactgggaaaaggtaaagccctatatgagaaaatggaaaagaatggactttgtagaaggcaatatcaaggtaacaggaaggcctgaaggatacaggtgcctggaggaagatgttgccaaggttgaagagatacttggaataacaaacactcttgcaaaaagaagggcaaatattgaagagaaaatgtctgaccctataaaaaaggttcagtttaaggaccaatgctataattggttgaatatgctatttaaaagcggaacacagccaaaacaagacctgtccagacttgcaatccattcaacaaagatctatgaccctgcagacagctttaaaaacggagcagaagatggctatggagagcttttcatctataccccacatggaatgtggtatgtaatcaataatggaagcgatgctgccaacaagtctttaaataatctagaaagcaagtttggaggggccattggatataggttgatgtatgctgatactgtagataccttaattagagtatatacagaggaaaatgagtatactgggccacaattatattag

SEQ ID NO: 1148 - DNA, 2235 bp, Methanobrevibacter ruminantium
  source 1..2235: mol_type = genomic DNA
atggaagatgataatttagaattcaacgagctcttgaatgacctagagccacatatttttaattttattttagataatctctctgaagttccatccgatctatcaaaaaaggaacagatagaattcatcacatccaactacagccaggacacaatagatgacctgatagacgaatacaatacatttgaaatagaggcaacagaaactttagactctcttgaagatgatatctttggtctagttgcaatgggccttgacgttccagaggacgacaaggaggagcagattagctatataatcacaaattactccaaggataagatagaatacgccatatatgaagctgaattgaaaagggaaatcatagctgaactggaggaattggatgatgagtacttcaatctgattgtttgccacttcaacctatctgatgagattggggaaagggaaaccctcattaactgcatttttgataactattcaataagccaaatgaaaactgcaattgagatagcagataagaagatggtcttctataatgatatgcttggatttgatgatgacgtattttcattcatatgctttaactattcctctctagactataataacctcaaggctttggaaaataaagagagccgtaaggataaggcatattatcttatttcaaactactctccaactgagctacaccaaaaggccagtgaattttttgcaaagatagacctcttcaacagcctggactcattggatgaggtcttatttagaatccttataaagaacatgaatgcatacagcttctttttagaccgccttgacataatatataaccttatgatcaactattcagactatatcatttatattgaaatggacaaggcaagggaaagctttaagacctatgatgagcttagaaacctggaagacattaagctgctgttccttgcaaattatctcaatgctccagaggaaatgatagaaaactggataaaggtctctgattttgacaataatatcttcaaggactatgacgttaacccaaagaaccatataatcagcttttatatagatgatgaagaggaagaaaaagaggaagagcctaaagtaaaaagaaacaatctctttggtatcaattactttgacataaatccattggaattgtctccaaaggaagagattgcctattatatctataagaacaagtctgaggaagacataatagaagggcttaattcattccctaatgtgattgtggacagcgatggcaatcttgtagagggcatgaatgattccatatcaaattctaatcttaataatcctgctgatagtgatattaatgatatagatgattctgataataaagagagtgataatattagttctaatgatgattctactgtaaaagtaaatattgaaggagcagatgatggaaaatcagatgaagttgaagtaaaaatttcagatgatgaagattcagattctactgaaaatttagatgaatcagataaagattcaaattcttctgaagacttagaagaaacacaagcttcacaagcacctgaaaaagatagttcacgtcctgaagtatctaaagaagaatttacaaagatgctaaatgaattggatggggacgtattcaagattctaactaaaaagctagcaattgtagaaaacaataaggtatctatcatagaccatatcgtatctaactacaactactacgaaatagaagatagaatcaagcttatctcatttaaaaaggaccactatgttcgtttagatgccttggatgatgccacattcaacatattcttgaaagagttttcaactgttcctaattcattcaatcgctttgaaaagatagactatatcataaacaactattcctatggctatatagaatccagattggagatggttctagatgacattagagagataaaaagatcattagccgatgatgatgtcttctttgagatagccacatactttaaattgcctctccatgccactaaggaagagcagatcgatcaccttctaatcaattatgacttgattagagttcgaaaaagaatcgctttctatgagggcaagcttcacgtagaaggcttaattaggggcatagttgataaaaacaagatagaatgtccttattgtggtgctaagattagaaaagatgctaaatactgtaccaattgcggtgaaaagctaagcattaacattaatattgattaa

SEQ ID NO: 1149 - DNA, 747 bp, Methanobrevibacter ruminantium
  source 1..747: mol_type = genomic DNA
gtggacttaaaagacgtttattattcttcaaaaccctatactcaagaggaatttgaaagtatcataataaatgcttataaatatgtctgtgaggagattgaaaccaaaaataaacgttttcaggcatgtcatgattttgaaccatgttttatttgctggaacatcgaattggaagggaatgaatttacaaaatggatagaggaaaattctgatcttagagtaataaataaattcaatgcttcaatggatgttggggttctaggctcatttacagaagatactattaagctggaaaatggcattgatctatctaaaattccaagatgcaaaggaaaatgcgatagggaatatttctttaatgaggaatgcttctttgaaagaagaaggctaagagagaaaatagggtcaattgaagatatggaactaattaatccttcttcaatatttgaattcattgattataaagaagaattcattgatttaatcatagaaagcgttaatcttataaaaaatcattttccaaaggcaaaaatttatttaaaatataattgggatcatgaatattgggatttaacttcaatctgtggaaatatttatctaaaagacggaaataatgatgaaaactatagtatttataaatataaactctttccagactttgttaaattaagaaagtcctatggtgatttcaattattatatagaaatgatagatagcgatgaattggatgaacttttaaaaaattga

SEQ ID NO: 1150 - DNA, 795 bp, Methanobrevibacter ruminantium
  source 1..795: mol_type = genomic DNA
gtggatataaagactctccaaaaaagagccatatattatagcgaaagcaaatatacaagggatgaattcgaaagcataattatcggtgcattcagatatgtctgtgaagagattattcctaatctttccaactttactcgctgtggctttgatttgaattttgaaaggatttgctttgccaaaggagtcaatgggtatttaaataaatggattgaggaaaactctgatttaagaattctaagaagcactgaaatatcaatggatataggaaaccccttcagtccgaaatatgatacatataaacttcttgataatatagattatgcaaagatgcctgattgcaagttggaatgcccaaacaatgaggactatgaaaagatctggagaagaaagcattgctactgggaaagagaaaaggtcaaggaaagattaaactccattgaaggtttgatattggtaaatccaaatgaaatctacaggtttgtacttaagaaggacaatttcattgactatattgaaagcactatggatttgattagaaagcattttccaatggctgtagttattttgcagtttagtccagaccctgaatgcgaaacctatgacattctttcagctgtaatatatgatgccgatggagactatgactattcttttttagtccagaatgaggaatttacagaggaaaactgggccttgattgattattacgatatacatgaccttatccttaaattaacaaaaagtgatgaatattataaaagtttgattgaaaagaatttagaaagcgaatag

SEQ ID NO: 1151 - DNA, 447 bp, Methanobrevibacter ruminantium
  source 1..447: mol_type = genomic DNA
atgtataaattaaagaattttttaaaaggacattttgcaaaaagcaaagtcgaagacttgaattttcactgtaagatcaatgagaattttcttttgataaatccaaatgaaatctatgattttataggtgaaaataatagtttaatagaattaattaacattagtttcacattaataaaaaaatattttccagattcaaccatatatttggaatttaatcaagaccctgaatatgagggattgaattcaatctttgccaatatttatgatggtacaaattcctatgattgtaatatggatttatttgaagatttatcccttgaatttagagaattaaaaaagcaatatgggaaaatggattattttttagatatggtgtctgttgatgagccttttagaaataggctaaatgataaatttgatgggtttttaaagatagtaagatga

SEQ ID NO: 1152 - DNA, 360 bp, Methanobrevibacter ruminantium
  source 1..360: mol_type = genomic DNA
atgagctttgattgggaaagatttatagatgtggctgaacatttaagaaactattccaatagggaagagtatcaaaggacagcagttggtcgttattattatacttgttttttaatagcaagagacatctattatgatatggccaaagtgcctgagggaacatttgtatctcatgaatctgtaataacattttttgaaaagtcaaaaaaggatattgagaaagatttgggcactaaattgagaaatttaagaagaagacgtaataatgcggattatgataaggaattccgttttgctgatttaaatgacatcaaaaaaagatataaggacattattactttgcttgacaaattgaaataa

SEQ ID NO: 1153 - DNA, 432 bp, Methanobrevibacter ruminantium
  source 1..432: mol_type = genomic DNA
atgaataacaaaactagaatggtggttggtaggcactcaaaaagaacaggtcctgagatggatcaaattgtagaaaagtactacttctttgaagaaggctttgctgggctaatgatgctctttgaagaggactggtttgtggataagcttttagagttgaaggatcttgtccttgagcactatgatgatgtggtattctacttcttcaatcttaccctaaaaagcgatcttgaaagctgctgctttttggtgacagtcattgtgaagaaggatgatggccatgagatgtccaagtcccatatacgctctctgatttccgataggatcaatgatggctcaaagcttccctttatgataaatcttgttgaagtgagcgatcctctggaatttaagagatatacgcagggggaaataggacctcataaagactga

SEQ ID NO: 1154 - DNA, 402 bp, Methanobrevibacter ruminantium
  source 1..402: mol_type = genomic DNA
atgcaagtggcaatagctaaaaaggaaaatggagaaatattggaattggatgatataagctaccaatttgtcttatggctaaacgaaaacaacctaacccaacttgatccaatatatgcaaagtccgttctaaagactacagttggagagttcagcaagcttaccagccagcatgagtttgaaggtgaggatgagatgcttgttcctcagctcaactactttgtagagctttcaacatgggcttcctggaaggatggcaagcttatggatgaggatgaggaaataacaatatcctttgagatatgtgatgtggtcttcaatagggagactatgaaagaggaataccatccgattgaaatgacttatatgaagtctttcatagagtcttttttagaaaaataa

SEQ ID NO: 1155 - DNA, 1836 bp, Methanobrevibacter ruminantium
  source 1..1836: mol_type = genomic DNA
atgacactaacagcagaacagcaaagaattgcagatgatatgtgcagagagcttgcaccaatcacattcatacaaggaaaggcgggaagcggaaagacccacctcatcaatgagctcatcaatctattggagatagatgagatattgtgccctacaaatcttgcaaagcagttatatgggcgcaatgcaagaacaatacattccttcttttttcatgagtttgataaaattgaagaaggctatcagaaccctaaggcttatgatggggttcgaaatgactatttcctcagaaacatagcctttacaaagataatagtaattgatgaagtttccatggtcagatccgaccttatggagatgatacataagattctatcaactgctcttaagaacgacagtccctttggtggaataaagatgatacttgttggagacatgttccaactgcctccgattgtagaatccgaggaaacctatgaatatctgaaaaatgaatatggcgggctgtacttctttgacagccatgtaattcgtaataatctttcccaaatcaagttctatgagctgaacgagtcagtgcgacataaggatgactccgattgggtaaatatgttagatatgttacgtgaagtgcctaagtttgaaagggtccttcctattttagaaaagatcaacacccgtgtcgtttctcccgatgagattccagagaatatcactgcaataactccttccaatgctgaagcaaacagaatcaacagaaggcagttggataagatttccggagaggaattctcttcaagagctcatttcagaattaaggagctggattcaaaggattatttggaattttattacagcgaagaccctatgaaaatagacatgcaaaaatattatccaattgaagttccttccagattcgaagccttcttaagatataagataggggctcgtgtcatgttaaccggatctgttatgggcggaggtaaaaatggagatttcggcactatagtggatagggagataatcagggattatgatgatagcataacagaaatcattaaagtgaaattggaaaagaataatcaggtagtctctgtaactcttgacgctttcagcgctgtggattataagtatgaaatggaatatgatcctacatcccatagcttaagacgtaagacaccttatattcagcgtgttaaacaatacccattaaagctaggctatgcattcaccatacataagtcacagggccaaagctttcctgaaatggttttggacttgaaaagcaatatttttgcttcaggacagttatatgttgccttaagtcgtgtgaagaaattggagggcttgtatctgacaaagcctatcgcttttagtgatattattatagatgaaaggataattcaattcttggattcattaaggaatagagaatttgatgttccagaggatggctcttcaattggctctcaagaagtattaatctctaaaaagactcctttaaatgatttgtttgaggactttttgcatgagacagaaagccaagctgaaaatgaggtgaataggacaatccataggctggttgattatgcctatgccctatatcaggtagatgaatatgatatgattttacttgagataaaaaagatagctcaaattatttctaaccaattcctcattccacaagaggatatggagtttattgaaaaagttaagactatgtctgatgataaaatagatgaatctatctgtacttcagtactgttcaatctttatgatgtctataaaagggtacatgatgatcccaaccctatagtagtggataagattcattaa

SEQ ID NO: 1156 - DNA, 1701 bp, Methanobrevibacter ruminantium
  source 1..1701: mol_type = genomic DNA
atgctaataaacattaaaattaaaaatttcagatcactcaaggactttgaaatgaacttcaatccaggcctaaatgtaataataggagagaacgatgcaggcaagacatccttaatagactctctaaaaatactatttgggctgaagaagatagatataaatgactataacgaagtgggctgtccaataacaatagctcttgatgagtcaaacttccattactgccttgaatcaaggatagtggaggacactgtggtaaacacattctatctcaagcccaccgaagataaaataaatgaaatgaagacccgcctaaacgggatggatgaactgaaggaagccgaggcaagaaagatgcttaaggagtactgctccatcttcgacatcagctatcgctccaacagtattatggaaaacctcaagtcaaagatacttgaatcaatggaatctgatgaatacaccaaggttaaaagctttagctatccaataagcttcttgggaagccgcgaatttgaaaacatagactcattctttgaaaacactttcttcaaggagctgaaggaggagatatggaacatacatattggggataagaccctcaaccagcatatagatgactatatagaagagttcaaaaacgaacagctttccaatcaggatgcagaggagctcaatgcccaacttaaggaattcatgcccgatttcaaggagataaaccctatagtcaatccaagcgccaagcttagcctggacgttgatgtcgaaatcctcaacagctcagggcagaggataatgatagagaagatgggagacggaaccaaccgccgtacaaccatggccatcttcaagcataagaaggacaaaaaggaccttgtatatgtatttgatgaaatagaaacacaccttcacataaaggcccaattggacattctcaaactattgaaggaccttacaaaagagaataagcagataataataaccacacactccccattcctcataaaccaagtaaaccttaacgagatacatctcatgagcattgacaaggagacaggctctaaggtatctacccttaacagcagcgaagaaagtcaagtcgcattgagcaatttgggaataaacaatatagatctcttctttacaaacaaattgcttattgttgaaggggaaagcgaacagaactttatacctataatgtatgaaaagatctatggctatcctataagccagaatttcataaagatagtcaaggcagatggcataagggacatacctaatttcatacgtgtaatcaagaagtccttttcaaagacagacatatttgtcctcatggacaatgatgcagatgagcttaccgaggaaaggatagagaagatggttgaaggtgacctgatacatagggacaatatttttgaaataggagatgtggagtttgaagacaccttcagcgatgatatattaaggcaggccctaagccagtacatgtcagatacccttggatatgctgttgaggcaagcatgagggacattcaaaatgcaagacattcagataagttttcaaaggttttaggagaggcctttaataggaggacatataaaaactttaaaaagccattgtttgcacagtatctggctatgtttgcagagaaagaggacatagatgagaagataattaaattgtttgaattgattagcgattaa

SEQ ID NO: 1157 - DNA, 726 bp, Methanobrevibacter ruminantium
  source 1..726: mol_type = genomic DNA
atgtatttggaaatgaatgaattggcttgtgcttgcagaagacaatggaaaatagatgtaaatgaatccattgacatattctcacttgccataaataaaataaagaacttgacaatagtatttaaagtaatggataatgacataagcggagcctgtctaagattggataaggaaaacataatatttgtaaactcaagacacagtaaaggaagacaggcctttacaatagcacatgcattgtatcacttgaaatatgatgaaaacaatttcaatatatgtggaatagacagtgatgatgaaacagagcaaaaggcagatctttttgcatcatgtcttttaatgcctcatggagctttagaaacctataaattaaataataatattcaaaaatgggatttggattcaataattgatgctgagcaatacttccagatatcacatcaagcattgctctggagactaagacacttcttgaatgaaataacctatgaacagtatagggcatttaaggaagatattaatcgtaatgcatccattagaggttatgattcaagcttatacgctccatatttaaataaggactatttaaccattggaaattacatccaattaacagaaaaagcatttgaaaatgaattaatttcgctaggaaaaaaggaggaattattattggatgcttttcgtgaagacattgtatataatttaaatgaagaaatcattctatga

SEQ ID NO: 1158 - DNA, 348 bp, Methanobrevibacter ruminantium
  source 1..348: mol_type = genomic DNA
atggggtttaaaaatatggtagaaacagtaggtgatagattaaaaagaataagattagaacatgatttcactcaaaaccaaatagcagaatatcttggatttaaacaaggacaaatagctaaattagaaagtaataaaagaatattaaggagtgattctataatcaaactatctaatctttatagatgctctccagaatatataatattaggtattggagagtattccaaaactaatatggcattcagatcaaacaataaaaatctatcattggacgatattgcagagatgaacaggataatcaataatttggaattcctatcaagaattacagacaaacaggagtaa

SEQ ID NO: 1159 - DNA, 1122 bp, Methanobrevibacter ruminantium
  source 1..1122: mol_type = genomic DNA
atgattattcaagaaattttctatgattgtgaaaaatttttaacaattgttcataatggcatggataatgatattaaaaaacgagttatccaaaaatcaatagatgtttcaagacatgaaatcctattaaaagagcgttatattgaaaaatatcaattggaaaatgataattatgaattttttattaaaggatttctagattgtgaaaatgagaaaaacccttatacgaactattcaacatattttaagcaatatgtttatcctaataaaaatgatgaaattgataatttatcatttaaagattttaaaaaagtatatgattttatttatgaatatacaaattttaaatttacaaaattaaatattaataacattttcctattttttcctacggatattttagtgaaaagcattaaatctgaaacaacatcttacttaattatcaaaagttctgagaatattagtaacatttcagtaaaattcaaactaaatgatattataaaagaatcaattaatttaactgagattcctaatgataataaaatcaaatcaagggaaaattggaataattatgaaatagaaatatttgataaagataaaattatctataaatcccatacttatgtaattatgtccataaattttaatatgggaataactacaaagataaaaaagattaaattaaataaatttgataaaatggtaaattcttcaaacttaaaaaccgaaaaattcacaatttcagaggaaaatggattaattaatatttctaattatttacttgaagaatctaaaaatagaaatgaacttaatgatgtgacaaaaacagaatgtatttttttaagaaagaatgaacgggaaaaagcttatgaaatcttagaaaaattagtgaaaaacgatggagaattatttatttttgatccctattttttaaaacaaagcgaaggaaaagatgtgttaaaagatttgctgaatactattttaactcataatgatttagttaatattatcttttcaaaagatattggagaatcttttgagaactttaaaaatagtttaactgttgatgaaaaacttttttttaagaatataggagggtccgccaaaaagctatttttttaa

SEQ ID NO: 1160 - DNA, 1497 bp, Methanobrevibacter ruminantium; identical to SEQ ID NO: 119
  source 1..1497: mol_type = genomic DNA

SEQ ID NO: 1161 - DNA, 1143 bp, Methanobrevibacter ruminantium
  source 1..1143: mol_type = genomic DNA
atgaatttttatgatttaaacaaaattagaataaaaattgctgaagatgaaattgatattaaagaaaatgattttttatacgaactgtatgatttagataattttgattctttatttgatgaattggatatattaattaataaaattgaatatcatcaatttgaatttacattaatttggtatgttggatttttcaatataattaagtatgaagatattgggaatttaccaaatattagtaaattaaagtcatataattatttaaaaggagggttaataaaatattttagagggcattttcatttaactaattatacaatggaaataaaaccttatagaaactattattcatttatagaacattatgttttaagaccatttcaatatagggcaataactaaattgttaaattggatttatatttatgataagaaattcttttttgaattacactattttgataaaagtaattttcatttcttaagattatttaaactgcatgaaatcaaaaattttgaattagaagagaaatatattgattttaactgtgaagacgaattaaaaaattacatactttttaattacattattacggaatatattcatagtgtagataaaaatttgcctaaggatataaaaacaaaaattgaatccgattttaaattaattgaaaaaatagaagttaatatacttataaaaattatattagactatattagattcgatgaaacaaaaaaaataccttgttattttttagaaactatagaagaaaatgaagaaactttctttacaatatttgaatcgttagaaatttataatattaatgaattaaattcactagttaacccattgaaagaaattcatattaatcaggacagattatttcaacaaatgataacaaaattagaaaagttattaacagaagaaatcattactattgataattatgaatgggaacattttttaaatattattcctgaaaaatatgttctaatgataaatggtcttcttcgaaaaacaattggggatttaacttttatttcagaactcgatagagaaataagaagtaaaagatatttctcagaaaaaaataaagaaaaaaaattaaaagaattaatagacattgcaaaaaatataaattaa

SEQ ID NO: 1162 - DNA, 1371 bp, Methanobrevibacter ruminantium
  source 1..1371: mol_type = genomic DNA
atgcaaacatgtagttattgtggaaataaaattagaaataaagcaaaatattgtgataattgtaattcttacctgaaattaaataatttagaaattcaatttgatccaaaaaaatatgaaaaaattagattactagaaaaagctattaaagaagcttctaatctgatagaagaagataattatggtaatttaagtgcaaaaactcaaattcaaataatttatgatacaatttattcttatttagttgaaactacaaattttttgaaagtattaaagaaatatgatttaaatgaaaaatattttgtttatcattctttagagtttattaatcgagttagcaaatatcctaatggaattatatcaaatgaatttctttttgaaataaaccggattttttcagacttaaaaaataaaaataataataatactagaaaatatttattttatacaaatattaataatagagaatatattgaaaacactcttttagaaattttagaatattttgattttaaagttttttcttatgatgattttaagttccctccggaatttccagaaaattttaaaactaaattcaaatcaaaatatttaattttagagtataattcagctgagaatcatatatcaaataaagaagaaaaagcattaaatcaattgtatttattatttggatatttaacttttattcatcgatttggtagattaaatgaaaaatggcatgttaatagattcacattaaatcatcaaatctcagatttaaatgcttcggcaatgattgagttagataagaataataattttttagatatacatgaatctttagatatcttaaggacagaaattaaactagacaaaagtgatttgattaaattcaccaatattccgtttaaaacaaatttatatgaatcaattaaaaatgatgtaaaaaatgaagtagtattacataatatagaagaatatttacgattgtattatattgcttcaactaaatccgatttggaaaattcatttattaaattttggacacttgctgaaaagattttaaaagcaacttttgggcaaatgaatgatgagtctatggttagatatatgaaaaaaattttaaaatattttggttttgcaaattatatccaagatagaataccttttttaagaattaaaaggaataggcttgttcatgaaattaaagatgaaataacaattaatgataggaatataattaaattagttgtagattatttaattttatttttattgaattggagtggtgaattgaataataatgaagaatataaatttattttagacaattttaataaaactgatcttaacagaagagttgaattattaagtattttgaatgaataa

SEQ ID NO: 1163 - DNA, 2712 bp, Methanobrevibacter ruminantium
  source 1..2712: mol_type = genomic DNA
atggtactaagtcaaagtgaaatgagaagaagggctgaaaaatttattgaaacttataaggaagtgtctgatgaaagaagttattctcaaatgttctggagagacttctttgatatttttggaataagcttaaatgatgtcgctgtttttgaacaagctgtaaaaaaatttgatggaacacaaggttttattgattgcttttggaaaggaaaacttgtaattgaacataaatcagagggaaaaaatttaaacagcgcatttcaacaggcattaggttatctggatacattatcttcattggaaaaacctcgatatataattgtttctgattttaaaagaattcgtttaatcgacttgtttgaagacaaaaagacagaaatatcattgtttgatttgaaagacaacattcagatgttcaactttatttatttagatggtgtgaaacatcatgaaaaacaagaagaactgaatattgaagctgctgaactaatgggcaaattgcatgactctctcaaggagtcaggatacgttggtcatgaactggaactccttttaattagattgcttttctgcgtttatgcagaggatactgggatttttaacacttatcaattctttgattatattggtgatgaagaagatccaattagtgttggaccgaaaattcaacaattattcagaatcttaaatcagcccgaatctcaaagacagactaatttgccggaggagttggctaattttccatatgtgaacggtaaactctttgaagaacctattgtccctccatactttgattatgaaatgtacaatcaattaaaggaaatctgtaaattcgattggagcactatatctccagctatttttggctctatattccagtcaataatgaatgaagatgagagacgacaattaggagctcattatacaagtgaatcaaacattttgaaggtaataaattctttatttatgaatgatttatgggaggagtttagaaaagctaaaaagaattctaaaaaattagaacagttaagagataagatgggaaaattaaaattctttgaccctgcctgtggttgtgggaactttttaattatagcttacagagaattaagattattggaatatgaaatcttaaatattttacataatataaaaagtgaacgagatactcaagtcctattcgattccaaggagttaagtaacattaaaattgaaaatttttatggaattgaaattgaagagtttccttccttgattgctaaagttgctatgtggttcattgagcaccagatggatttaaaatatgaacaattaaacatacataaaagcaatttaccattaatatcttccgccaatattattcaaggaaatgctttaaaaatagattggacacaatttttacagcctactaatgaagtatttgttttaggaaatcctccttttgttggttcaagagaacaaactaaagaacagaaaaaggaaatgaaagaagtatttaaaggtgttaaaaggaatggtttgcttgattatgtttctgcatggtatcttaaagcagcacaatacatccaaaatacaaatataaaagtttgctttgtttctactaatagtatttgccaaggagatcaagtaggaatattgtgggaagttttgatgaaaaaatatgatatccatattaattttgctcaccaatactttaaatggagtaatgaagctcgaaatgctgccaaagtatatgttgtaattattggtttttctactgttgacatatctccaaaacatatttatacttatgaaacacttgattctaaaccagatttagaaatagctactcaaattaatcaatatttaattgattcagaaatagtttttattaaatctaggaataaccctatttcaaatgtttcaaatattatgaaaaaagggagtaaagcgtatgattatgggaatttgactctaagtttagaagagaaaaatgagttattagatgaatttccagaaatggaaaaatggataaaaacatttttaaatgctcgtgattttttaaaaagcactgaaagatattgcttatggtttgctgatataaccccttgtgaacttcaacaattgcctgcaccaattaagttaagaataaataatgttaaagaaaaaagggaaaatagtagtgattcaggtataaataatattgttaatgttccatggttatttgaaaataatcagcctaaaaatgattttttagccattcctgttgttagtggtgaaaaaagagattacattcctatgaaatttttatctaaagaaatcattgtaacaaatgcaatatatacttttgagtctgccactttattggattttgcatttttaacttctaaaatgcacatggcttggatgaagtatgtttgtggacggctaaaaggagattatagatattctaagaaaatagtttataataatttccctttccctaatgaattatctgaaaaggataaaaataatatcattaaaaaagctcaaaagattttagatattcgtgatgaatataaaaacgaatctttagaagttttatatggagaatatatgcctaactcattacaaaaagcacatatcgaattagataaagctattgataaagcgtatagttctaaaaaatttaaagatgataatgataggatgaaattcctattcaatctttatcttgaatacacttcagattaa

SEQ ID NO: 1164 - DNA, 918 bp, Methanobrevibacter ruminantium
  source 1..918: mol_type = genomic DNA
atgagtaaattttatgaagctaaatcaattttaaaaaatttggaagtgcctgataaacaacaatcagatatatgcgtatatacatttttatctttgctgtctgtttcagaagatacaaagtgggaagattcaactaatgaatggatcagaattcatgatgtcatccaattcataaagaataattatggtgtggtatatgcagaaaacagtagagaaactattagaaagacagcaatgcacccttttagagatgcagcttttattgaagacaatggtgtgcctactaactctccaagatacaaatataggataactgatgaattattggaagttgttattagttataatacttctaactggggttctgctttaagttcatttaaggaaaatcatgaaaccctaattgaaatttattcctccaagaaagagatgaggaaaatgcctgtaaagattaatggacaagatttgaccttttcaccaggaaaacacaatatacttcaaatattaatcattaaagagtttgctccaagatttgctcctaattcagaatgtctgtatgttggggatacaactaaaaaagatttgataaagaacactgaaaaattgcaggaattagggtttgagatcagtttgcatgataaaatgcctgatgtcgtattgtattcagaagagaatgattggatttactttgttgaagctgtaacaagtgtaggtcctatgagtcaaaagagagtgaatgagattgaaaagatgactgaagaagttgaatcagggaaaatttttgtgactgcttttttagatatgaaggattttaaaaagttctctgaagagattgcttgggaaactgagatatgggtagctagttttcctgatcatatgattcatatgaatggagataaattcttaggtccaaggtaa

SEQ ID NO: 1165 - DNA, 1473 bp, Methanobrevibacter ruminantium
  source 1..1473: mol_type = genomic DNA
gtgttaaattatgtatcaaacgaaactaattcatttcttaattcaatttctaaagaagaaaggaaaaaaataggccaattctttacagatgttgatgtagcaaagtttatggcccaattatatgttcctactaaaaaacatttagatattttagatcctggagcaggatctggcatactctctgctgccattatctcacaattagaaaatactgatgttgattcaataaatttaactttatatgaaaatgattctcgcatcttgcctttacttcagaataatttaaaattcatctcagaaaacacatcaataaatttaaaatatgaaatcattgaagaaaattatatacttaacaattcattcagcattgaatctcaagagttttgcaaaaaagagtatgattttgttattgccaatccaccttattttaaaatatcaagaaaagcaccagaagctcaattgatggaatcaatatgttatggagcgcccaatatctatttcctattcatggcaatgtctttacatcacttatcaaaagattcagaaatggtattcattgttcctagaagttggacttcaggagcatactttaaaaaatttagagaatatctcttaagtgctggaaaaattaatcaagtccatctttttgtcagtagagataatgttttcaataagcagaatgtattgcaggaaacaataattattcatgtaataaaatctaaaaagcctttggaatctataaagatttcttcatcatccaataatgattttagtgatattgatgaatttgaagtcccttatgatttagcaatttccaatgatgaaaatcattttgtttatctgcctaccaataagggggaggtaaaagttttaaatgatgttcataaatttgatagttcttttttaacagaagaaatcaaattacgtactggactaactgtagattttagaaataagagctatttggaagaaaaaccaaataaagataatgttcctttaatttatcctttccattttaacaaaaatttcattacttttcctgtcgaacatgataaaaaacaatatgttaatatggcaaaaaagggtttaattcaagaaaacaaagattatctgtttcttaaacggtttacttcaaaggaagaaaaaagaagattgcaaccagcaatttatcttaaagaagattttccaaactatgattatatatcaactgaaaataaaattaatttcattgagtccactaatgatgatgatttgtcaaaagagcagatttatggcttatttgttattttcaattcaacaatgtatgataaatattataggattttaaatggaagcacacaagtcaatgctaatgaaatcaattcattgaatattccttctagaactagtttagaaaatttaggaagaattttaattaataaaaatgattattctgtagaatcttgtgatgaaatattggagagtattttatga

SEQ ID NO: 1166 - DNA, 2328 bp, Methanobrevibacter ruminantium
  source 1..2328: mol_type = genomic DNA
gtgatagataggattgatatagggacagttttaggtaatgaattcattgtcattgataaatacggtggagaaggaaaatcaggatttggcactgtctttattgtatatgatgatgatttgaaaaaagctttagcactgaaaacattacaagataaatatcttaatgatgaagaaactataggagattttaagaaagagtctttaatttggacagaactgaaacatccaaatattgttgaagcattgggattagatattattgatggtagattatttattataatggaacctatttttagttttatgggtaaacaatcattagatgattacttttttgaaggtctgtcagattataaaattttagattgggctatccaattttgttatgctatggaatatatggaggaacagggtattaaatatcatggggatataaagccccaaaatattttagtttgggataatgagattaagattactgattttggcttaacaagttttattaatgaatctaaaatttttaaaaataagaatgtaggaaattattatatttcaaatggaaaactttgtggaactaatgcttatatggctccagaatcttttgaggggataaataatatttcaacagatatctatagttttggaatagttctttatcagatgataaataagggtaatttgccttttgaagcagaaaacaattttgataatgaatgggaagaattgcataaaaaagctgaaatcccttattttgatcatatattatatgatgtagttctgaagtgtttatcaaaaaatccaaaagatagatatgattcttttaaagatttaaaaagagaattaatttcaatatttaaagaaacttttgatgaagaaccatatgttccaaaagaaaaagattttgaaaaagattctaattactattattttaaaggaaattctcttgcaaatgttggcgatattgaaaattttatttcaaattatgataaagctatagaacttaatcctaattcctctgatattaggataaattatgcaataaatttgataaaatatgggtactatgatgaagctttaaatcatttaaatctagctaaaaagatatttgatgaaaataataaaaattttgttagtttagatagattatattttaattttggacatgcataccaatcaaaaggttatttaaataaagcaattgaaaattatgaaaatgctattgaaattaatgagaattatttagaatcatatgttaatttaggaaatatttataaagaattagaattatatgaaaaagcattagaaaaatatcaattagctttagatattaatcctaattttttcatggctttgattaatatgggtgaagcttatagttttttaggcaattatgaagattctgagaattgtttttataaagcaaaatatcaaaatatcaatgaggatttatattctttatggggagagagtttaagacgattaaatagggaaccttatgcattaacaaaattttttgaaattctgaaaatcaatgatgagtctatgtatgcttattataatataacaatttcttatttaattttagataatttggatcaagcaaaagaatattttggaaaagctttagatttatttggagataatattacatataaacttgatttatctaaacaattttttaagtatggttttcaagaggaatctttagaaattttagatgaaattatagaaactagtgaggataataataaattttttgctttatttcaaaaatttaatatttttaaagattctgatgtgaagtattcaacttcaattttagatgaaattatttattcttctgcagatgatgaattgaaatctgaggcatattgtgataaagcattatttttaaaggattatgaagattttgatttaattttagaatattttaatgaaggtttgagtttaaatccatataatattagaatttattatttaaaaggctgtttttgtcatgaaaatgaagagtatgaattggccatgcaaacatttgaagaaggcttgtttatagataaatataataaagaacttttgtatgaaaaatcaagattgcatttactttttggggaatgtgaaaaatgtataggctgttgtgaaaaatatttggaaatcggttatccatcggcagaaatttacttatctaaagcattaggatttatggggttagaggattataatgaatctttgaattttttagaattagcgcaatctttagttattgatgaagaaacaaaagagatgattttagttactaaagtaactatagaaaattttttagaaagataa

SEQ ID NO: 1167 - DNA, 1377 bp, Methanobrevibacter ruminantium
  source 1..1377: mol_type = genomic DNA
atgtatcaagttagtgaaaaagaaagttctgtttataaatacaaagctcttggaacttcaaacgatagggaaatcaaatcaaaggatgtcaatgaccattataaagtcacagaatacaatattgatttgatttataatgaaatcaaggaattcattcattactatttattttcaggtgaaatcagcactgatttcactataaaagtccaagatttattcgaaatggatgatgatgacttaagaaccttgaagacagtgcatttcttactgagcgatgaagtccgagacttaattcagattttaccataccttcttagaaatctttcccattctactcaaaaggaaaaagaggaatttaatggaattgttagaggaagaatagattggaatgcaactttaaagacaaggtatgccaaaggattcaatgaccctagcctttttgtttgctctcctccatccaagttctatgatcttgaagaaaatcagctattgaagtttgtattaaggaagataatcagcttgaagaacaattatctcgattttgtggattttataagaaacgatgaagagaatccttttgatatagaaagcttgtctgatgaaagagattggtatgagattgttggaaacaattacaagatggcaaagaaaacattgaaaaaggtctattttgatgacatttcagatgttaggataattaaggcaaagcatattagaaaagcatttaaaaacaggaatgttctttatcatagggtagcaagagcatatatcctttatgaagacctattcattaatgaagatattgaattattgaaggaattggtagagcatagattgattaaagctaccaatccaaataaactgtatgagatttatatattctattcattggttagagcacttcctagtcctgaattaagattattgcatagtggaaatgattattctacctttgatgtgcttgaagacggaaccaaagtgacagttcactatcaataccttccaaagcctcttcaagaggtttcagagtatgcagagattttaagaaattataatattcaatgggcatatagggctccggatattattttagagtttgaaaaagagggcaaaatcacttacaggatagttgaagttaaaaacagtagtagcgctaattatgtaagggatagcgtttataaggtcatgggatattataaagactttgagaggattttgtataatgaggaggctacttttactgaaaactgccctattgttcttgttacttggggtggaataagaataaaggataattatgatccatttaaggatagccttattgttcttaataggaacgagtttttagatagtttggaaaaattgataaatttataa

SEQ ID NO: 1168 - DNA, 2859 bp, Methanobrevibacter ruminantium
  source 1..2859: mol_type = genomic DNA
atgcccaatatagaaaaatatgcttatatattagatgattttaaggaaatcttagatatttatccaatcgagtctaaaaagccatataaaaacaatgaatttgcagctaagatgagaaatgatatagccgatgatttcaacaagtttattcttgatatggtttccaataaggagaaataccattcaaaaatctctcctggaatgatggattggtctaaaaaaccatgggctggattttaccataaggatgttaccaatactttcaaatttggtttttacttgatttacttgtttgagggagacggttccggttttacattgtcccttggccagggtgtcgacgatgctgaaaagaaattggtgaagagatccgaatacctgaattatatgattacagaaaatgaattgaaaatacctgatggttttaagcatgaagccaatgttggggaatcaatcattcgaaaattctataaaaaggaagaattggatctggaagagttttgcaatgatttggagaaaatgataaaaatatacgaatctttaattccccattacaatgaattaagagcaggtgaagagccttccagaaaggatgtgcgtccaaagaattccggaagcaaagtctggagaatttctccaggaggctcagatatttatgatgaagcttgggaagagttcaagcaggaatcatatattggcgtaggcttttatcatggagaaattgattattccacatttaaaaacaaatggtccttggacagatatttagataaggatggtgtcaaagacccttcaaaggctatgctttggaaattcgtcaattgggttgaaaagggagatattatcgtagcgaataagggaaagagcaaattagcaggcattggagtagtcactggcgatttcattcctttgacaaagaataaaaacaggaacaaattcggattggacaatatttaccctgttaaatggatttacacccctgacgatttggaaatttctaaaaacttctttgcaagacataccttggttgaatggcaaggggataaatggaatcagcttttgtgcgttttggcaagaaacgatgaagtccttaaagagagaattttgaagaagatatatgatgaatcatataagcttttgtttgaaagagaagattatcatcatatggaaggctataaaacagaatccaaagagataaatgatgtttggaatgatttattgttaaaatacgaaaatgatgaggatattgttgatgatgtatgggatagacttgtcaatcgcaagatgaaggttcatggagacggaagtaagaatatcaaggcctccattaagggaaaattaaagataagcgatgaagacttaagcaaaactgccattttattatttgaaacattgaaaggattgataggaaatagggatgaagcagatcaaaagagaataatcaaggaattcaatgacagcggatatagcaagggattcaaatcaggcagattcagttcaattctttattatctggacgattattattatgtaatcaatcaaaaaaccattgatactgttaaactcctgtctctaattctaggggatgaaatcctcttgtcaaatgaattggatcgctatataagcaacaatgcaaagtataaagagttcatacataatttaaggaacgcttattattatgataaatatgatgtatttgaatttagggcatttgatgccatttgtcattatctatgctccactccaccaatctactttgctacaaataaagctgaaaaaattccaatagaattctatgtggataccgatgagattttagagggcatagatgaaagcgagtttgatgagatggatttggatgacgaggagattgaggaaatcactgaagtctatattgaagagacaaaatatgaacttttaaacatcaatcctccattattggaatccaagcttcaatcatttgccattgctgaaactacagtaaatcaattgtgcgcatcacttaatgccggcaaaaacataatacttgacggaactccaggaactggtaaaacagaacttgcaatcaagtttgcaactgcagcaagcgacaataacttcattgacggttacattttgactacggcaacttccgattggtccacttttgatacgattggagggctgatgcctaatgaaaagggagaactctttttctatcccggcaaatttctggatgcaattgcagaaaacaaatggctgataattgacgaaatcaacagggccgacatagacaaggcattcggtcaattgtttaccgttctttcaaagcaggatgtggagttgccatacaaggaaaacggcaagccaatcaaaatcaagctatgggatgaaaactattccaagcatgataaagagaaatccacatattacatcggaaacaactggagaataattggaacaatgaatgtggatgataaggacagtctttttgacctttcttatgcattcatgagaagattcatgtttattgaagtggacttgccagaggagacccaatataaacgactcattaaaatgtggtccaatgatctctctgaagaatatactaacaatctcctaagggtttatgacgtaataaaattcagaaaattaggccctgctatattcaaggacatgactgaatacatcaaattcagggatgaaataagcgacgacagcacagatttaattcttgcagaagccatcagttcttatatagttcctcaattcgaaggacttaatagaaataaggttgaacaaatcagaaaacttatgggagacattggtctgtcccaatatttggatgaggaattgaaggaattgattcctaaattttag

SEQ ID NO: 1169 - DNA, 141 bp, Methanobrevibacter ruminantium
  source 1..141: mol_type = genomic DNA
atggaagatgaacttttaaaaaaatactttaatgaacttagaaaggaagcaaacaatgaagactttataaacgaattggaagggtctatagaaaccatttcaagggaagaaattgtggaactgattaaaaaacattattag

SEQ ID NO: 1170 - DNA, 354 bp, Methanobrevibacter ruminantium
  source 1..354: mol_type = genomic DNA
atgggtcaaaaattcaacatcaaagagttagagattagatcattcagaggaatcaaggatttgaaatatgattttgaaggaaagtccttagtgctatgtggccctaacggatgtggaaaaagttcaattacacaggcattcgaatacctcttcacaggccaagtcgcttccctaaagggaattcagggagtaaagcatgacgaatcacttatccataaaggggattcaaaggaagacctattggttaaagccaagataggaggccaatacattgaaagatcattcaatgaagaattcaatccagggcgattgaaggatatctatgaagactcaagaatggctcttttttattga

SEQ ID NO: 1171 - DNA, 1890 bp, Methanobrevibacter ruminantium
  source 1..1890: mol_type = genomic DNA
ttgaataggaaaaagcttttatctttcattgaatcaaagcctagagaaagatacaatcaaatcacaggactcatctcctatgaaaaatatgatgaaatagagacaaagcttcgacaggcatccaaagacattaatgatgaaataaaaattctaaacaaaaggaatgatgaaaaaatcagtgaactgacccaattttatagctgcgaatctgatgacctatatgaaaagattaatgcttctctaaaaaagaataatttaaagcaaattgatgaaaatactaatttaacccaatacattgatgaaaacaagcttagcaaaccacataaactattaaacaaaaacattgaagaactaaatcatgattatttaagactattggataattatgaaaatatcaccttgacagaactgaaaacaaccaattcattagtttcattgcttgaaaaatccagggaataccttttattggaaaatccagataaatgtcccatttgtcaaaaatacattgacagcgaagaaatcataaatgatttaagtccaaaaatcgataaaatcaatgaaaacttgaagttgtttaaagattggaaaaatgactgcaacattataataaagcaattatcagatttagattatgaaataaaggatttcaatggtgaaaatcacaattcattggactatgatttgaacgatttgatagaatcattaaatgacttgtcaaatttcgataaaggactatctgaaatggacagggaaatattgggctctctaaataaagatatcatttccataaaaggtaaaatgcaagcaaatacagatgagataaacaggaatttagaccatctacaaattcttaagaatattagggaaaatgaaaaatatttggaaaagattcaaaagcaatatgatgtttccaaaaaatctcatgaattgtttaaaaagatcaaagaagaagagcttgccaatatcttaaagcaaatagaagaatataccattgaattctacaattatatacactacgatgaagacataaacagccctaaaatgaaaatcaaaggttccaatagcttgactttggccctattctttgaagatgacgagtcagagccaaggtcattttcaagcgaagggcatattgataccttaggattatgtctctttttggcatttgtaaaggaattcaataaatatgatttcatcattttagacgatatcatctctaccgttgacttggaacataaggaacaggtaattaaccttctgtttgaatactttggaaactataaattcattataaccacccataacaagctatggtttgagcaattggcaaggcttgccgattactatcaacaaggcagattccaatttgttgaaattactgactgggacagggaaataggaccgtcactgtcacgtaaaaaagatgaaaaagaaaggattgaacagtacataaatgacaatgacacctttgcagcaggcaatgcaatcagacgccagctggaatatgaattggataaaatctgcaaggtaaatgaaatacctctgcctcttaaaaagcattatactgtaggggactactacactccaacaaagaaatttgctaaggaaatgtttaaggacactgatgttgaagaatattacaaaaatgtattcaaagaactggatttgtctttatacaaagcaaatctcacatcccataacaatgaaatgaactatgacttgaacatcaatgaaattaaaaaattaagggatgccgtttatggtttggaaacagcattcaagtgcaagaatcattctggaaactatgtattgaagtttgatatggacaaatgtctaggactttgcagccataaacggtgcatagacttctttacatttaatagaatttga

SEQ ID NO: 1172 - DNA, 1005 bp, Methanobrevibacter ruminantium
  source 1..1005: mol_type = genomic DNA
atgaaattagttgtagacggatttggcaaatcagttgctaaaagggacaatcaaattgtgattaaggaaaacggaaaagagataaactattatttggcaaaggatataagccaaatactattaactggcaagggatcaattacctttgatgcattgaccctgcttgctgaaaatgatgtggactgcgtatcaatcaattggaaaggccatgtggattacagactctcagctccagataggaaaaacgcaattgtcaaaaaggaacagtactttgcacttacagactcaagaagcggctatttggctaaggcttttgtaagagcaaagattgaaaatcaaaaggcagtgcttggaacccttgcaaaaagcagggaagagaaagattatattattgaacaaagagaaaaggtttcagaacatattggtaaaatagaaaaattatctaatatcaattcagataatattagaaataatatactgggaattgaagggcaagcgtcacatgaatattggtcagcttttgctagtgttcttgatgagaaatgggaattttttggcagaagtggcagaggtgctaaagatccggttaattcattgttaaattatggttatgcagtaatagaaagtgagatttggaagtcaatatatttggcaggccttgatccatattgtggttttctacattcagagcgctatggaagggctagtttggtttatgatcttattgaagaatttagacagcagatagttgataagacagtgctctcaatagttaataggaatcagattacaccagatgactttgaagaagatggcaattatattaagattcatgagagggctagacgacttttgattgcaaaaatattggataaattaaatagcaagataatgtttcatagtaagaatattagttattcagatattattttatatcaaggcaagcttatggctgattatttaacaaatggcgtaccatatgaagggttttctcttagatggtga

SEQ ID NO: 1173 - DNA, 126 bp, Methanobrevibacter ruminantium
  source 1..126: mol_type = genomic DNA
atgatagagagatatataatttctggagatgatgaaatatcctattgcagtcagtgcagaaactatgaaacttgtgatggggatgactgcgatccctactttgatgatgatttatatgatttgtga

SEQ ID NO: 1174 - DNA, 279 bp, Methanobrevibacter ruminantium
  source 1..279: mol_type = genomic DNA
atgttagtttttgtaatgtatgatatagttgatactccaacacgtacaagcttggttaaaaaattaaagcattatggcttgcatagaattcagaaatccatattctgtgggtttttatctattgatgagagattgaatcttgcaagcgagtttgattttttcatgtcttcagagagggatagtataatccttatcccaacatgtgaatcctgtgttgattccatattgattgagggcaatctggacttgcctaagaaatccctttatgagttcttatag

SEQ ID NO: 1175 - DNA, 765 bp, Methanobrevibacter ruminantium
  source 1..765: mol_type = genomic DNA
atgtgggttaaacgaatttattatgtttcattaataagatttaaaattttaaaaaaacgtttgataaaatcacttttatttaggtgcactatgaaaataaatacatgtcatttagttttaaagactaataagaaagtcaagcagaatccttcaaagttcaggggatatataggaagggaatttgacaagtatcctattctccataatcattatggaaataataaattcctatactcttatcctcttgttcagtatcaaatcatagatgggcagccatctattctagggattgaagagggtgcagacatattggttgacatatcctctaaaattaaagcgcttaagatgggagacagctattatagggtggaggatcattacttatattataaggagtatgatgttagggccactaggaaatatcatcaatataagttcttaagcccttggctggcattgaatactaaaaattatcaatcctttaagaatattaaggattggaaagaaaaaaagagctttttgaataatattatggttggaaatattctttccatgtcaaagggattaggtataatagttaacaaaaggctgcatgtcagctctcttttggatgatgagatagccgaatataaaaatgttcagatgaatgctttcacaggagagtttaaggttaacttcaatattcctgacttctttggatttggtaaaggtgtaagccaaggatttggtacggtaattaaggtcacagaccaagaagaagactaa

SEQ ID NO: 1176 - DNA, 1368 bp, Methanobrevibacter ruminantium
  source 1..1368: mol_type = genomic DNA
atgtctaaaaaagagcaaattttaattttaagtttaggaggttctccagaacctctcatttattccattaaagaattcaagccagataaagtagtcttcttatgttctcctcagacacttaaggaatgcgatggcattcttgaagagactgctttcaatgaggaaaatgtggaaatatacgagatacctgatgctgaaagcttggatgattcattttccacttcaaagaaggtcttatccaaatttgcagatgatggctttgaggttcgtgtggatttcactggaggaacaaagcctatggtttcaggtcttgtccttgcagtaatcgaagggaattattctaatttcaaattcagctatgtgggccaaaaggacagccagagcagaaccaaaaatggtgtcggcgtagttaaggatggctctgaaattacaaagatgcagataaatccatataagaaatatgcaataaccgaatttaagagaggaaagaacttctttaacacatatcagtttgaagcggccttggaaaatttccaaagcgccaaatccagattcattaagggaactgagcaaagaaggatatctgaaatctatgaaaggattgtcatactttatcaaaaatgggacctatttgaagataaggtttcaaaaaacacagatttatttaaatatctgggctttataataaatgatattgaaaaggatgaattcatattaaatgaatttgaaaatatagacttctttatccaaatgaagagaaattatgaatttttgagtttcaaaattaggggagtttcatatgatagcgaagacccttccataaagggccatttaaagttcagaatttcctattacctttcagatttattcaataatgcctaccgaagaatcgaagagggcaagtatgatgatgctgttgccagattgtataggatcaatgagctgattgcacaggttcagcttacccaaaagggcctgattgacgatgaccaattgcagactcaaaaggagtttaaggtaaatatctcaagcacaaaatccaaagcacatgcaagggacaactatgatgaaatattagatttcattgattataactccagccttaaggaaaagaacaaaggttattttggcattgcaaatgataagagctatgagcttttagacttgtttggcattaagcaaagccctaagttcgataagttgaattccaaattaaaggaaagaaatggctctattctagctcatggcctaaagccgatgaataagaaaaaggcagaagagttatatgataagacacttgattatgctaaggactatttctcatttttagatgaggatatggatttggctaagtttccaaagttttaa

SEQ ID NO: 1177 - DNA, 1203 bp, Methanobrevibacter ruminantium
  source 1..1203: mol_type = genomic DNA
atgatggttagattgcaattggaaacaatttctccagtttatattggaaacactggaaacgagtattcccgttctgaatttgcttttgctaaatttagcggcaagaagaaattagtcagattaaatttagatttggtggctaaagaactgtatcaaagggatgaaaaactctttaaggaatttctaaaggttctttcagatacaaaatcctttaaaaatattaaaaccaaaaaagataatagtcaatttaataaaaatgagaggattgcaattaaggggatgcaaaaattcttgtatgatacaattaggccttatgataaagatttatttaagaaaattttatcaagttgctcatcttataaagtttctctgcagtatgctccagaatccattaaagagaaaaatggcaaaaaggtttcagttacaagaaaaggggaaagcactgccgatattggtctaattaaggagaatttaaaaacaaataatgagccatatatctcaggttcttcaattaaaggtgcagttagaaatgccttattatattctagattaaatttatctagcaaatctaatcgtgatgtagctagagagattaataataagaataatagggatattaagaatattatgacatatgttcaattttcagacacttttaatacaatcgaagagccaagcctttatggggtcgaatcaattgggacaaaaaggaacactttttcattctttgaaacaattgataggggcaatgtttttgaatttgaatatcgcaatactttcaattctaaggtgcataatcctagaatgttaaataacttcgatttatctgttgaatcaatatttaagcatatttatgaattttctaatgatatattggatgaggaaatacgttttattgaagatacagttaactttgattatgtgtattccgatgttgactctggaaagttatataaatatttcgatgatttgaaggataaaaatactgaagagtctccattgttgagattaggtcaaggcagtggagctttaggtgtcagtcaattattggaagttaaaaattccaggtctccaacggaattcaccacttttagaaaattcaatcgtttaggtcataaaaatcattatgatttccctaaaacaagaaaattgatagtaaatagctttgaacctttaggatgggttaagttaagtaaaatttaa

SEQ ID NO: 1178 - DNA, 996 bp, Methanobrevibacter ruminantium
  source 1..996: mol_type = genomic DNA
atgtatgtttgtgataaaatgaaaatagtttatttaaaacctaaatcaacttttccttttttatcttcagatagcattttcggagcattaacctatgggatggcagaattatttccagaaaaacttgattcatttatagaaagctttaagaataaaaatgacattccatttttaatttcatcagcttttccattcattaaaaatgaaaacaattattttagattctatccaaagccaattacaaaattccaatctaaagacatgaaattatctaaaaaattcaaaaaaattaaatttattgaagaggatattttcttggaattggtttcaggcaatatttcaaatgatgggatctttgataattttaaagatgatttattccttgtgaatgaatttaatgaatctttcttagtaaaaaaagaaaattcagaaattatcgatggaagtttattttcaaaggaaatctctccccacaatgttatagatagggtaaagaataattccataaatatcttttattcagaggattataggttcagagaaaataaaggcttgtttttcttagtggactttaaggactcttcatttgaagaaattttcatttcccttttgagatttttaagagataagggttttggccatgacatttcctctggaaaaggacaatttgattttgaaatagatgattttgataagtttgataatttaaataaaagccaatatttcctatcattgtctcgtttcattccagatgagaaggatatttcttttattgaggaattatctgatgatgatgctctttatgaaattggagataagagatctcgggattcatttggtttgagaaagaaaacaaggttctttaaggaaggttctgttttcccggattacactgtcaaatatgatgttaattgcggttgtttggttgaaacttctgataggtcaattgaatatggatattcctttaatataccatataacgtggaggaattatga

SEQ ID NO: 1179 - DNA, 768 bp, Methanobrevibacter ruminantium
  source 1..768: mol_type = genomic DNA
atggaaaatttagaatttcaaggaaatgttataattaaaggaaaaatcgtttgtgatactggtttgcatattggcgaatccaatgaaactttagaaattggcggaatagacaatatggtcatgagggataagaaatccaatttgccatatatcccaggttcttctttaaaaggtaagctcagacaccaaatggaattgttcaataaggattctgtaagatatattcttgacaatccaaaaggaagaaatagggaatatgctccttgcaactgtggaaaatgttctgtttgcaagatatttggttttaccaatgatgaggatggaacttatgtaggccctactagaataatcgttagggatgcatttccagatgatgaaacaaaggaattttgggaaagttcagaaggcgtatccagaggagcagaattaaagacagaaaatgttattgatagagtaaaatcaactgcaatgcaccctagacctactgaaagaattccaaaggattcaaaatttgattttgaaattgtatttggaatatatcatgatgatgataaggaaaactttaaggaaattttcactgcattgaaattgcttgaaaataattatttaggtggaaatggttctagaggatatggtaaaatccattttgaggatttatcctatttgattagaaacaggtctttctatactgataatgctgaagaaaaggtaattgaacttggcgttttgtctaatttagaagatgaaaatttaaaaatcgaattataa

SEQ ID NO: 1180 - DNA, 432 bp, Methanobrevibacter ruminantium
  source 1..432: mol_type = genomic DNA
atgccaaatgatttgaaagatgttgaaaacaaaattaaaggtttgaaaagcttaaaatattatgaaattgaagagtttgtcaaatttgatggtgatgcagataagattactaaacaattacgaaatgatgacattaagacttcccaattaagaaagttttttgctgcagttaaggaaatcgaaatgtatgtaaaagataaaagagtttgggatgacaaggcaaaagtggatttctacttgctgatgcctaaattagcttatgctaaaggaagaaaagtcattagtgaaagattttttaatttaatgaaaattactatggaaaaagttggttctggaaataaagaagatactttagatgatttcttaagatttgtgcaatttttagaagctattgttgcattctttaaagttaacaatccaggatctttataa

SEQ ID NO: 1181 - DNA, 2658 bp, Methanobrevibacter ruminantium
  source 1..2658: mol_type = genomic DNA
atggatagaaaaaatttagaatttgcttccttacttcatgatattggaaaattttcttaccgtgcggaaaataatttttcatctgaatacaaaaatcttgataaagatgattttggttatcatggtgcacattctaaatggtctgctagctttattaagcattattggaattcagatattactaatttagcattatatcatcataatcctaaatctggtataaatgaagaaataggtttaattattcaaaaagcagaccatcattcttctggtgagcgcatagattctattaaaaatgatccatttaaaactccattgctttctatcttttcagatattttaattaagcctgaaaaaaataagaaatgcgatgagttatatgttccattggaagaatttgatttgaatagaaagtggaaaaattctattccaacttccatcgataatgctaaaaagggtcataattcattgaaaaagtgttattctgctttatgggagaaatttgaaagtgaagtgaagcatttagaaaatacggatgattttaatactattttggctttgttaaaaaaatacacttcttgtatgccctctgcaacatgggggtctaaacctgacatatctttgtatgaccattcaaagacaactgcagccattgcagtgtgcagatatctgtttaatgaagaaacagagttgaaacacacttcatcaactcaagaagtttattcagttatcagcggagatatttcagggattcagaattttatctttaaaatttcttcacctcaaaaggctcaaagtgcaatgagtaaacgtttaaggggaagatcattgtatctgactttattgacagatgcgattgcaaataagatagttcaagatttagacctgactcaagcaaatattttattctgtggcggaggaagattcacaattcttgctccaaatactgaaaaggctaaaaaatctttaaatgaaatacaaaaggaaataaatgcctttttcatagaaaagtttaatgcagaattatatttggctattgcaagtgaagaatgcagtggaaatggacttgaaaacttcagtgatattacatccattttatcatataagattgcacaggataaaaagcataaatttattgacaatctggatgatttatttgattttgaagaagatttggatggaaaatctacttgtgccgtttgcggaaatctcttcaaaccaaaagatgaggaggataagttttgtgatgactgtgaagaacatataaaactgggttcaaaagtaactaatgcaagttatatgattaagtgtttctttaatgaagagtttaaaaatatttatgataaaaataaatttaaaaaagtctctttctatgaaaagcctttaaacatagcttatatttttactagcaataccagtaagaagtctgttgacaagacttttaaagaaataaaagatattctttctgaatatgatgaatttgtcgatagatttgaaataataaagttaaatgacactgatttcttggaaattgaaaataaatttagtttagaggaattagataaaatctcatttagttttagtttcttaggaaatactattccaaaatatcataacagaaatccattatactttgaacatttagcccaaatcagtaaaggggcaaataaattaggtgttctaaagatggatgtagatgatttgggaatgatatttggcgaaggatttaatcatgcctttaaagattcagatgagtctataagcagcatttccagaatttccacactaagctctcaattggatctattcttctcagggtttattaataagattgcatcagaattctgtgtttatgatgatggaatcaaggaatatttcaaaaatgacccttctttctttgaattaaactttaaagaggtagaattgaaacttcaaaatgatgatggctctaaaaatgaagatgaatccatcattgtttataaagaaaagtatggaatggaacttgacgacgaaatcaaggaatccataaaggagtatagtattccaactattcatataaattactctggaggggatgatttattagtgttaggtccatatgatgatatcattgaattttcacaagaattaagaacaagattcaagcaatggacttgcaataatgattccattaatttatccggtggaattaacattgtctcttcaaaattccctataggcaaagctgtgattatggctgaaaattatcttgaggcttcaaaatcctgcggtaaagataagcttacagtatttaatgaagttgttccttgggatgctaaaggctctaaatttaaagatttcaatcaattacatgaatttggcctaaaattagaggaatataattctcaaaataaactatcaaaaagcatagtttattccatgttatatttatggaaagataattttgaagagcattcaggaatatttttcaatgaagaaaaatgggaaaaggagaattttgcgaaatgcaataacaatagatttgttcctaaatttgcttataggttaagaggtatgaatcaaaatagtaaagaatatgatgttgttttaaaagaaggtattaaatatatgccttggattaaaatacctgtttcatgggttagtttaagaatgaggtga

SEQ ID NO: 1182 - DNA, 4698 bp, Methanobrevibacter ruminantium
  source 1..4698: mol_type = genomic DNA
atgtcaattgatttaaataaaaaccaaaaaagggctgcctattacaatggagacaagtacttggtcatagaagcaggtccaggcgctgggaaaacacgtgttttaatagaaagaatcaagtttctcataaatgaagagaaggtagagccttcaagccttttagttattacattcacacgcaaagctgcagaagagcttaaagaacgtttatataaggatattgatgaatctgtagtaagcatgatgcaaatatcaaccatacatgctttttgcagagtgattctctcagagattggggaatacaatactcgtgtcttgggagatagcgttaacgaaaaacagaaaatgtttttaaacaaatataagaaagacttaggctttgttaatgagtgtcacatccgccagaatgaaatatttaacctaatagataaatatggcgaatacgccacctttaaggtagatagtaaaaaattggttgactatatagaaaggaatactaaaattgaccctgaatatatagattttgtaaatgaatatatgaaggagaatgatggaagatatccttttgatgaggtaatggctaatgatgcctataagaaatcccgtacaaatgcattgtatctgcaaatagcaaagtcatatcctaaatatctggagcttttggatgaaaagggattcagcgattttgatcagatgcaaatcaaaaccttaaactatttgaaaaccaatccaaacaccatctacaagaatgttttggttgacgagtttcaggatacagatcctgtccaaatgaagatatttgaaattctaatgaaaaatgcagattcctttactgttgtgggagatatagaccaaagcatatatggattccggggagccaataagaattattttgaatatctatacaataattatgacgatagggtctacaaggtgaacttaaatgtaaactaccgttcagcaaatcaaatcattgacataagcgaggatttcatcaagtctcaaagggctgagggagcaaagcaggacaaggctcttggcgcacgggatttggatagaaacacttattttcttgtaaatgaaaacagcgaaagcgaagcaaaggccatttttgaaatgattcgatatctccatgacagcgggaagattgaaaattataatgagattgctatcttatcccgttccataaggtttagcaacactgcccaagacctaatccaattatttattgataacaacatcccttatcatgtcaggggggttccagatctctttgaccggcctgaaataaggtcagtgatcacattgattcaccatcttatagaggatacaaatccccataaccataaatttgacctgtgggaattggaatggctaaatcttaaggcatatactggagaaagcttcaatcaggttttatttaacctatctgatgaaactaaaaatatcttaaatagtatacaagaagaatttgaagagaatgtcttaaaggaagaaaaaagagcttatttaaaagttacaggcaagaagtctcataaatatgtctttaaaagagtctttgaaagggatgagaaggttttaattgaattatttaaaaacattgaaaggcctatcctaagcaatgagaatctgattagatacggggtaaaaaataagcaggatttggagttctttagaagattgaatgacttgaaagcttacttcaacagtgaagagtatatggactccgaagacactattttggatatctatatgaaattgctgacagatgtctgcaattatttgactgaagatttcattaatgaccctattaatagggatgagcttaaaaatctggcaatcctaagcaacactttccataattatgagttgattgtagacaataagaatttgaagggagcatactatttcttaagatataacatagctggctacagcacagataatgatgaatccgaaggggttcagcttatgacagtccataagtctaaaggattggaatttcctgtagtcattttactgtcattgaatcataagaagttcccaagccaatataaggatgaatatgataggttttacactccaaactcctgtttggaatataagaattacgattccaaggaagaggaaattcaagactatctagaggaagaggatagaatagtctatgtggctatgacaagggctcaggatattttagttctatctaatctaatcaaggaaactcctgaattagaagggttaaaagcagaattgaatgacaatctttctcaaattgaaaagatagaaataatcaaggacattcctaaagggcatattaagattcatgacttgatcaataggaatctctcaagctgcaagtttttggaagatgactttagccagcttccaaagacggtttgtgaaaagcctcaagttaaaaaggaggatttccttaatttaagcttttattcccttgagaattatgttgcctgtcctttcaagtataaactgatgcatgacattaatttcagcgaatccacaatggaattcaataagctaagaggcttgtttgtacataatttgcttgaaacgatcaacaatagaatcaggtccaacggaaacagatatattggagatgatgaggtcttggctatctttgaaaggtttcaagactccttccgctttgaaaacttaagattgtcaaagaaggaatatgatattataaaaaatgatgttctttattattacaatacctttggaaaggatttcaatatattaaacacagagctttcatttagcattaaaaaggaatattatggattgtcaggcattattgacctaatctataagaccaaagatggaaagatgggcattttggattataagaacactgaacgcatatcaaggcattatgttcaaaattatattaagcaggtctatacctatatgattgcattaaaggatagttttgaaatcgatgagcttcggatatatgcaataaaagcaagaaagatgatatctgttgatataaatcagaagtcccttgatattcttttagaagagcttgataatgtttcattgaatattaaaaaagaagtattcgaatgtaattttggagagggctgcttaaaatgcagtttctcaaagatatgcgttaaggcaaataatgatgacgtttctgtttttgactttaataatgaggacactttatcttttagaaataagttctatcagaacttgccagattatgaaataattgatttaaaagacagatattggaaagatattgattttgattcagatgatgaaactaagtttgatgttgatattagtgcagatgatttagcttcaatctctgctaaagagggtgtttctgtatctgctaatgaaggtattcctatatctgcaagagagggtgtttctgtatctgctaatgaaggtattcctatatctgctaaagagggtgtttctgtatctgataaggataatgatttgtctgtatctgctaatcaaattaaaaatttaaataattcatctgatgataaacatcttggtgcggatttcaaatctaaaaaagattcatttaaatcagaaatgaaatctcctagttctaaaaaagattcatctaaatccaaaaagaaatcttataaatctaaggaatcctctaaatcttcaaaagaaccatttattagttcttattcaaaatatttggatttaaagtccattcctaaaaaatataagaatttccttaaaaatgattattccaaggacattgatctttttgaatatgatgatgatttgtctcttgaagagaacattttaagaaaatatatcctaaagaaaaaaggattgaaattgcttaaaaaagaactatatgatgaatctgaagattattataaaaaattaatacacaattcctattttaaagaagattactatccatataagcaattaatgaaagtctatcataagactaaaaaatatgataaagaagctgatattataagagatttcttcaaatcaagcgtttatgccaataaatatcaattcttatatttcaaatataagaataggaaattgcctaaaagagctagaataaagcataatgaactaaaagatttaattaaaaattatgtaaatctattaaaagattctgatttatctaataattctattcctaatgctgatagattgaaaaaagataagaacagactaaaaatcctatcagatgaagaggaattctataatcataaaaggtcctattataccaatattgccgatggattatatgaagaaaagctcaatcaggaagcttttgacttatatgctatggcaatttataagtacaaagaaaagagtttcagatattatcaaagattggctagtatttataggcgcactaataattataaacatgagttgctggttattatggaatattttaataaaagcaataagatccatagaacaaaaagcagcgacaaatggtttaagcaacgtttatattccactaaacaactaattggggatgagaatgcaattaggcagattgaaaatattgtttgcaaaaaaggatacaatctaaaagcagattatgctttaaattatttaaatcatgatttggatgaatattactgtttgaaaaatttagataaggaattaaattatattatttcaagcaatgaggacatttttacacttcataaaaagaaataa

SEQ ID NO: 1183 - DNA, 1197 bp, Methanobrevibacter ruminantium
  source 1..1197: mol_type = genomic DNA
atgaatgaaaccacttcaaatgaactaatacatgcacgcagactttatatgaaaaagaatatgaaagaagcagaaactaattttttaaaagttttcaatacaaatagagagctctttaatgatttggatgaaatttattttatccgtgcaatacaagaatcccatattgataactgccaatctataggtgatttaaggcactatgctgattttgtagtagaaaactttaatcaagaggattgctccaatagaaattttgaagatccatatgctgattttattttaaatcttagcactgttctaatcaaggaagaatactatttggatgcaattaaatacctgataagattagatgagtctttcctatctgatgtttcaagacataattccaatggctattatagattctcccatcatgagaaatatctttcaaatatggttaaggcattgattggcataggaaaatatgatgctgctttgcaatattccattagattaatcaatgaccttccagacactgccagtgaagctaagtattggattaaatggagcatagctaaaatatataatctgactggagattatgaactttcaattgaatatatcaatgaattattgcttaaaaggagtgaaaactatttctataaacttttagcagataactatctaaaattagatgattatgataatgcattagtcagtggggtccattatattattttaaaaaaggatatcaaatcctgtgtaaattattacacagaactcggatatatcttaagccaattgggtcttactgaggaatccaataaacattattatctcagctacgctatcaaaaaatcctatggcaatttcattccagattatttggaagagaaaatcagagatttaggctttgatttggaaaataccaattataataagatagctaatgagcttaaacctttctggagagaatgtttatacagaaataaaaagcagtttacaggaaccataagtgccataaaacaagaaaggggatttggttttattaagccagatgatggaggaaaaaaccaattcttcctattcaaggactttaaggatgatcatgattatatttggaataatatgagggtttcatattatcttggggatagcattgattattctaaaaataaggagtccactagggcagttaatgttgaattaatttag

SEQ ID NO: 1184 - DNA, 1695 bp, Methanobrevibacter ruminantium
  source 1..1695: mol_type = genomic DNA
atgtctagtcaacttgaggaattaaaaaaagaattccaaatagccgaatacaatctcgactttgatagactccacaccctatgtgacaagatacttgaacatgatcctaatctaatcgaatacaagcaatacattgcaattagctacttcctctctgaggactatgaaaactgcataaaggaatacagcatctaccttgaccgccgtgagaaggatgctgatgacgcgtacatacttgccatgagccatcttcatctcaacaacgaatctgaggccatgtcgattatcgaaggctttgatgagatagactctcttgagctaaagctcaaggcatatcatgatataaaacactactacaaggccatcaaggccggtaacgagcttcttgatattgacagctccaatgatgaagccttgcaaaccatgtcggaaatatatgacgagcttaacaataccgagatgtcgcttttctatgaatgggagctatgcaagctgaagcctgcatttaagggcttccatctcatgaggctctatgagcttggaaggtatgaagaggtcatagagatatttgaaaggaatcctgatgactttaaatgcgaccttctccactacccattcaacttcttgataggatcttcatattgtgaaatcggcaagcatatggatgcattgaagtatctatacaggtccaaccagctccatgagtgccgtgatacaggacttcagatagcccgtaactattatatactgaaggattatgagatggcatataagattctaaagggggttgctgttaaggagggtctattggactatgatgattctctctcggacgatgagctattgaatgataattctcttctcctattggatgaagatggtttagaagatgattctttactcctatccgataatgagactttaaatgatgattctttacttttatccgaggataagactttaaataatgattccttattcttaagagaagataagacattagaacaaataatggataagtactgcaagggggcacctgaagagaaagctgatgaaaagacttgcaatgaagaagaaaaagaaacagaagtcctaagcgatatacagattcttgaccagatgctgcttgagcttgatattgatgaaagccattatacccaagtggaagaagagccaagctatttcaaggaaactgatgaggattcaatcgacggcgacgaggatattgacatagtggatgcaaacatactgagaatgatgtctgaggtctgtctctaccttaaaagatatgatgagtgcatcatgatagcaaacagactcttaagcgtctcagaccgatatgacgagattgtgaatgtgataagcgcatactaccttgagatggaagacgagtggaaggctgatgaatggtaccttctccttcctatagagcttgcattcaataagccatttgtctataccattgcccgcaacctctctctcatcggtgagagcgaccgtgccctgaaaatctatagcaccatagagaagctgattgacgaaagcccatatctcctatatgaaagggccggcctctataagaggataggggagaaggagcttgccatgaaggaccttgataagtataatgaaattgccctgaaatatctatatgagaatggggaaccggaagttaagtatgaggatctggaatag

SEQ ID NO: 1185 - DNA, 135 bp, Methanobrevibacter ruminantium
  source 1..135: mol_type = genomic DNA
atgaaagttgaaataatgattatagggatcttgctgctttcaaacttcctatatcatcatgaggatggaaatcctattgtgcagtatgtagcatatattgcctcattgcttgtcataattttagggttcttttaa

SEQ ID NO: 1186 - DNA, 1290 bp, Methanobrevibacter ruminantium
  source 1..1290: mol_type = genomic DNA
atgaaaagaaaagaagtagtactattcatgaccgttggaaccgggatcaatccagactccaacgaggcgggatacaagaagctggccaagaagctctactcaaccttaaacaagatatatccaaactatgtaatcttctttgcatctaacgtatccaagcacacaataaaatacatagacgcgctatttgagcttgacggcgacgagttcaatgagggggaggattatgagatagttgaacttaacaacattgacgacttcaactactgctttgagtcctttgaagcaaagatatgggaatacgactatctcaatgagaaaaaataccagataatcatggactatacctcagggacaaagaccatgtcagctgcaatggcatgctgcggaatgctctacagccgtgaccttatctctgtcggaggggaccgctccaagggagaggtatcagcaggaacagagataataaactaccagaacctctataagatatatgacaagagggccataatgaggataaggtacaacttcaacacaaacagattccagccatgccttgacgtattgaactatatagttgacatgaacatccacaaggactccctagtggacctctgtaagggatactttgcatgggacaccatggacttctcccatgcatatgagcatctaaagagcatagaccttaactatatggagtttgcagagataaaaaacgagcttaagaagaaccttaatgccttgggaataatagtaaactcaaagtcccagaaccttaagaactgctatatacttgcatgcatcataaacaatgcaataaggagagctgaggaatataagtttgacgacgcaattgcaaggctatacaggtcatttgagctcattgcacagataaggcttgagaaatacaatctcatgagttctgatattgatatagatcttctcaaggaaaagggattaaggcaagagtttatagatgagcttgagaatatgagggaagacggtaagattaggataggacttataaaggactatcatcttttaaatgagctggatgatgagctaggcaagtactttatggagaatgagtctaagataaaggaccttacattcaagaggaacaattccattttggcccacggattggactcacagtccaaggaagactttgacaagtttttagagcttgtgataggattggccaaaaagcttgataaggacatgaacaagttcctggaagagaccaggtttgcaaagttcgacttaaagttggatattaataatgcctga

SEQ ID NO: 1187 - DNA, 339 bp, Methanobrevibacter ruminantium
  source 1..339: mol_type = genomic DNA
atgtataaaataattaatgaagacggcagtttagttagaggatatccttcagatgcattatatgatcttttaactgataaagaaaaggaacatatccaattattcaaaaatgaaattgaaaagataacagaaaaagaagggcttggaaaaataactgtttcagtaagttatgatgaacctataattgaaaaagcattccaaatacaagataaaaatggatatagctttgatgagtttcaagagatattggataaaattagattgcatatggcagatttctgtaagaataacaaagagttatgcgaatttaaaaaattctcttatattatttctgcttaa

SEQ ID NO: 1188 - DNA, 270 bp, Methanobrevibacter ruminantium
  source 1..270: mol_type = genomic DNA
atgatggttagtgataaggatttagcaaaaaataataatgtaaagggctctagaatcaatgtgacacctcttatggcagcatatttcttaggatatatgctttctgaaaagggtgagaagatctctgatgagaaaatcgaagatctttataagggggcatgcttcagcatgggaatcgatcctgttgaagacatctctgaattatttaatgaattgttcagcccaaaaaagaaaacaaaagaagatttagaaaatagtttttattgctaa

SEQ ID NO: 1189 - DNA, 1407 bp, Methanobrevibacter ruminantium
  source 1..1407: mol_type = genomic DNA
atgatccatttaggtgcaatcatgtcaaatatcgttgatagaataggtatggaaaaatcagtcatactccttgctgcagttgtatcctttgtcactgcattccttgcaaacatctctgtagctttgcccttaatagcaagggagcttgcaatgagcaatatcattcaaaattgggtagccacaatctaccttcttccaattgccatgctttccatccctttaggaaagcttacaagcaagcatggcctaaacaagtcattgcttgcaggaataatccttacaataataggagtaatcatagcctgcttttcaatcaacagtgaacttctacttctatcaagggtaatccaaggaatcggaaccgctttaatcaatgtcgcttcaatggcattaatcgtttcagcagttaacccagaaacccggggacaggcattgggactgaacattgctggagtctatataggactctcatcagcccctgtaatcggaggccttgtcatctaccaccttggctggcagagcatattctatataatgctaatcccactaatattctcagcctacctgtcatggtcactcaaggatgaatggacaatgtatgacggtccaatagacataactggatctatcatattttcaataggtattcttctagtaatctatggattcaccatagtaaacacatggcttggcatagttctattgataattggtttactattattaattgcctttgcttattttgaacttagggtcaataatcctgtctttgatgtgagactctttaagaattctaggttctcctcttcaaatattgcatccttgattagttatactgcaacttttgtaatcacatacatcttaacttatcattttcagtatattatgggctttgactctaaattttcaggcatgttattaatagtaacacctgtcatgatggcaattctagcacccctatcaggcaggctatcagataggatagatcctcaaaagcttgcagcaataggcatgggttttgtaacagtggcactaacaatcctatgcttcctaaacgaatcaaccccattatatatgattctactcgcaatgtttctccagggaataggatatggattgttctcttcacctaatacaaatgcgatcatgagctctgttccaaaggaagagacttcttccgcttcagcatcccttgcagcagttagggtgattggacagacactaagccttggaatgcttactgtgatatttgcatacatcatgggaaatgtggcaattgtgcctgaatattatccattgcttatggaaagctctagattgtcttgcattatctctgcagtattgtgtgtgattgctgttgttgcatcattagttggactgcgctctgatgatgagtatgagacttaa

SEQ ID NO: 1190 - DNA, 1785 bp, Methanobrevibacter ruminantium
  source 1..1785: mol_type = genomic DNA
atgaattcaaaacaaaaaacattaataatcctaagtctaagcctaatattgctagcatccatagccgcagtatctgcagttgattacaccctaacaaatgcagatatggactatgtggttaagtctaacggattattgcatgtccatgaggcaatcacatatgactttgacagcagccccaatggtgtctatagagacataccccttaaaagcggccagtccatagagaatctggaggtttatgttgacggggcctatgcagagtaccagatcattccaaaaggaagcggtgagaggataaaggtatatctctatacagactcctcaaaaagccataagctatcttcagactctgtaataaccgtccattatgtctatgacatgccaaaggttgtaaagatctataacgatattggagagctccagtataaggtatggggtgatgaatgggacgaagaccttgaaaaccttcaatccacaatcacattcccagatgatgaggagcttcagttctggatcaacccatacttcagcaatgctaaggccagatgggcagaggaccacctgaagatacactcagactttgtaggagacggcaaatatgttgaggcaagggcattgattccgttaagcgaattcgattccaatgcagaatatgcacagcatataaacaagaacggaaaggatgagataatcaagatacaggacgatgacaagaaatctcaagagggcttcaaatccttattctcaatattaaataaggtattggtagtgctatgctttattccaggactcatctaccttaagttcggaagggagccaaagacaacatatgatgcaatatatgagcatgagcctcctacagatgaccctccagcctatgtgaatggtatgataggctcagggctaaaggatgtaggcagtctaaatcaggaagctttccaagctacaataatggaccttatcaacagaggcaagatgggtgtatcctcagaggaagacactgaatttacaaagacaaccttccttaccataaaggacacatcaggcctcaagagatttgaagctgatgtcattaacatcctaaagagatatgagctaaacggaaatataagcctaagctatatgcaggactgccttaggggagaatctgaagccagatacttccaaggcaggtttgaaagctggaaggaaaactttgaaaatgaatacttctcagaggacagcttcagccgcctctttgacaagaaaggaaacgactatcttaattacttcgcattccttctcataattcttggaataatcgctttcgtagcatcaatattcttcgactttgcagtcaccggctcaacaatattcgtaggagtccttttagtcattgtaggtgtcgtttgccttatgcttccatctggaattgcaggaaaatacacagacgaaggaaagctctatgaggaaaaatggatgaagtttaagaaataccttcaggattattcattgataaaggagcatccgccagagtccattgtaatttggaacaagtatcttgtctatgctacagcattaggtgtggcagatgaggtatataaggccatgaagatggaagtctatagcggaagcgatgattattacagaacaaatgatctctacatgttctattacttaggaggtcataggtttatcaatgattcattcaacacagcatcctctaccatatctgctgcagacaacagctctgtaggaggaataggaggaggctccggtggtggaggtggaggtgccttctag

SEQ ID NO: 1191 - DNA, 750 bp, Methanobrevibacter ruminantium
  source 1..750: mol_type = genomic DNA
atgaactcaaaacaaaaagccctaatggtccttgccttaagcataatcctactcagttcaattgcagcagcatctgcagaggattattctttaaccaatgccaaaatagatatggtaatccaggatgacggattagtctttgtggatgaggcaatcacctaccatttttataagaccatgaatggcgtctataggtacattccaatcaataactttaacatggaagattttgctgtagacgttgatggcgcatattatgaactggagggtaatgatgacgactctcaaatagaggctaaggtctatctctataaggataaggataaaaccgaaaagatcgaccctggtacagatgttacagtccattataagtactacatgagcgatctccttgatgtaaagggagacaatgcagtattgaactattatctattgggagaagattgggaggttgacttagaggagattgaagcaaacgtccatttccctgaaaagaaggagcttgattacgagcttgttccaagcggcagtgctgaaggcaagtggtctggagacacattgaccattactggagagaatattaatgctggagatggtcttgcattaatcgttgaaatcccattagatgagttcgcttcaggcttttcaaatgctgtccacaatgacactgatgatgatgatgacatagataatgatatcgataatgataaggatgatttaaaggacttgacaaaggctaagcagatttaa

SEQ ID NO: 1192 - DNA, 561 bp, Methanobrevibacter ruminantium
  source 1..561: mol_type = genomic DNA
atgagtacttttattttagtcataataatacttggtattattttaataatcgcaggaataatcgtagctctctataatggccttgtgactgcaagaaacaaggtaaagaatgcatgggctcaaattgatgtccaattaaacagaagagcagatttaattcctaacttagtagaaactgtaaaaggctatgccggtcatgaaaaatctgtatttgaagatgtcactgctgcaagggcaggattgatgaatgcaaacggagttaaggaaatcggtgaagctaacaaccaattaacaaacaccttaaagaccttatttgcagttgctgaaaactatcctgagcttaaagccaatgaaaacttcaaggaattgcaagctcaattagctgaaagcgaagacaagattgcatattcaagacagttctataatgacactgtattgatgtacaataacaaatgccaaaccttcccaagcaatttgattgcaggcctcttcggattcaaggaagctgacttctttgaagctgcaggtgaagctagatctgtacctaaagtcgaattctaa

SEQ ID NO: 1193 - DNA, 1791 bp, Methanobrevibacter ruminantium
  source 1..1791: mol_type = genomic DNA
atgaacaataagcaaaaaacattagcaatcctcattctactcgctattgttttaacaagcatttcagcagcatctgcagtggattataaaatcacaaatgcagatgtccacttggatgtggaagacaatgggatattgcatgtcagcgaaaacataacatatcttttcaaaagcgacggacatggtgtctatagggtcatacccctaaaggcagatgagaagatgagctatctgacagtggatgttgacggctcatactttgaatataatatcattaaccgttcaggggaaaaggaagtaagggtatacttatataaggataaggatttaactgattacggagtaagcgaaggctctacagtcactctaaagcttgactattatatggaaaatgttgtaaagctattcagagatacaggactcctagaatacaagctctggggtgaggaatgggaccaaggagttgagcatctaaacgcaaaggtcacattcccaaatgatgaggagattgaatattggattaatgacgattccggaaagacagaatcaagcttctcaggagacacactatatgtaaagggctcagacattcctaagggagattatgtggaagcaagagttctcattccattaggtgaatttgattttgatgcagattatgctctacattacaatcatgatgcctctgatgaggtcaaaaagcagcaagaggattttcaaaaaaagcagcaatactttaacaccattggcaatctattaaacgttatatatggcattcttatcctcacgcctttaggcatatatctcaaatacggcagggagccaaaggtgtcaagtgatgccatatatgagcatgagcctccaacagatgactctccagcctttgtaaatgcaatgatgagtggattgagtaaggatgttggaaaggttgataagaaaggtttccaagccacaataatggatctcattaacagagacaagcttggaatggaaatagcatatacaaataagaaaagacctgtgtcccttcttactgtaaagtcaaccgatggccttaaggactttgaaatggaattgatagacatccttagaaggtatgagcagaacggaaagatcaatttcctttatatgcagcagcagctctccaataggaatgaggcatatcacttcaacagggcattcaacagatgggtcagtaactttaaggttgactacttgccggatgatgttttaagcagatacttcaatacaaagggaagcgatttgataggcaaattcaaatggattgcattagttgcaggatttacaggaatcattggacttcttttaaccggcagctggatacctctggtattgggactaatattgatttttgtaggggtaatctgtttctatctcccttcaagcattggtggacaatacactaaagagggaagggagtatcagcaaaagtggaaaagatttgaaaagtatctaaaggacttttccctaatcaaggagcaccctccggaatctgttgcaatatggaatgagtatcttgtatatgctacagccttaggggtagcggataaggtctataagtccatgaagatggaagtctatgatggattggcagatggcagcaatttcagttcaaatgatctctttgtattctatcatattggtggaatcaggagtcttgacaattcatttgttaccgtcaataatattatctcagcagacagctctagctccggtggaatcggaggaatcggaggcggatctggaggagggggcggaggagccttttaa

SEQ ID NO: 1194 - DNA, 1755 bp, Methanobrevibacter ruminantium
  source 1..1755: mol_type = genomic DNA
atgaatcttaaacaaaaagcaattatcatgctcatactctcaatacttctaatgtctgccatttcagcaagcgactataaaggaagctatatggattatgtgcatatgaacgtaaacgaaaacggtttggttcacgtcaacgaaagctttacatatcaaatggtatctccagagtctgaaataagccttcccctctatcatggcaccaatgcaagcattgaaaatatccatattagggtcaacgatctcttggttgcctatgacctcaagaaaggggacactctagatgagctagtcatacatcctaagtcttcagattatgattatgactctgaaagcacaggcacatatcttcttgatgtggaagtcgaatatgatattgaaaatgccgtaaaggtctataatgacgtaggggcattcacttaccaaatcaataaaacagattttaatggggtttctttaggaatggcccatataagaatcaagttcccaggcactcaggagcatgaatacttcataattcctaaagagggcgaaagcagtgcccaatgggatgaggaccattttcatatgaccaatagccagcctgcgaaagcaactgtcataattccattagatgaattggacgctgatgcaaaatatgctcagcatattgattctgacggattggaagcgattaaaaacgactcattcgatttgaagtattccctaattcagatagtcaacatactgataaaaatctttgtaatcatcgcattcatccttccggttgcaatatacctgaaatacggaagggagccaaaagtgacccttgacagcatctatgagcatgagcctccaacagatgatcctccattctttgtaaatgcaataatgggcggaacctttagggacgtcgggctagtggatacaaaggcattccaggcaacaatcatggacctgataaataggggaaagctatctgttgaaactgaaatcaatgaaaagaacaagcaaaggacatatcttgtggcaaaatcaacagatggcctggcagattatgaatcagacctaatcagcatcctcagaaggtatgaagaagatggcagaatagacttaaaacatatggaactctcattatacagcaagtcagaggcaagatatttcagaggcagattcaacagctggggacaccttctttatagcaattaccttacagatgacatcaaggcagaatactttgaagataagggaagcaaattatttaagtttttcgcatatggcggattgattctaagcgttattcttttcttatattgcttgatgttcaatcaaatggaacctttaccttgggtaattgctctatttatactctcatctgtcctcatatgcataccttcagcatttgcaggacattacacaaagaagggaaagatattcaaggaaagatggaacaacttcaagaaataccttaaggacttttcaatgatggaggaataccctccggaatccgttgcagtctggaacaagtatcttgtctatgctacagcattaggggtggcggataaggtctcaaacaccatgaagataaacttctatgacggattgaatgacgaaacatatagggacaatgatgtatttgtcttctgcgatggcaacggacttgacttgattggggattctttcagtgcagttagcacaacccttgactctgatagcggaggctctgacggagtaggcggaggctctggaggtgggggtggaggtgctttctaa

SEQ ID NO: 1195 - DNA, 489 bp, Methanobrevibacter ruminantium
  source 1..489: mol_type = genomic DNA
atgaaactcaaatattttgccgtatgtctttttgtcttgatattggctgcaggcatttcagctgcttatgcaactgatgtggattttgaaggcggccacagcttcaccatgccagacggctatgagattgttgaaggacaaaacactaccgaagacattatcatggaaaagaatggggacaataggattgttttccaatactggatagatgaatatgaggaccttaaaaacattgaagaaaactataattttggagacatcattaaagcagtaatggaagatgcagtaataggaaatgaagaaaactacacctttgaagactatgatgtaactcaaattgactataaagtacaaggcattcaatgttactcctatatccttgataatggtaaggaaggttatgtcattcaccatatagctaaagaagacttaaaagacttaaatgacccagataacgtcattggagatcttgttaaaagtattaaatag

SEQ ID NO: 1196 - DNA, 507 bp, Methanobrevibacter ruminantium
  source 1..507: mol_type = genomic DNA
atggataataaaaaaatatttgttattgtagctttggctcttttagctatcgttgcagtaggatctgttagcgctcttgatttaggtttccttggaggaaatgacgatcaagacactgctgctgaagatagcgatgccaagacaactactattaaaggaattgaatttaacattccagacggatatgttaaagcagaaaattacaccttagatggtgaaacaagatcaagcggaagtatagactataaggtatatcaagaaggttatgaaaaaggcgctaccgatgcaatccttttcttaattggagattatccaactgacttaactgacgatatgcttgaacaaatgaatttaggtgaaccaaagaccattaacggtcatgacggttacataaccacttccaacgaaggcggagacacattcactgtattcttctatgcagaagatggtgacttagtcactgttactgtaacagacgacacccttcttgaagaaattattaaatag

SEQ ID NO: 1197 - DNA, 465 bp, Methanobrevibacter ruminantium
  source 1..465: mol_type = genomic DNA
atgaacaataaaaaaatatttgccattgcagctttagccattatagctatcgtagcagtaggatcagtcagtgcttttgatttaaatttctttggaggagatgacaagcaaaccactactcttggaggaattgaattcaatatcccagagggatatgaaatagtagataactacactatagtaaatgaaactctacatgatggtgatgatgaatacattgtaaacagccagtattatgaaaacgatgatggggattcactagagctctatacttcagattatcaggatgatatggaagactatattttaaaaatactgactaaaggggatgaaaaaaccattaacggtcgaaaaggttatataaattctgaagacggatttacaatgttcagttttgtggatgatggtaatttaggttttgttactgtttcagatgaaagcatacttgaggaggtagttaaataa

SEQ ID NO: 1198 - DNA, 468 bp, Methanobrevibacter ruminantium
  source 1..468: mol_type = genomic DNA
atgaatgctaaaaaactaactattctagcagccttagctattctcgctatcgttgcagtaggctcagtaagtgcttttgacttaaatttccttggaggagacgacagctcaaccactactgtaggaggaattgaattcaatatcccagagggatatgagataaatgatacatacactatagaaaatcaaactagaaccagcagcggaggcaatgaatacattgtaaatcaggaaggctatggaaactccgacggtgaggaactattgttcttagttggacattatgatactgatatcaccaatgaaatgctttccgcaatgaaagttggtgatgaaaaaaccattaacggccaagaaggttttataacttccgatgatgtatacactgtattctcttttgctaaagatggtgaattggttacagtaaccgtttcagatgaaagtgcccttgaaagcataatcaaatag

SEQ ID NO: 1199 - DNA, 1257 bp, Methanobrevibacter ruminantium
  source 1..1257: mol_type = genomic DNA
atgaatataacagaaaatcagtctgataatgatgaaaaaatattaacaaagtcattttgtcttatttttggagctttgctctttacagcccttgtaatgtatgcattgatgtccactgtaacagagtatgccagctctatgggttccactgcaactattgcaggtcttgtatctggaatatatgtattcggtgggctttgttcaagaatatattcagcaaatgcattggaaaagaaggattggaagaccttagccctaatattcctttcaattcactttttagcatgcatattgtacttctttgtcgacaatgtcgaattgcttattttagtcagattcatccatggccttggatttggagcttcagcaaatgcaatagtgactattgcaagttcaattcttcctaaaaaacgctttggagaggctttcggatactttatgcttggaaccactatcgctgtaggattaggtccatatatcagcggattcttctatgatatctggggctctttcggcagctttcttctagctactgtattctcattcatagcattggtctgtgtctttttccttgatatagaaaggtatcatccagatgaaaagataaataatgaagatattttatctgatgctgaatcagtaggcacagaatctatagatgcaaacccaatcaaaaaacaaaaggaaaaaagaagcttcattgaaaagatatttgaaatagatgctatccccgtctccctatttacagcattgactgcacttggatatgtgtccatactctcattctataggctttatgcagtggaactggacctggttggcccattctcaattttctttttaatctattcagtcatcctagttgcatcaaggccaattgcaggtaagattcaggataaaaatggggataagatcatctgtgtaataggcatagttgcacagtcaataggactcttccttatagcttatgctccatctgacataacaatttatatctgtgctgtatgtgcggctttaggttttggaaccttgaattcagcatgcacaacaatcgttacaaggaattgctcaatcgaccgccgtccttatgctatttccactttcttcatattctgtgacagcactataggattcggtcctgctttgcttggatgctttgtaagtgctacaagtggatatgctcctatttattatatctctgcattcattactctaatggcacttccaatctgtttatattccttaagaaataaataa

SEQ ID NO: 1200 - DNA, 1470 bp, Methanobrevibacter ruminantium
  source 1..1470: mol_type = genomic DNA
atgggagagaaagcacaatgggatagttccctttcatttatatttgctatgattggagcagctgtagggcttggaaacatatggcgtttcagctatgtactatactctaacggaggaggatcattcttcattccttattttgtagcaatagcaatcatgggaattccttttttaatacttgaatatggtgttggattcagctttaaggattcgttcacgaatatcttaaagaaaatagatggaaggcttgaaatagtagcctggatactgattctttttgtatttatagttgtaatttattatatggtcatactgagttgggatatggtatatctgctgaccagctttacatttggctggggagtggacactgcagcttactttacaaatacagttggaggcagtgcagatttggcaaaggggggaatctttttaattcctacaaccatatgcgtagtccttatgtggattgtattatggtttatatcccatagggatgttgacaagggaataggaaaggtttcaaaagtattgatcccatccctttttgtcatcatgggaataatcgtattctattcaatcacattgccaggacatatgataggaattgatgcattgcttcgtcctaactggagaatgcttcttgatgtcaatatctggcttgcagcatttgcacagatcatcttctcattaagcatggggcaggcaatcgcccttacatatgcaagctatcttccagagtcctcaaggctcactgacaatgtattgatagttgtcgcctcaaattcattgtttgaaatattcacagcatttggagtcttttccatattgggatacatgtcattgaattctggaatggccttaaacaaattggttacagaaggaacagggcttgtatttattgttttcccaatgatattcaatgtcatgggtacggtaggaagagtattggcacctctcttgtttttagcaattctatttgctggaatcacttccgctttaggcttcttcgagcctatgctaagctcagcaagttccaagtttaatctaagccgtaagaggacagccactatcctttcaattataggatgcgcattctcaatacttcttacaactggaataagcagttatcttgttggagtaatcgattcatttgtaaatcaattcggaatcctcctgcttataggagttcagtgcataatatttgcttgggtttatggaatagatcatttcattccagttttaaatgaaaacggcatattaaaggtaggaaaaatttggaagtttataatcaaatacctattgccggttgtgctattcgttatctgggcatatggaatatttactttattcacaactgcaaagacatttgagataatggttgatataattataatcgttgcagttcttattctaagctttatattgtctcacttgaatccaagaggaagcaatgaagacaatgcttaa

SEQ ID NO: 1201 - DNA, 213 bp, Methanobrevibacter ruminantium
  source 1..213: mol_type = genomic DNA
atgacttataactgttgtttaaagacttcaagggaatatactgaagaaggattattgaatctcattgctgagacatttgatacagacgtttcaggtttgaaggttgaaaacatcgactcctatgaagatgatagaggtgagaacttcataattacctgttccaaggaagagggaaatatgaagacaataaaagtgtttcatgcttatggctag

SEQ ID NO: 1202 - DNA, 210 bp, Methanobrevibacter ruminantium
  source 1..210: mol_type = genomic DNA
atgaaagatatggaatatccgaatgaagaagctaaagaaaagtttgaagagataatgttaagaagattaaggctattatatggcatagatgtgtctgaaatggaaatcattaatatttctttaggagagtctagtgtagagcctaccattagaattgtattaattgattccactgaggaagattgtattagagtatttgaaattgcttaa

SEQ ID NO: 1203 - DNA, 1473 bp, Methanobrevibacter ruminantium
  source 1..1473: mol_type = genomic DNA
atgaagcaacattctgtaggtagagttgaaactaagacatttgccatcaatgataaattaaaattaagttcaggaaagactctagaaaatgtggaacttgcttatgaaacctacggggaattaaatactgcaaagaccaacgccattcttgtatgtcacgcactcactggggacgcccatgctgcaggctggcataagaacgctacaaagcctggctggtgggagatagtgataggccctggaaaggcattggatactgacaagtattttgtaatctgctccaatgttttaggtggatgtaagggttctaccggtcctgcatcaatcaatccaaaaaccaatgaggaatatgcgcttgactttccaatcattacaatagaggatatggttcatgctcaaaagaagctgattgaacatttgggaatagaaaagctccatgctgtagttggaggttcaatgggtggaatgcaagccttgcaatggacagtctcatatcctaatatgatgaaaaaggcaagcataatcgccacaacagctaggtcttcccctcagcagattgcctttaatgaggtaggaaggcagtccatcatttcagatccgttctggaacaatggacagtactatggaaagaacagaactcctcgttctggtttggctgtagcccgtatgattggccacatcacatatcttagtgatgaatcaatgtatatcaagtttggaagggaattgcaggataaggatcagctaagctatgactttacccttgatttccaggtggaaagctatcttcaccaccaaggggaaagttttgtaaagcgttttgacgctaattcatatttatacattacaaaggcggttgattactttgatctgtctgttgatggctcattgcctgacggattgaagaatgtaaaggccaagttccagattatagctgtagattctgattggctatatcctgtagaccagtctaaggacttgcttacagcccttcagacccttggggttgaagtgagctataatgaagtaaaatcagattacggacatgacgcattccttttggaaaacggtcagatgaacttccttttaaacaatttcctctctgagaatgtggttgacgaccttatgaaaactgatgttccaaccattgacatcaattccacaataaaggatgctgctaacataatgtttgacaatcaggtcactcaccttcctgtagtggatgagaatgataagctgcttggaatagtcactgcatgggacttatccaagtccattgcaaaggactgcaagcttttagaggatgttatgactaaggatgtcagatattgtaagtctactgactctattgaatacatttcaagacagatgaagaagtttgacatttcctgcttgcctgtggtcaatgatgacctatgccttgagggaattattacaactgatcagattagtcatttgatttcatcttattag

SEQ ID NO: 1204 - DNA, 768 bp, Methanobrevibacter ruminantium
  source 1..768: mol_type = genomic DNA
atgaaagaaaataaagaaatgaactggaaaattaaatttgcaattatcatgtttgttttggcagttcttattttccttgctcgataccttatctgcggagatggggaagagatcatcgcttatctttggaagcatatcggatttattccaatagatatcctcattgtagcattggttcttgaagagatcatgggaagaaaagagcatgaagccattttagagaagatagacatgcttatgggtacattcttctctgagattggaaatgatttaattgcagaattaagcaaggccaatgtaaataaggctaacactgatgatttaaaggctattaaatcatggaacgataaagattatgataataaactaaaagaattgaaaaacaatcctgtagactttaaggccaatatcgctccagaggaaagggaagatttcttaaacagaatccagagcttattggttgaaaacagagaatttttagtaaatcttatcaataaccctaacttgcttgagaaagatgaattctcatcacttctgcttgcattattgcacttggatgaagagcttgcaagaagaggtgaattaactgacataaaggatgctgatttcaatcacttgaatggtgatatgaaaagggtttattccaaattggtttatgaatgggtttattatttaaaataccttaataagcattatccttatatgatatctcttgctatacgtaccaatccgtttgatagcgaagcagatgttcatgtgactgaataa

SEQ ID NO: 1205 - DNA, 201 bp, Methanobrevibacter ruminantium
  source 1..201: mol_type = genomic DNA
atgacacatttgactattacagaataccgagaaatggtaaaggatataattgaatttaaaaatgaaaatggtaagatgcctgattttgcaagcgtaaacaatcaggaaatctctcatgagaattattccgccatgataaacgatgttaataactatattctacagcatggcagaagccctgaatttgttcaaattaaatga

SEQ ID NO: 1206 - DNA, 1494 bp, Methanobrevibacter ruminantium
  source 1..1494: mol_type = genomic DNA
ttgagtttttcagacaaaatttataatgcaaaacctggttatacttatgatgattttttattggttccaaatgcttcctggattgaagcgaaggatgtagacactaaaataaaccttacaaaggatatcaaacttaacattcctattatgagtgctgcaatggataccgtaactgaagctgatttggctatcgcacttgctcaagagggtggaatcggtgtaattcaccgtaacatcaatcaagaggctcaagtcgctgaagtcagaaaggtaaaaagcgctgaagacatcactgtacgtgatgttgtaaccatcagtcctgactcctctatcgaaacagtccaagacattatggaaaacgaatcagtcagcggtcttcctgtaatggaaggggacaggattgtaggaatcatctccaaaagggatgtaaggccattcctaaaaaacgattccaaaagattggttaaggaaatcatgacttccgatgttgtcacaatcaaggaaaacatctctcaagaggaagctttagatatcgcctatgaaaataaggttgaaagattgcctgtcgttaatgaggatggcgctttagtaggtattctaaccattaaagacatattaaatcaagatcagcatcctaacgctgcagtagataagaacggaaaataccttgttgcagctgcctgcggtccatttgaccttgacagggctatggcattggatgaggcaggagcagacatcatttcaatcgactgtgctcacgcacataacatgaatgtggtcaagtttgctgaaaccattaaggacaatatcgatgcagacttatgtatgggtaacattgcaactaaagaggctgctgaagacttgattgcacatggtgcagacggccttaaggtaggtatcggtccaggttcaatctgtaccacccgtattgtagctggaatcggcgttccgcagctcactgcaattgcagatgttgcagatgttgcaggagaagcaggcattccagtcattgcagacggaggtctcagatactccggtgacattgcaaaggctatcggtgcaggtgcagatgttgtaatgctcggtaacttgcttgcaggtactttagaggctccaggtgatgtagtaaccatgaatggaagaaagttcaaacaataccgtggaatgggttccatgggagcgatgactggaggttccggaggtggagctgacagatacttccaagaattggaaaaaggatctcacatgaaacattccaagctagtccctgaaggtgttgaaggtgtagttccatataagggaactgtagctgaagttgtcttccaattggttggaggattaaagtcttccatgggctactgtggagctaaggacattcaaaccatgaaagaagttgctagattcgttagaattaccacaagcggtattaaggaatctcacccacatgacttcttaatcactaatgaaagtcctaattatccaactttagactaa

SEQ ID NO: 1207 - DNA, 720 bp, Methanobrevibacter ruminantium
  source 1..720: mol_type = genomic DNA
ttgcttttattaattagtcctataaatcatgaagaagctgttgaatctattgaaggtggagcagacattgttgatgttaaaaatcctaaagaaggttccttaggagctaatttcccttgggtaattaaggatatcagagagcttaccccaaaggatatgcttgtaagcgcaactttaggagatgttccatacaagcctggaaccgtttctcttgctgcaatgggagctttagtctctggtgcagattatattaaagtcggattatatggtccaagcaactatgaagaaggcgtagaagtaatgaaaggtgtagttaaggctgtaaaagacactaatcctgatgctacagttgttgcttccggctatgcagatgctcatagagttggagctgtaagtccttgggacattcctaaggtggcaaaggattcaggagcagacattgccatgttagatacagctgtcaaggatggacatactttatttgattatctagacattgacgattgtagaaaattcacagaagaagctcatagctatggattgaaagttgccttagcaggatctgttaaaaaagaccaattaaagccattatatgatgttggctgtgatgtagttggtgttagaggggctgcttgtgttggcggagacagaaacactggccatattgatagaactgctgtagctgaattaaaagagcttgtacaatcatttgaagaatag

SEQ ID NO: 1208 - DNA, 7251 bp, Methanobrevibacter ruminantium
  source 1..7251: mol_type = genomic DNA
gtgaaattaaaattaatatatttaatttgtatgatttgctgtgttttattaacattttcaactgttagtgcaattgatatggatggaaatctaactgcttcagttaatcatttagatggctcccattcagatcagtctgcatttatttcacagtctgaatcttcgaaaacaaatttaaatgcaaataataatttaagagtttctagtggagattatgattgtgtagaaactatgaatgaattgtctaatttagattcaaaggattctaaagataataacttatccaaggataaaacatctttaaaatctgatctaaattctattgattcagatgagtattctcttaaatctagtcttagttctattaattctagtaagaaatcttcttatgaagatggagataatgaatatgagaacttggaggattctttagattcaaagaataaaaattctttaagttccaatgctctaggagcaggcacaagtacatttggcgatttgcaaaccatgataaacaatgcccaagagggttcaacaatcaatcttgatggaaagacatttatcggaaacggctcatttataaccataaagaaggccatcaccataaacggtggctctgctacaaacttggcacgattcgatgcaagaaacttatcatatatatttaagataagcgcatccaacgtccatataaagaactgttatttctcatacagtaccaactgttccgtatatttctttggaaatggatcctcaatagataattgccatttcgactacaattataagcacctgtgggttgctgtaaacatcaagtacttctcacttacaaactgcaatttcacaaatggaaagacagatatgggaagtaccgcatatgtggtagcagacaatgccactgtgaaaaactgcaatttcatcaacaatgaagcaagcggaaccgaacaatgttacggtgctgcattgcagataggggcttcatcctcaggcataaatgaaggatatgtggtaaattgcaccttcataaacaatagggttatcaccacccatagctattcccatgcaggagcgctatgcttccgtccgggaatcaaggtctataattccactttcatcaacaattactgcaataggatgggaggtgccacaacccttcacagcgatggggagataatgaactgcacattcatcaacaacagcgcaggggaatatggcggagcaatctcaacagggcttatggctgataatatcagcgtaaacattacaggatgtacttttataaataactatgcccctatgggcggagcgattctgataaaaggaaataatgtaaaggtaactaattctacatttaaagaaaacaaggcaagagaaaatgacggtggagcagtttacattctaggtaacgatgctttgatattgaattccacattccagagcaattatgcaaagaatgtgggagcagggattctaatcaacggttcatatgtgactgtcttgaattccagcttcgcaagaaacaatgcaagctatggtgctggaatctatgttataggttcaaatgcaaatcttttcagctcaaacttcactaaccacaatgtcaagaacggctctgtctatataaagggtataggcgcttatgtttataactgtaattttgcaagcaacactggagaaaacggagctgcattatatattgaaggctcaaacacaacattgattttaagcaatttcacaaataacaatgttacaaaggacggaggggcaatctatgttgtaggctcaaatgccaagctaatggcttcaaatttcctatacaacaatgcgattccaagcgaatcagacattaaaagcggccttggaggcgctgtatacattaagggaaacagcaatacaatcgattcctcaagcttcaagtacaatacagcacgtaacggatctgcaatatataccgacggaaaaaacatgaacctttcaaatgacaattttgacaggaatcaggcatggtcatatgtattggattctgtgataaaaccaagcagcagttattttaacagaagcgatattttaattaatttaactttgataggtggcaataatattgctaatgcaatttataatactgcttcagtgaatgatatttacttttataatgtaagctatatatcctcaaagggtaaaaaagtaactacttcaaatgaaatacatccggtaaatggtgcatcaaacagccaaaacggtgcattgctataccaggatgaccgtgaagacaatcaattggtaaatgttattgtgtataaggatcctaatagcaaatctacttccttatctgcaataaacaaaaacgacataatcctaaacaagacattcacaacaggaattcttggaaacgtgtccttgaatctcagctcatctgtgggcaaggcaatagctccaggaaactatcttctatatgcaaagcacactgaagatgactattacaaggaaatagatgaggacaatcagtttgagattctccctcttgtggatgtggctgtagacattgtctccagcaaggatatagtggaatataacagaacaaacaagttcacagtcaaggttataaacaatggtccaaacaatgctacagacgttcaggtaagtgctgtgcttcctaaaggactgatactcgtttcttcaagtccatctgttggcacttacaattctagcactggaatctggaccattggcaacttaaatagcggagttaaccagaccttagccataaacacaagggctaacactacaggtgcagtaaattatccggttagcgtatcctcctatgaaaaggacacaaacgaagctaacaataaggataaccaatcaataaagatacctgaatgtgacttgctcattgacattgcctcatctaatcacagccctaaatatagcgatattgtaaactggacagtcaccgttaaaaacaacggtccggatgatgcaagcaaagttgtagtttccttaggcaatctctctggaaacgaattgatatatcaaaagtccacaaatgccaatttcaatataagcactcagacattggagctttccaaattggctagtggatcaaacgtaagctttgtaataactaccaaggtaaacgcttccaataagaagattacagtaaattcctcagtaagctcagatacatttgaatataacctaaacaacaatcaggacaacgattatgtcaatgtggccccattatgtgatgttggaataactgtaaaggtctctaacaggactgcaaacagaaatgaccttgtcaaatggacaataacagttaaaaactacggtcctgataaggcaagcaatgtaaatgttgcactcagtgacctagcaagcttaggattaggccttgttaacaagtcagacgccaattacgcttcaaacgaatggaatgtaggggaccttaacaaggatgcctctaaggaattggtgattagcactaaggtaaacactgaaaataagaacattgtccttaagggaactgtaaatacaagcacttatgagacaaataaggctaataatcttgcaaatgacacattatctgtcaatccttattgtgatgtcttgattgaagtgactgcatcagataacagtgctaacaagaatgatgtcattacttggactgtcaatgttaaaaacaacggcccaaatcaggctaaggatgttaaggtctcattgaccaatatggaaaaattaggcttaatagtccaaaacaggtcattcacctttaaggatattgccgtattggagaattccacattcaacttcaacaagtcaagcaatatatggtccatcggaagcatggcctccggagacatctcaagcatgactgtaaagaccaaggtcaactgttcagataaggtcttatcagttgagggaaatgtatcaacaagcacttatgagcttaataaagccaataaccatgatgatgacctcttgactgtagaggaattatgtgatttggctgttgaagtgaacgcttcaaagaagactgcaaataagggcgatattgtaaactggacaataaaaataaaaaacaatggtccggacaccgcttctgatgtcttcttgacagtatctgatttggaatctttaggaatggtctttgtaaattcatcaagcaaagattttgacagcgaatcattcgcttgggagattggagagcttgcaagcggaaagggactgactctcatattggccactcaagtggacacctctgatgagaccataatggttgaagctgatgtggatacaagcacatatgaattgaacaaggcaaacaatgctgataatgattcattaaatgtcaatccatgctgtgatattgtcatagacatatcagtctctgattctcctgtaaacaaggaagatattgtcaattggactattgtggtaactaatgatggtcctgacgatgcaaaggctgttgtggtcaatctaactgacttggaacctttagccctaatcataatgaatgtttccgagagttcttatgataatggccaatggacaataggcgatttgcctgatggagaaagtcaaagccttattattacaacaaaggcaaactgttccaatgacactataaaacttgatggaattgtcgatacaagcacctttgagctagataagagcaataaccataatgatgatattttagagattgatcctttatgtgacttatcaattgaaatatcagtatctgattctcctgtaaacaatggggacattgtaaattggactattgtagttgccaatgacggcccagatggtgccagcgatgtgattgtcagtttatctgatttggaatcattgaacttggaaatattaaacgtttcagaggataatttcaatcctgaaacttatgaatggataataggtgatttagataataatgaaaatgctagcttaataatttccgcaaaagtaaatacttcagacgatatattggatgttgagtctacagttgacagcaagacttttgaattgaataaggataataactatgacaatgaaagccttattgtaaatcctttatgcgatcttatcatagatatatctgtgtccgattctccagttaatacagaagatcttgtcgattggacaataacagtaactaatgacggtccagatatggctgaaaacgttaaagtctatttgaatgacttagatgctttaaacttaattttagttaatgcttccgaggattcatttgatggggacgcctatcaatggatcattggcaatctggacaatggcgatgctgttgaattgctcattacaacaagggttaacgcttccaataagacaatagaagttgaatcagctgttttaagcgacacctttgaattgaataaggaaaataactatgataatgatacagtcacagtaaatcctttatgcgatttgattgtagttgttgatgtgtcaaattcaacaataaataaggatgaggtagtcaattggacaataactgtcactaatgatggccctgacactgcagagaatgtaatcttagacttaagcgaccttgaggatttaggattgatagtcttgaatgtatctgatgattcctataatccagaatccggtaaatggattataggggatttggctccaggagagactgttgatttaatagtcacaactcaagcaaatgtgtccaatgcatctttgcctgtagaggccatagtacaaggcgatacttatgagcttaataaggacaacaaccatgacgataagctattggatgtcaatcctttatgcgatttggtaattgagataactgtatccaacagctctgtaaacaagggaggcactgttgaatggaccatagttgtttataatgacggtccagatgatgcatctgatgttatagtcactttagatgacttgaagaccttaggactaatcctttccaatgtgacttatggaacaacaagcatggacatctcatatgacggttctagattgtttgttaaggacatttcttcagaagattctgaaaattctgattccatagatgaaagtgatagttcatcccctaatatgcttaaagcaagctctaaattagatggtgttggttctgatttagataatggggaattaaaatcactcaaatctggctcttatttaagtgatgattcatctaatgattcagataaagcttcaaacacattcgatgaagaaactaacttatggtacattggagatttagccaaaggaaacagtatttctttgaaattattgacagaggttaataggtcaaatgataatataactcttccttcaaatgtggatacaagcacttatgaagtcgttaaatccaataactttgacagcgctattgtagaagttcttccattagctgataatggagataatgaatctgtaaatagttctgattctaatggtgataatcctttagatggtgatggaaacagtacatctgatggttctaatcctgatggtgataattcttcagatggtgatggaaacagtacatctgatggttctgatcctaatggtggaaatggtgatgaacctttagatggtgatggaaacaatagttctaatggttctggtaatcctgatggttctgattctaatggtgataatcctttagatggtgatggaaacagtacatctgacggttccgataattccgatggtgataataagtctggtgataattccggaaatcctgatggttctgattctaatggtgataatcctttagatggtgatggaaacagtacatctgacggttctggtaatcctgatggttctggttcttctgatggtgataattctggcaattctgatgctggtgaaaagtctgatgatggttccagtgatactgatggctctggaaataccgatggcaatggctctttggatgaagatggcgataatgactcaggcagcggttctggtaattatggcagtgacctttatgatatgtacccttgggatgattatatggataataaaaccaatgacggatccaataaaaacaaccagggggataataattcccatgcaggcaaaaaggtcaaaaatccaactaaaaagaaccttagcaatcacgtccaagctaaacaacaaaaaggagttccaatgaaaaatactggacatccattggcattattggttttaaccatttttgctttgtttacattaagctatagaaaatttaaattttag

SEQ ID NO: 1209 - DNA, 1230 bp, Methanobrevibacter ruminantium
  source 1..1230: mol_type = genomic DNA
atgaaagaagaagaaatagaatcaatgagaaaaatattctcccagcttaaagacaaaatcgaacctctttcacagtctcctgcaatacaagctcttcaaaagagggtcatggaaattagaaaagaagccataaaaaacaacagtcagcttttagaaacagttcaaaatagctttaaggaaaacgacatcgactgctttttagcaagcaatgatatagaggctcaaaaaatcattttagacctaatcaatgaagagatagaatctaaccccaatatagacagcaatgatgtatacatatgcaaatccaaatccaacacccttagggagataggatttctggaacttatggaagaaaacaactacaatgtcattgaaacagatttgggagaccgcatacttcaattgaaaaaggaagataacgatccggtccatcccacaggacctgcatcacaccttacagtatcagacattgcagatatcgtcaaccaatcaatggacttgaatctaaatcctgttccaaaggaaataatggaagccgttaggtctgatgtattgaatctcatgcataagtcttatattggcataagcggctcaaactcaatagctgcagaggacggtgcaattctgatggttcacaatgaaggaaacatcagctttgtccaatcaaagaagctccatataattgtagctggaatagataagctggtcccacatcttgaggattcagtttcaattgcaaagctggagactgcatatgccacaggaaagcctttaacctcttatatgaatatagtttcaggcccttcaaagacagcagacattgaaaagaagcttttaaagaatatgtatggtgctgaaagggttgctgttatccttcttgacaatggaaggtcaaaggcaattgatgaatgcctatggtgcattggctgcggcaattgcattgtaagctgtccggtatacaatataattggaaacaaatttggctattccagttatttgggaggaagaggaattgccttaagccgatatcttaaggataatgaggtaagcgttgattctggattgtatatgtgcaccttatgtggaatgtgcactgaaaactgtccggttctcactccaacttatgaaatcattgaaaacttacgttgcgatagccaaaaagaaggcctctttcgcaatcagcacaaatctattagggacaatattaaaaataagggttctccttattaa

SEQ ID NO: 1210 - DNA, 759 bp, Methanobrevibacter ruminantium
  source 1..759: mol_type = genomic DNA
atgttattatattttagaggatgtactgcacgagagaagttagattcaataagtgaagccactcaaagcttattaaaactctttaacattgaatatgaaatcttagacaacgaacagtgctgtgggtctgttttgcttagaactggctttaaggaagatggaatcgaacagatgaataaaacctactcagacattaaaggaaagaccattttaacttcctgtgcaggatgctataaaactcttaaggaagattataagacttatctggatgcagatttagaagtaattcatatttcccaacttttaaatgaattgattaatgaaaatagcatcaataagttagataaagacttattaatcacttatcatgatccttgtcacttaggaagacatgcgggggaatatgaagctccacgttcagttattaagactttttccaatctgactgaaatgaagaatattaaagaaaagtcaagatgctgtggctctggaggtggagttaagtctgcttatggcgatttgtctaattccatagccaaattaagaattgcagaagcaaatgaaactggtgcagacttattggtttcagcatgtccattctgcaaattaaatctaagtcaaaactctgatgatttggaagttttagacctgtctgaatttgttttaaaaatgcttaaagaaagtgatttggacttatccaatttaaaaatgcttgaagaagataatttggagttatctaaaaataagaagatggaataa

SEQ ID NO: 1211 - DNA, 318 bp, Methanobrevibacter ruminantium
  source 1..318: mol_type = genomic DNA
atgattattgccataatcttcatgtataatagggtccgcaataagagatcaactcctgcaacctttgcattatgggtggttgtttggatggtggtcttattctttgctttcgcccctaaaataagtgatcccctagcaggattcttcggattcagcagaggactggatctattgattatagcaggatttgcagtaatcgcatatgctggatttagattttatattaaaatcgacaatctaaatcagaatatgactgatttggttagggaaattgctataagaaatgaaatacaattggatgaagaaaatgatgaatag

SEQ ID NO: 1212 - DNA, 708 bp, Methanobrevibacter ruminantium
  source 1..708: mol_type = genomic DNA
atgtcaaatgaaatttcacaaaacacagaaggaatatttttagtggttcctgcatataatgaggagcgaaccgtatcccaaatcatagaatgcattgcagagaggggatacaatgtagttctagtcaatgacggctctgcagacagtaccctcgaattggcaacagaatccaaaagaaagtatcctgataagatatttgttgtctcccatgtaatcaacagaggcttgggagctgccttaaagactggaatgatggttgcacttaataagggagccaaatacataataacctttgatgcagacggccagcatgaaatcagcgatattccaaatgtctgcaagcctttgcaggatggagaggctgatgcagtaatcggttcaaggccttttgaggacatgcccttgtctaaaagctttgcaaaccttgttatgaatgcccttacattcatattctatggaaggaatgttaaggattcccaatcaggattgagagcctttacagctgaagctgcagagaagatcgatgtggtttcaacaggatatggagtctcatctgaattcattaaggaaatcagtgataagaatctcagattggctgaagtaacaatcacaacaatttacactccagagactcaacataaaggtacagatgcaattgttggcttaaagatattaggtaaaatggtgattgacttatttagaatctag

SEQ ID NO: 1213 - DNA, 459 bp, Methanobrevibacter ruminantium
  source 1..459: mol_type = genomic DNA
atgagaataggaattgcagatactacttttgctcgttatgatatgggtgctgcagcaatagatgagttaaagaagaacgcttcagaccttaagattattcgcaggactgttcctggggtaaaggaccttccagtagctagcaaaaagcttattgaagaggaaggctgtgagatagtcatggctttaggaatgccagggcctatggaaaaggataagatgtgtgctcatgaggcttctacaggacttatacgtgctcagcttatgacaaacacccatatattagaagtatttgttcatgaggatgaggaggaagatcctaaggaacttaagaaattggcagataacagggcacgtgaacatgcacaaaaccttattaagatgatgttccatcctagacttatggaaaaggaagcaggaaagggaatgagagaaggaaaagaggatgttggtccattatag

SEQ ID NO: 1214 - DNA, 1191 bp, Methanobrevibacter ruminantium
  source 1..1191: mol_type = genomic DNA
atgcctaaagaagagattgataaaatcaaaaggaatctgagcggaaatcctgatttggatagggattatctggtttcccaactggaatattacaagggccatgaatattcctatgagataatcaaagagatctcccatttgattttacagtccttggatttttaccttattgaagatataggctctaaaaagactatggcaagccgcattcttgatgaagtgatgcaatatattgaaactcgtgataagaggactgccaaggaaaagcttgataaatatatggagtcatttgtagacaaatacgaaaacaaagaggaccataaggaaagtgatttcaattcaaaccggtccattcgtgaaattcaatatataagatatagggaaaacaaattggcagacagtcccaaatcctttagggtaagtcctaaaaaggataggcaagtgaattggagaaaggatgtcaagataaagaaaatggaaagcaattcaattgaagaaatccatgaaaaggaatatcatagcttcttaaatcctcttgaggagatattgttctatcattacattggactaaagaaggaattggcatatataccattcaacgagcctctatttgacttgtactatctttatggaaccttgctttttgaatctgatgaatatggaaagtcagaggaatatctcttgaaggcattgagaatcaatcccgtatcctcaaagacaatcctagccctagcagacatctataagtcaaagacaagaacatataataggtttttcctatataatgtggatgcattgaagtttgcatacagaaatgaggatatagcaagagcctatagaaactttggcttcttttatgttgaggaaaatcaattggatgttgcagctgcattctatgacttcagcttaaactatgactataataagcatgtagttaaagagcttgaatatctaaagtcaaggggagtggacacccaaatagaaacagaggaagcggtaggaatcattgaatcaaagaacattcaagttggagtcaatgactttgttttagatgccttgaagtttatatgctttgatttggatagtagaaagcacactagccaagccttatacttctataggattttatatgacttgactaaggacaatcaagtcttaggaagaataaatgctctttcgaataagatttag

SEQ ID NO: 1215 - DNA, 762 bp, Methanobrevibacter ruminantium
  source 1..762: mol_type = genomic DNA
gtggaaaagggagagatggtctctcttttaggaagaaacggcgcagggaaatcaactttatttttgcatttcaacggcattcaccagccaaagtcaggtgaaatctatatagatggagaaaaattatcctatggcaaggaagagcttatgctcgctcgtcagaaggttggaatcgttttccaaaaccctgacaatcaattgttcgcccctactgtagaggaggatgttgccttcggccctatgaatctaggccttcctattgaagaggttgaaaagagggttaaggattcccttgaaaaggttggaatgggaggatttgagaagaaatctccacaccatctaagcggaggacagaagaaaagaatagccattgcaggaattttggctatggaacctgagataatgattctggatgagcctacttcaggtcttgacccaaagggagcttcccatattcttaaattgctatactcattgaatgaagaggggatgaccattgtcatttcaacccacgatgtaggtcttgtaccggtatattcatctaagatatttctaatcagcgatggggagattataaagtcaggcactcctaaagaggtattttcagatgttgaaacaatcagaaaagctgatttaagacttccaagggtaactcaccttgctgagatattggaaaagaacaatgatatagatttcggcggagagtatcctttgacaatcggcgaggcccgtcagaaaatcctagatctgcttggaaaataa

SEQ ID NO: 1216 - DNA, 1104 bp, Methanobrevibacter ruminantium
  source 1..1104: mol_type = genomic DNA
atgacaaatgatgataagacccaagaattcaaactcatttcaaaaacaattgatggcgatgagatatttctcaatcatgattcaattgtagtgaaatttgcaggcaaaaggaatgccatagtcacttcttggttaaatggaggttatagcgaagatctctctgctgtattcaatcatcagctgtcacaggagaacattgacgaatatggtgatggtggcatattgggctttttggagatgctatcctacgatttctataataaacttgacttgaagggcaataagttaagcggtttggtcacttcagctcaaatagatgagtattcaattgctgtagagagatataaggacattgaggttctagccattacaacagctggagttcgcgttaatgcggtctcagcaggggatgtcgcttcctattatgaattgaacggagaatatgattttgatttggaaaatgaagatccaaatcctaataagcctggaacaatcaataacatcatcctaatcaattgcaggcttgatgaaagctcccttcttttagctgaaatgatagctgtagaggctaaggcagtggctctaagggaccttatgacttcaagcaattattctagcgagatagcaaccggaacaggcacagacggcatagcaatatgctcaaatctccaaagcgataactttattgagaatgtgagcaagcatgcaaagattggtgaattgattgcaaatgcagtcatccgctcaataaaggaggctttggctaatctgcaatggctcactccatcatatcagctgaatgcacttgtaaggctagacagatttaagatgaatctggatgagttctatgacaaaagcttgaatctggatgagatggagaaaaaggaatttataatgtccttaattaaggtctcaaaaaacccagagcttgttggatatgtttcattaatcattcatatcatagatcagtataggattggattattggataaaaagcctgccttaaaggttttaaattctattttgaatagcaatttcaaccgaaaggaatggaattccatgaaactgcttttggaatacgtcattgaaaagcagatagaataa

SEQ ID NO: 1217 - DNA, 702 bp, Methanobrevibacter ruminantium
  source 1..702: mol_type = genomic DNA
atgatagaggaattagtaactaacatgtctataacggaaagcggagcttcagccagctctccaatatttacaataacaattctagtctttacaatcttgctccttataggcataatatattttgtctttaagatgtatgaacagtcaaagcctacagttgaatcaatcgttctaattgccgttttaacagctattgcaactgtgggacgtcttattctaatgtcaatacctgctgtaaacctggcatcatttgtaataataatggtgggggttgtctttggcaaggaggaaggtttccttgtaggtgcccttacagcatttgtttcaggcatattcatgggaatgggatattgggtcattttccagatgcttgcttggggacttatgggagcaagtgcaggatacttggcttcaaggtttgacagcttgccattcagattcatattcggactcctatggggattcctttacggctggataactgatatttcagctatcttctattcaggaaccgcattgcagattactccaatcattgcattgtacattaacggtttcacctatgacttgactcacggagtaactaatgcagtgcttttagtcgtattgtatgactggtttaagaagatgtttacaagagctaagattaaatatctgtctaatccaagctcaagtgatgaaagcattgacttaactaattaa

SEQ ID NO: 1218 - DNA, 1938 bp, Methanobrevibacter ruminantium
  source 1..1938: mol_type = genomic DNA
atggcgttaatcgaatttaagaatttcagcttttcatatctaaattcagacggaacagaatccctagaaaagtccttagacaatatcagcctaaatattaactttggcgattttgttcttctatgcggaccttcaggatgcggaaagactactcttctaaccaatcttaaaaaggagctgatgccaaacggaagacgtgaaggaagcataaaatacaatggaactgaaatcgcccagcttgatgatttcacttcagcatgcgatataggatatcttttccagaacccagacagccagatagtgacagacactgtaattcaggagattgcattccctcttgaaaacatagggcttccgacagaggagattcgaaacagaataagcgagattgttgccttctttggaataaatgacattctccataagaatgtaaacgagctctctggaggacagaagcagcttatcaacctatgttcccttcttgtcttaaggccaaaggttcttcttcttgacgagcctatgtctcagcttgacccgatcgcttcatatgagttcctttcaataataagaagactcaatgaggagttttcaataacagtcataatgagcgagcataaggcagacagcatatttccattcatagacaatgcagtcttcctaaaggatggaaagatagagttcaatgacaatgcccatgacatctgtgaggaagtaattaatgatgatatatttgaaaactaccttcctgcagtaacaaagatctataatggccttagccaaaactaccttgaaaatgaggaatatataagcgaatatgaagagttcactaaattgaatactcctttaagcattcgtgagggtagacgttatcttaatataattagtgatgagttaattaaaataaatgaagatgtacaaaaaaataataattttgaaaatgattatgcatatgattcattagaaaaagataattctaatcaaaattccacttcaagcaaaaaagaacatgattattatcaaaagtccagtttgaccacaaaaaaatacaattccaataagttaggccttagggataggcttccattctctaatgataagaacacattaattagaatgaatggaatatactttgcatatgagaagaataatcttatactaaagaatgtggactttaaattgaacaagggagatttccttagccttgtaggtggaaatggagtaggaaaatcaaccttccttcagatattggtaggaatattaaagccgataaagggcaaggtaaggtatagtaagaatctgaagatagcatatgttcatcagaatcctatgattcacttctccaaggacacagttaaggaagagttccttgaatcaatattaagctcaaatgcattcagcgcaagcgaattcaatatggaaacctatgatggtcttttaaagctgaatggaaatgagtttttagagtcagacctattgaacaatctaaagtttaaaaatatagactatagatttaaagagcttattggattctttgacattgaaaatctcttggataagcatccttatgactgcagtggaggagagcaggaaaagatagtaatcgtcaaggcattgattcaaaatacagacgttctggtattggatgagcctacaaaaggtttggatcctatatcaagcaaaaacttggcatatatacttaattcattggtggacaatggattgacaattgtaatgacaagccatgacttggatttcgttgcaaacaattgcaagagatgtctgatgctatttgataaggacattcaaatagatgacgaccctaaggtgatatttgcagagaataacttctatactacctttgtaaataggatggtcaaggattatattccgcaagctgttacattggatgatgtaaaggagatttgggatttaaagtga

SEQ ID NO: 1219 - DNA, 1005 bp, Methanobrevibacter ruminantium
  source 1..1005: mol_type = genomic DNA
atggttctcttggctttcatttttagcgatccttattttgtattgagttttttagctttgattcttattcttatcgctcttcagggagtctccagcgagctaaagaacataatgaaatttttcatacccttaagcgtactgattataattctaaatcccctcctgaatcggacaggggcacataggatatatcttttcaacggattcttcatcacctatgaggcaattgcatatgggatattgatgtcattggcacttctcattgtaattctggttttctcatcatataataggtcagtttcctatcaggagatgctttatatcttttctaaaaagcttccaatcatctcaatgataattgtaatggcattaaggttcattccactaatcaattcaagggccattgaggttcaaaagctgaataatctgaaggccaatggggtagaatcagatgaagaggatgatttaaatgatgattctcttgaagacaatctttctgaggaaaataatctttcagatgaaaataattcaaaagaagattcagactctctcgatttagagcaattcgactcaaacatatcaagcctggacatcggttccgattcaagggtcttcaagaagataaagtcctctaaaaggttccaatccattgcaaaggaggcaaaggtccttggaaagatcatgggaataacagtctcatggtcccttgaagagtccatgtttacagccaagtcaatgaaagcccgtggatacaactccaatgagcgaacaagctatctttcatacaagttcggacttgcagacatcatattccttgcaataatcatagtcacagtatcaataatagtgataggccttatacaaggatatggcatgataaacatttatccttcaatagacttctcattcagcgatttaccatttaacatttattattttgcatttatagtatttttattacctttaatctatctagaaattaaggagagattcctatggcgttaa

SEQ ID NO: 1220 - DNA, 4056 bp, Methanobrevibacter ruminantium
  source 1..4056: mol_type = genomic DNA
atgaataaggttcaattgtcctccatacttgctttagtattaatattattcttgtctttggctgtagttagtgcaaatgatgatattttaaatattaatgtcactgacacccaagatagtgtaattgataattcaaatggcatatcggattatttctcaagtgacaatggcatcattaatgatgatgggttaagctctgatgatgaaactgcaggttctcaactcttaaacgactcagaggatttggattcatcagatgatttagcaaaggatagtgatttggaagattctaaagagacatctaaaactcaggataattcacaaaagaatgaagattctaaaactagattatcagacagttccataataagaataacagattcttcatattcaagctactttgacctatccaaggatggggccattagggaaggaaccatcaaggatggagacactcttctcattggaaatgtctctggaaagatattctcaatcacaaagaatattaacattctccctatctcagatggggacacaatgtccaattgtctcatacgccttatagagggaagctccggtacaagtctttccaatttaaggattgtaaacagaaatgagaaagtcgggtccttctacctatgcgggattcatataatcaattctgcaggtcatgatatagtcaatctgacaataaacaacagccagatgaagtgttatggtataataatgtcaaacgcttcaaataacaggattatcaacagcacaatcatcacaggccaggcaacagccataccaatgacaggctcttccaacaatctcttctatggaaactacatagagacatacaataccaatatgatctactattgtatgtacggaaacggtgatttctatccaagggaggatctggaaaagtcccatgataatattatagcaaacaattatttcactagtcgaaacggtacatatgattcctactgctattcggtctgtctcatggcagaggcgggaggatcaggtacggttatagcaaacaataccttcaacaataccttcaggccaattacagtctcaacacctgacactctggtaataaacaataccatattgaatgtagggggagaggcaggcataatagtcgatggaaataacgttacaataatgaataacaatatctccaccaaaaggcttgaaggattccaatggaacaaggaaggcgatgtggtagggattttcacctatggttccaatacaagaatcataggcaattcaatcgacacagtcggcacaaatggaatcagatccagcggagatgcaaccttcatttccggaaatacaatcaataccgaatcctctgcatgcataaacctgacaaagtcaaatgcagtagttgaagacaatgcattaaatggcataggctcaagtgcagttaggatctatacatcaaagctggttgaaaataccacaataagaaacaataatataagttcagactctgaagggatagttctaaagggtaagatagattattcccttgtctgcggcaatattattgagatttccaatccagaggatgccataattgttggaaagtatacaaacagaaacccgttggtccctcagcattatgcaatatttaataatacaattaatggcatagttgtgaatctgactgacatttctgaaatagagcgtaatgatacagatagcggattgaataatacaaatacaagtgattccggtaataatggtactggaaatacgggtaatggtactaatattacagatgttaatggtacagatattaatggaactgatgtaaacggtactaacattacagacattaatggaactgatgttaacggcactaatgttactgatgttaacggaacagatgttaacggaacagatgttaacggaactgacattaacggcacaggaaatgctaccattccagttaacataactaaattatccacttcaatcactgtctacaacacaacagtcctaaggggagactacttggatgcctaccttaaggaccaatacggcaatcctatctccggcgtttctatcgacttccactttaaggataaggtctatgctaagacaaccgacagtgaaggaaaggcaagtttgcattttgatgcgattccggacaattacactatgaatataagctttacgggaaataattattatctatcctcaaatattacaatagacatttctgtaattcctgtttcatattaccttaatgaatccaacttctatgaatacttcggcgaagacggatatcttaagggggattatgaatatgcagacctaatattccaaggtgacttccgcaataagagaattgtgctgaaccagcctttaaggatcatttcagattctgcagttctttatgattcaataatcaagatagaatcagataaggtcgtcgttgacggttttacaatagtcaaccgaaatcctggaaacaagcaagacaaccatcggtttgcaattcttttggattatgtaagggatgttagcgtaataaacaacaaaataaagttggatagctatgacagcggatatggaatctatctatccgaaactcaagactccactgtatcaaacaattccattgatgtgaaggcagataagcttacctttggaatcatcctttatgattctaaggacaatctgattcaagacaatataatcaaggtcaacggtacagacgatcctcatcaatatgagtctacaattcaggttgacacttcaatcagcgtagatgactatgaggcagagggcatgattattcctgaagtatataagacatatggcataattctattctattcatcttcaaacgacattggctacaatgtgataaacgccacatcaggccttaaaaagtattacactgcagttaaggagtctacaaactccattgtaggagtcgacctctattatgatagcaactataataaggttcatcataataatgttgttgtctctgcaaaggatccatacctttatggattaggggttttaggtgccgaaaccggtaagcgagaccaatttgcaactaataacagttttaccgacaatatcgtatttgtgaatggtacttattatgcagcaggtataattgcaggttataattcaattaatactacaatccttagaaattacattatttgcttttcaaacaatgtaagctatggtgtgatattggaaggggctttaaattcagtggtggattccaattacgttatttcaaggtctaggataaattatgtcctagagggctatgacactgattataatcttataagcaataatacattaaatgcctttggccagtatgttggtgatgtaagcttgtataactccaaacataattacattgcaggaaataagctcagtcctatctttagggaaggcaggcttaaggatgctagtgaattgcctggaggcgtcgactttgatgccatattctcagaattgggagtatccaatccattgcatgactattcagataaggactggtcagaattgctaagaacagatcttacagatcacgcagatgtgattcctcctcataccggtgctttctatgatgacggaggtgaaggcaatatctttgttgacaatgaggttccagctcctccttccggcggaaacggccagaccaatagaacaggctccggcgaaaccaacagcaatggaaacggaaacagttccaatggaagccagaattccaattcaaattccactgtggtcaataataataatggaaattcaggaagccaaagcgatatggatggctccggaaacaatccagagaccgatacactaaagggaaacactgttggaacaagctcatctgcagcagttacagagtctgcaagggcctataatttggatgttgatgaagatgccgcatcaagtagatcattatcatttggaggcatgaacatacctgtattatgtatcttattcctgcttatattcgcgtgtgcgtctgaactcgtcaagaggtctaaaagaaacataagataa

SEQ ID NO: 1221 - DNA, 1848 bp, Methanobrevibacter ruminantium
  source 1..1848: mol_type = genomic DNA
atgtcaactaaagtacactcaccagatgaactgcctcaaaagcctggaatatacataatgaaagacataaatgaggagatcatctatgtaggcaagtcaaagtctctaagaaaccgagtaaagtcttattttcaaaagaaccttgacagccctaagacaaaggtgctgatgagccatttcaacagccttgaatacatagtcacaaacaccgaaaaggaagccctcattctagaggcaaacctaatcaagaagcatcgcccgagatacaatatacgccttaaggatgacaagagatacccttacgtaaagataacagacgaggactttccaaagattgtcatcacccgcacaatatcaaagaccggaacatattacggcccatttacagatgttacagctgttcgccaaaccgtcaagtttctaaagcagctatttagaatcagaacctgcaaaagaatggacggcccatgcttaaacagtcaaatagacctatgctatgcaccttgtgacggccagatctcaaaggaagagtataaggagcatataaaaaagattgatctttttttccaaggcaaatataataagataatcaaggaccttgaaattgagatgaaacaggcagctgaaaggcaggaatatgaaaaggctgcagtgattagggaccagataagctcaatcgatgaggttatgaaaaagcagttcgttgaatttgaaaacgacttggatcaagatatcatagcaatcgcatacacaatccataatgcagttgcagttgttatgaacatccgaaacggaaagatcatgggcaaggacgactttacaatggacggttcagagaataccacttcagatgaggttatctctgccttcatcaagcagtactatggaataaacagacacattccaaaggaagttctacttgaagaggatataccagataaggagcttattgaagaatggctaagcgacttaagaggaaataaggtatccttaaaagtgcctcaaaagggaaataagcttaggttagtgcgaatggcaggaaagaatgcagagataatcaagaaccaaaggcaaaagatggaaaattcaatgatggaacttaagagatatctcaatcttaaaaagcttccaagagtcatagagggctatgacatatcaaacatttcaggaaagcttgcagtaggttccaaggtttcattcctcgacggaaagccaaacaagaagcaatataagaaattcaagatgaatactccaggacctaatgactttgcaatgatgaaggaactcttggaaagaagacttaaaccccttaaggaacattacgaaaaggtcagaatcaatgaggagcataccaaacataatgaagcggaaacagaaaagatagagcccttaaaattaggggaagagccaaacctaatagttattgacggaggaaagggacagttgggaatggctgttgatgttctaaaggaatataatcttacccacataccgataataggacttgcaaaggagtttgaagagatttacattcctaacagcagctttccaatcatcattcctcaggacaatgaggctctccatctgctgcagcaggtaagggatgaatcccataggtttgcagtgacatatcacagaaaattaaggtctaagaaaatagaggagtctccacttgatgagatagagggaatcggtaaaaagagaaaattagagttattaaggcatttcggtgactttgacagcattaaaaaggcaagtgttgaagagctgaagggcgttgatgggatgaatgagaaagtggctttgaatgtttataattattttcatgagggtgaaaaggagcaatag

SEQ ID NO: 1222 - DNA, 543 bp, Methanobrevibacter ruminantium
  source 1..543: mol_type = genomic DNA
atgaaagttataggtgtaacaggtttaccaggttctgggaaaagcattctttttgatactgctgaagaaaaaggagctctagtagtttgcatgggcgatcttgtacgtgaaaaggctgcagaaagaggagaagacagcggtaccactgccagaaaattaagggaagaatttggccaatatatagtggctgaactgacaattgaaagaattaaggaaattttagaaaaagataaagatgcaaagatcattttagttgatggaatcagaagcccttatgaaatagagctctttaaggaaagctttgataatttcatttcagtttccatttatgccagccctcaaacaagatttgaaaggcttgtccttagaaacagggaagacgatcctgaagtctatgaggacttccttgtaagggacaatagagaaataggatttggaattgctgaagttgtggcaactgcggactatatgcttaacaatgaatgctctttagaggaattcaagcaatccgttgctgattttattgaaaaggaaatggattaa

SEQ ID NO: 1223 - DNA, 747 bp, Methanobrevibacter ruminantium
  source 1..747: mol_type = genomic DNA
atgataccaaaaactcatccacgttacgaatcattattattaagagataaagtcaaaaacgcatttaaggaaggctatttagcagattctggaatgattgctcacggaaggggagagacattcgactatcttataggcgagagaaccacagaacctgctagaaaggcatgtgaagctgctgttgcatacatattgcttgcagaaaatccggtattgtcagttaatggaaacactactgcacttgccatagatgaaataatcgagcttgcaaaggcaacagactctaagatagaaataaatctcttttacagaactccagaacgtgttgaaataattgaaagaatgtttaaggaaaggggctgggaagatattcttggcggaaacgatgaaaagcttgaatatattgacaatctcaacagcccaagggctacagcaagcaaggaaggtagctacattgctgatgtgatgcttgttcctcttgaagatggtgacagggctgaagttctagttcaaaatggcaagaagataatttgcatagatttaaatcctctatcaaggacttctaagatgtctacagtctctattgtggataatattgtaagggcagttccattgatgacaagcatggctcttgactttaaagagaaaggcaaggacaaggataaggaatttttagaaaacataattaagaatttctccaatgagcagaaccttaaggattccttggctgagattaaattaaaataa

SEQ ID NO: 1224 - DNA, 579 bp, Methanobrevibacter ruminantium
  source 1..579: mol_type = genomic DNA
atgaaacgatttattgctattgatgggcttgacggttctggaaaggacactcaagcaagaaagatcaaggaaaagtatgagcaggaaggaactgtggtaattcgttctcatccaacatctgacaatttctttggccgccattcaaaatccgcattagagaaaaagggaaagcttaataagatcattgcaaccctttgctatggcgcagatgcaataaggtctgtaattaaatattatggaaaatacgatactgttatctttgtaagatatacattggctgtttcctatttaagcaaagccatatctgttcctgtttataaattggtttgtgtattgcttcctatctccgaatacttcttttatttggatgtctctccaaaggagctggttagacgggtcaagtcaagaaatgaaaaggaagagatgtttgaaaactatgatgcctttgtaaaggtgagaaaaatggcagagcctgtattgtacaattggaatgttattccagcagatgactctccagatgaaatattttcgagaatagaagcaatcttggatgaattagataagaaacttttagaataa

SEQ ID NO: 1225 - DNA, 528 bp, Methanobrevibacter ruminantium
  source 1..528: mol_type = genomic DNA
atggatgaaaaaatagaaaatcccgaacttaaagcaataatggcaatcgaccctgaagagatggatgaagaccagctaaacaagtttgttgaagcgtttatggaagcgacactaattgttccagcagaaatggaaacagatattgacattgaaggcatgagcgatgaggaaatagccttgaatgaagagattgaaataaccataatcaagcttgaggacgatgagggacatgaattcattccagcatacacagatgatgaggaagttgaaaagcttgattttgatgtctatggattaatttttaaaacagaagacttagctaaccttttatatgaaagcgaagacgaacttgaagcggttgtattaaatccattcactgaatattctgctgaaattcctttggattccctttttgagctctttgatttagaggaatgtgatgatcctaactgtgataatccacaccaccaccatcatgaccatgaacacaatcacgagcatcatcatgaccatgaacacgagcattaa

SEQ ID NO: 1226 - DNA, 858 bp, Methanobrevibacter ruminantium
  source 1..858: mol_type = genomic DNA
atgagaaaagaaataatttctatattggtaattgctattatagcaatctcagttattccaactgccttttcagcaactgacaatggtattgtaataacttacggcgaaactacatacaataatcaaaattacaagtctattgtggataattactttgcaagcaagggatatggaagttccaacgttcaaggtgaagtgattactgcagctgacgtaaatgcaatatcctctggaataagcggaaaaacatacaattccaatcagatagtgtcatgcgctttggtggatatgacccaaaacaatgagatcacagttgaagtggacaattccattacaacaatcactcctcaaatgtatgcctctgccttaaagtcagcgggaattacaagcggacatgtctatgtaagcactcctgtaactgctactggggaatctgcccttgcaggaatcatgaactgttatgaggaagttacagatgttgaaattccagaaaatgtaaagcaagcagctaacgatcaaatttatacagaagctgcaattgttgaaaataatgatgatgtaagctctgaagaattatccaaattggtggatgatgtaaaggaagaggttcaggaaaagaatattacagatcatgatacaattgtgacaataataaatgactacagcacaacctataatatcaacatttccgatagcgacattgaaaaccttgcagataccattcaacagctccaagaggttcaagatgatgcaaacagctataaggaacaattggatgatgctgttaacaataccacatcaggattctccattgatggtattctcaatgctatattaagtatttttaatttcagttaa

SEQ ID NO: 1227 - DNA, 567 bp, Methanobrevibacter ruminantium
  source 1..567: mol_type = genomic DNA
atgaaaagctccataactaaagaagactatttaagaatctatgaaatgacagatgatgttttcacacttgattttgactgtggaaagctctgcaacaatatctgctgcaccatcgaaaaggaagccaaggatgatgagtatcttgagatggtattgtatctcttgcctggcgaagaggaactcttttttgaaaaccaatggtttgagatgtattatgaaacaacagatgaatatgaataccctgattcatggaaagggaaggtatattatgtaaagtgctccgatccaccatattgcgataggaaaagaaggcctatccaatgcaggtcatttccggtaagcccacatcttgataaggacaacaagctccatcttatctatgatgaggatgacttcagctatgactgtccaatagtcagccaaaagatggaattaagcgacaatttcaaggaaaagatattaaagatgtggagcatcttaatagaggatgaactgatcttcgatttaataaagatggagtcagtacaacgagaaaataatgaaaaagagtatgattttgttttttaa

SEQ ID NO: 1228 - DNA, 600 bp, Methanobrevibacter ruminantium
  source 1..600: mol_type = genomic DNA
atgaataaaaaaagatttaaattattattaactatttttatagcatttgcactcattaacacttgttttattttaaatgataatctctcagcagcagacaatgctccaaagggatatagcaactactatattcgtggggtctgcttcaatgtccctgactcatataaactggtggatgagggatgggatgatgtaaataggctaagctacgctcattttaaaaagggaaacaatttccttaatatcagcttggataagcattccacaaagtttaacaagaaccttttggatggattcagttcctttacaataaatggaatcaatctgaataagaaaaccatatctcatgtaactggattctatgcaaagaagaatggcgtaaagcattttgtctttgcaacagaggatgattttgtatatattgcagcaaaagggccaaagcttaaagatgtcttatcatcaaccaatcaaagggattataagccttatcatgatagtgaatatgactttgatgatgatgcctattatgaatcagacgtttatgatgactcttttgatgattcctttgatgatggcgcttattatggctatgattggtag

SEQ ID NO: 1229 - DNA, 684 bp, Methanobrevibacter ruminantium
  source 1..684: mol_type = genomic DNA
atgaaatcagcagttttattttcaggtggaaaagacagtgcaatggccttaaactatgccataaacaatggagatgatgttagatatcttctttcaatgaaatcccagaatgatgagtcatatatgtttcatgttccaaacattcatatgactgatttgatctcacaggctgttgaaattcctcttatggaagtggagacagatggagtaaaggaagaagagcttaaagacttaagaagaggattcatacaactaaaggaagagggaattgaagcaatttatactggagcacttttttcaacctatcaaaagtcaagaatagaaaacttagctgatgaaactggaataaaggccatttcaccatattggcataaggatccaaaggaatatatggaacttgtattggaaacaggctttaaggtaatcataagcggtgtctttgcagaaggacttgatgagaagtggctaggccgtttgatagatgctcaagccctccaagagcttgagaaaatcagtgaaaagacatatcttaatcttgcatttgaagggggagaggctgaaacccttgtgattgacgggcctatatttaaaaagagaattgagatagtggatgccgagacagactggcatttggataatggtacatataatgtcattgaggcaagattggtagaaaaagaataa

SEQ ID NO: 1230 - DNA, 786 bp, Methanobrevibacter ruminantium
  source 1..786: mol_type = genomic DNA
atgatggatttaatctctggaataatatatctaatcctattcattataataatggtctttgccttttcaatgggtattctctcaccctatgttggaaggcgtgaaataatttccattattgcaataggatttgttctcggtgctattggcggatacttctttatatatcctatgtatcaggacagtccctatgtattgggcaatctccagggattgtttacaatggaaagtgagataataaacctgaacattccatcgacatccaatatcagtgatgtcactgaaaagattctaaatcaaaatggggtcaattcagtaagcactaatggatttgagcttacaacaagctcgataaataatgaaacgaaaacatatattgatagctatcttaagaatgattctcagatagagcgctatagcataggaaccaataatatttccgttgacctaaagaacgatgcaagctcaacagccacattgggatcccttgttacttggctttccaatactgttggagtgagctcggaatttgcctttgttcacattaaggttaatgtgaatgcaaatcaggttctggatatcaaggaatatttaagggacaatcattatactatagtctcagtagaaggccctgttcaggataccattcattatttctatgatcatctggctccagattatgttgtaatgtgcattacaggcataattggtgtattggttgctattgcaggcatatatgtagagcctttaaccaagtttgtaagagcctttagaagagggggataa

SEQ ID NO: 1231 - DNA, 582 bp, Methanobrevibacter ruminantium
  source 1..582: mol_type = genomic DNA
atgtttgataaatcaatagctaaaaaatcttctttgccttttaaatcaataaacaataacagtttatttaagtttatatcaattaataaatgtttatttaagtttatatcaatcaacaataaaggtttatttaagtttatatcaatagacaataaaggacaactctcactagaatacatactaagcgctatgatggtcattctactaataacactcctttctgttcctatcctctcactaacaattgattattcaaatgatgtcataaactctataagcacaaagaatgaactgtcaaaaataactgattctattgatttctgctactatagcggaaagggttctaaaaaggtggtcttgcttgatttcaatcaagatttttctgttcgatttaccaacaatggccaaaaggggattgcatatgctgatttggaattgtcagataataaccacaaagagatatctagcgaatatgattatataggtctaaatacaaatattcagttttcaaagggtttcaataagattttagttgaatgggatgaggataccggactaatcaggctctctaagttaaattaa

SEQ ID NO: 1232 - DNA, 909 bp, Methanobrevibacter ruminantium
  source 1..909: mol_type = genomic DNA
atgaatatctatattttattttggaatatctttaacaacattgacttttatctgatgtctggcttcattatggtattctttacactcttattggctaactattatgatctgaagtatgggattattccaaataagttaagtgttttccttatgacatttgggattctaataaatgtattgattttaattgtccttaataatcgattgtacgcaatattttatgtatcttatttaattataatttttattatctcatttgtcctatggaaaatatccttttggggaggtggagacctgaagctattctgttcaatagggttttcacttccctttatagatattctgaatcatttctatactggcagcatcttaaatagcttttcattcaatagccagataattctttatcctaagatcttttcaatactgataaattcaatcttattgtcatttccggttattctattactgcttgtttataagttgcttagggaaaacaagctgaacttgatattatttgctttttccaatatgaaattgctcataaaggaactgtcaacaaagacagtatttataaatgacctgaaggagggaatgattgtagaggattattatttcaatagcttggagctatttaacttgatggaagagctgactggaaatgaagagtgctacaatctaaaagcaagtcaatttaaagagaattcttatgtccttaagtcatcttcaatggcaggtctgacaagggatgacattaaactaatcaattttgcatatatggaaactttaataaactttcccaattttaaaatcaaaatgggagttccttttgttccctctttgactgtaggatatttggtattcttggctttcggtgatttggtgtttttaatttcaacaataatctaa

SEQ ID NO: 1233 - DNA, 216 bp, Methanobrevibacter ruminantium
  source 1..216: mol_type = genomic DNA
atgatggcatcaattttacgaaatcaggtcaatttcacattttcatacaactttcatatgatggcatcaattttacgaaatcaggtcaatttcacattttcatacaactttcacacgatgaaatcaatttactatcttgaagtaaattttacgaaatcaagtaaattttacgaaatgacatcaattttacgagatgacatcaattttacattctaa

SEQ ID NO: 1234 - DNA, 600 bp, Methanobrevibacter ruminantium
  source 1..600: mol_type = genomic DNA
atgaatgatttagataataatcttgcaaacgctaaaggcattggtaaaaccattgctacaaaggttccgatgaatgttcatgatgaattagttcatttggtggactgtggtgcttatttaagcatttcagacttcttaagggaagcgattcgtgaacaattgaagaattataaaattgctgacatgaggaaaattaattatcaggacgctaaaagagaggtaataagctacttcaaaaagtataaggtctgttttttagatgagatagcaattaatttagaattggaatttgaattggtcaatacaatcttgaacgaccttgttatggaagaaaggattaagatgatctctaaagccgatcaggtcttcaaggattatttggaggaaaacgaccttgatgaaagtcaacatttttccaataagggaaacaactttatcaagttcaagggaaaacgcataattgttgaatcaagttccaaagacgttgatttcattagcttaaggcctagtccaaagaataagtctgtcttgaaaagccatggtatggttttaaacaatgggactgtcattctatccgaatgctatatctttttaaaatag

SEQ ID NO: 1235 - DNA, 1677 bp, Methanobrevibacter ruminantium
  source 1..1677: mol_type = genomic DNA
atggatttttacaaagattcaagattttttcaaaattttaaggagtggatttatctgacaaaatatattataataactggtggagtagttagttctattggaaaaggaattacttctgcatctattggccgtattttacgttcgtatggcttaaaggttgcagctattaagattgacccatatttgaattgggattcaggtactttaaacccatatcagcatggggaagtgttcgtcacttatgatggaatggagactgacctggacttaggtcattatgaaaggttcctggatgtagagcttcctggaatatcaaacattaccacagggaaagtctatcaatcagttattactaaagagagaaacggcgatttcttaggcgcttgtgttcagattatccctcatatcaccaatgagattaaggaaatggttcgtgagatatctgccaaggacgattatgatgttgttttggtagagcttggcggaactgtaggggacattgaaagccagccattccttgaggctttaagacagcttagaaatgaggaaggctctgaaaatgtaatgtttgtacatgtgactttcgttccttacttgaatgcagctggcgaattcaagacaaagcctacccaacactcttcaaaagagcttagaagcatgggtatcaaccctaacatgattgtcttaagaagccaagaacctattgacgatgacttgaaaagaaagatcgctcacttctgtgacgttgatgtcaaagctgtcgtaaacactcctgatgctcaatcaatctatgaggttcctttggtattggatagggaaaatgccggacaatacatttcagatagaataaatcttggaatcgattttgaaaatgataaaaatactcttaacgaatgggaagaaatcgtaaactcccttaaaatacaagatccggttgttaccatcggaatcgttggaaaatatgttgaattggaagacgcttatattagtataagagaatcactccatcatgcagctgccaaaatcggcgctaagatgaatattgaatatttaagttctgatgttgatgtggaagatgttgatgaattgaaggcattcaaggaggagctttcaaagcttgacggaatccttatccctggaggatttggagaccgtggagttgaaggaaagttccaggctgttgattatgcaattgaaaatgatgttcctatcttcggtatctgtttaggtatgcaatgtatggttattcagtttgcaagaagaattggaatggaaggtgctaacagcagtgaattcaacacagaaacaccatatcctgttattgatatgatggaagagcaaaagaaaatcaagaagatgggcggaaccatgcgtttaggtgcttatgactgtaaattgattgatggcaccagaactatggaagcttatggagaagagaacattcaggaaagacataggcataggtttgaatataataatgaatatagggatgttcttactgagaatggtcttgtcattgcaggaacaactccagataatttcttggtagagattgttgagttgcctgatcatccatggtttattggatgtcagttccatccagaatttaaatccagaccaaataatgcacatccattgtttgcttcttttgtacaagcagcttttgataataaatag

SEQ ID NO: 1236 - DNA, 381 bp, Methanobrevibacter ruminantium
  source 1..381: mol_type = genomic DNA
atggatacaaaaactattactgcagaattgaatgaggagcaatataagaaatatcaaataatgcaagagaataatttgagtgtaggtgaagccatagatctgattttcaatcttagggaagagtttgaacttcaagctaatgattatcttgaagagaggcttgctgagctaaatgataaaaaagaaagtttatctaaggaaatgtcttcaatagatgatgaattgaatgttcttaaaaaaattgtagattctcctatggacttcaagcaaaaaagagacatcattgaaaaggaatatgcaagttttgatgagacttatgatattaaggttataagagctaagcatcaagtaagttgggtaactgatttctttaaattctaa

SEQ ID NO: 1237 - DNA, 453 bp, Methanobrevibacter ruminantium
  source 1..453: mol_type = genomic DNA
ttgaataaagataattcttcattaaataaaaataatcttaatttagaaaaggaaaattcaagtcttgaaaaaatacttaagccagaatctaaattaaattccagtttggatttggtttctaatatgatttcagatttggattctgatatagaatcaagattaaattctgatttggagtccagttcaagttcattctctgatttatatagaaattacctcatcgaagacaatgaaatctatttggaaatgtccatttcaaaagatgaattcttcaaaatgatgaaatttttatatgttttgattgactcatatagattagaattaaataatatagaagttttagatacaggtgatggattattaaatatctgctcaagcattttaatggaagatgagtcaaacattaaaataattgaagcatttttaataaataatgactttggaaatgattga

SEQ ID NO: 1238 - DNA, 744 bp, Methanobrevibacter ruminantium
  source 1..744: mol_type = genomic DNA
atgttattgaaaataattgaaaacaaaaagataaaggcaaatcaaaaggaatttgataggtttttagaaaggttccataacaataaaaagacattcacagtagactgtgaccatatcaatctggactatttcaattcagaatcatatgttacaatcagacatagaaagccaaataaggagtccatatattatacaagcttttttaaggaaagggatgaagtcacttacttatttggccttgcccgtgaaaatgtggtttgcacatcctcttatatggatatgggtgctcagataagacctaccttagttgcagtattgaatctggaggattcctctaaatcaactattgtatttgctgaagacagcgaagaatataacaatgtcattctgcttagaatagactgcagtcagctaaacaatgatgaattgactgtcttaaagaataagaataagataaccaagcttaaagatggaaagggctttatcaatttcggagccattggtgatttcaccacattgaaaaacatccgaaacttcatttccaatgtgacttttgaatatgacaatggcctttatgcaaaaataataaatgtatctattccaataaacaatagtttttcaaaacctgattcggatgttctaaaggacagattctataattttgataagctggattctgatctggtggtcattgatcctaatgaagatgatgattccaataaaagaattctgaagataaattaa

SEQ ID NO: 1239 - DNA, 4689 bp, Methanobrevibacter ruminantium
  source 1..4689: mol_type = genomic DNA
atgaaaaaccatagttttatgtttttagactcagattttcaggatatctctaatttttgcatgaggatggaaaagaatatagttgaaggcgacggcgtagatgcagttatctgggcaggaaagatagcagaacgtgttacacactatattacaaaattcgtgggtattgatttaaacgaattggaccaaaataaaaaactcaataccttatactctaaaggaatcatacctgaagataaatacaataaattggattccatacgtcaatatagaaacattgcaactcatcatgaattaagggatgagatgaacatagcaaagaaaactcataaagacgtttttaatatattgtcatggttttatgggacatataagggtgatgaggcatattacaaactcaaatatcctggagtcacctatcgccatgatgaaagctttttaaatcaacttaaggaaaacataaacaacaatgtaaaaaccatagataataataaggccaccacagcaatcaaatcagccaacgatcacatatatcagcatgatgttgactataacgtacacagctacttcaaccaaaacaatgttgaattcaatccggaattaaatgcatacactgcatttttcatttttgatgacaagaaagtaaccataggccatttcaagacaagggaagttgcagtgagaaagggatatagattcgttctaaacgaggactttaggatgtttcaatactttaacggatgcctgcttcctgaaaggttggaagatggaagctattccgattccaagggaatagatttcgatatggaagaaaagctatggaaagcaagctttgacgataaggatttgggatacttcatatctgaaaattcagccataatcgcaagaaaggaatatatagacaccttgccattacctgagagcaaaaacggctcctattcagattataaggaaatctcatttgacttgaaccataagctatggtacattaagaaggaaggaaagatactggactattatgatagcgaaagggaggcaatacataacctttcaaatgtctataggctcgatatagacttagaggacttaggcatagtccaggacaagaacgattcaagatggaagatattctataagaacaagtatgtaaccacttgcgacactaaggaagaagccatcaaaaagcgattaagccatatttccagctttgcaccaccaaagagaaacaaggatggggagtattcaatccataagggaatatactatgacgataagaaccttatttgggtattgacaatcaagggagagacattaggattctttgacagtgaagaggacgccttcaattataagaaggaattcctaaaatccaaaggatttgatgtaagcgaccttatattccaccaagaggaattatttgatgacagctttgactttaaggtaaggcttaacagcgaagaaaacgccgtagattacgataaggacaatgacgaatgggtcatttactttaggggaaacgagataggaaggaaagcctctgaagatgaggcaagaaagttccgtagggcatatcttaaggaaatgccttatcctccaagaaagtccaatggtaattattcattcattgatggaatagattatgacatcaacagccatttatggttggcaaagaatggtgaggagctgatcggacattttgactccgaggaagatgcattctatggattgaaggaagctcttgttaaggaaggctttgatgtaagagatatgcactttatcaattcagacattaaaagcaatgatgaaaatgacggtaacttgtctaatatagtcaatccaagcaaggattatctaataaaggacaattccactaaggattatcttagtgatggttctgtttctaatgaagattcttcagcagaagcatctaatcaaaaagatggctctgataaattaataagcttttatgatgtatttagaacaaatacaggcaattatattttaagcgattctgaagaaagtttaagcgattctgaagaaagtttaagtgattctgtagaaagtttaagtgattctgtagaaagcataaataaacctgtagaaagtgctgatgaagattttaaaaacaacagtgaaagcattgctaatgacagcgcttttgaaaccgacaatggaaggggagttatcgatcaggagtttttagcagatggagacaagcaattcaatatgggtgcaataatccaagaggacaattcaaagaatataaatgagtataagaaaagttccttttatggaattgccaatcaaaatcaggacgataggctttcagatgatttatcaattccatatttggaatcagaggataattacgaatatatggaagacctcaatttagagcagcttaatttggatgagaacaatggattcctaaacatatctgaaaaccttttcaaaagctctaatcgtaaggaactaaaggaaataaaattgaactcatacgactccaataacttcagaagggaaatggttctctcctataacgattcctatttatgcgtatcccttcagggcatggtaaataaggatgagttaaaggacatcatatttttagacattttggacaatatggtcaaattgaactattccaaggtggatgaagagtatttcagcatcttcatcaatgtgcagtataagttaagcacaattgatttagtaacattgataaatcttttgtctgatttaggttgggaatttgacttattggataaattggccatttccaatgatataaatctaaattcactagtccaatccaagataggaaaaatcagagacaaaaggaaagcccattcaaatgaattgattaaaagttctcataatgaagattcattaatctccaagtctaagattaatgattctatagtttccaatgaatctgattccaataaaggaagctctaaatttaaggaaaacttatctctttatgataaattttcactaagctctaatgatgcagaagattcagatgctcaaaaggctaaagataaatctttaaagtcaaaagactatttggatgcaaatcctatttccaaaagaaaaagctatccaaagcaggaatcaatatcctctaaaaataagaaatctaattccaaatcagaaaaggcaattatccgtggcggagttagagtcagtctagaggaagcccatgagatagataatgctgaggaaaacaaggtaataaaatccaagatcattgataagaagccagaaatggttaaagactttaaaacaacttctttagatagtcttttagaggcaaatagaattaaggaagaagaaagacttaactctacttcagatgatattggtgatgatttgtctattgaagataattctgacacatttaaagatgatttaaattctaatggtctggaaactttagaaaacggattaaatcttattaaagagggtttaaattctgctgaaaatgatttggattatgctgaagatgttttaaattctgaagaagatgatttggattctgctgaagatgttttaaatcctgaagaagatgatttaggttctgttgaagatgttttaaatcctgaagaagatgatttaggttctgttgaagatgttttaaatcctgaagaagataactatgtttctgaatctagtttaaatgatgattttgatagtttggattattcagactccttagaagactcaactgattccagttttgattatggtgatgtattgggtgaagataactcaaattccaattccattgaagacattttcaatgatgaagatgatttggattctgaaggcttattggatgaggattctgatgatgttgacttcttagaaaaggtttcatctgatctgtcttcaactaacttgtttgatgaatctgcagatttaagcgctaacgacttattcgatggctataatgattctagctctagcgatttgtttgatgatgaatctgaaactagttttgaagatgaattggacaatataggttcttcaaatcaagaagatttgtcaaccgaatcaaatgattcagattctaatttggaagaaataggatctcttaaagaaactgcagaacagactgaatcagaatcagattccactgcttcaaaggtatctaaacctaaagtaaagaaagctaaaaagcctaaaaaggttccagcagatgcatttgatgaaaagtatgcaaattccactgaaatcgaatatgatgaggaaagcgataagtggcttgcattccttggaggagatttaatcaggtcatttaacactccaaaggaagcttacattgaacgtaagaagctattaagaagaaaagtcaaaaggcctaaacgtggtatgaatggaagatattccgaatttgaaggaatagacttcaatacacaagagggcttatggacaagttcagtaaatgatattattgtctgttactcaataactgaaaaagaggctcataaaaaaagaaccatgttcgttgatttgattttagataagtttgatgtctcagaagaggaatttaccgaagatctcttagaagaaattaaaagcactaatttagaagatttatttgctgatttatcagatgaagatttgaatgactcttctaatttaagtcttaaggaggttaaaaaagaattaaataagttttaa

SEQ ID NO: 1240 - DNA, 300 bp, Methanobrevibacter ruminantium
  source 1..300: mol_type = genomic DNA
atggaagaaataagaaaggaactaatcaagtttcaaatggaaagagactggaaaaggtatcatactccagagaatttagccaaatcaatatctatagaagctgctgaactcttggagcactttcaatggcaaaaggaatatgataaggatgaagtggtagatgaattggcagatgtctttaactactgctttctaatggcggatgcattggatgttgacgttaaggaaatagtcttcaataagatgaaaaagaatgccataaaatatcctcctaaggtcagttcagatgatcttaagtag

SEQ ID NO: 1241 - DNA, 774 bp, Methanobrevibacter ruminantium
  source 1..774: mol_type = genomic DNA
atggatgactttctatcaaattttgttttaaaggaagaagaaacaagtctctcagactccaaaaaggatgtattaaagtttctaaagcaaatcggagtggacactcgttttgtaagcttctttgaaaaagacaatgaaaaaaggatatatatagagaatcttcgattttcaaggttttccagaaagagaacatctattttcaataatgaatatccagatattgaagttgtccgatcttccctttttcaaaagatatgtttaagggcttcaaagaccttgtcaaactccctggaccctaaggatagagtcatcattccaaaaatggacaatgaatataacgagcttttatttattgttttagagtcttattcaagaaaatatggcataatctttattgaatatgatgaaaatgaaaatatcaatttaaaagactttaatgccattgtctctccattaaacctaaatcaggaagtaaatcatatcttaaatgacatatttgatggaaagggaatagaatgggataggaaattcgatttgtcttctctttatggctttaatgcttcagatatcaaagacaagaaaatcatatttccatttatcaatgtgcctcaagagtggatttatgactttttaggcatagaaaaggaatatgtaattgattatgataatgatgacattggagactcctttatgggatttttaagcgaaataaatcctcagtttaaggaaaatgtattggcagcctctagctttttagagacacatcaaaaatag

SEQ ID NO: 1242 - DNA, 897 bp, Methanobrevibacter ruminantium
  source 1..897: mol_type = genomic DNA
atggtagatggaaaaacaaagatattaggagttataggagaccctatagaacatacattctcaccggctatgcagaatgccggacttgaagctttaaatttaaattacatttatcttccatttcatgtcaaatcagataatttaaatagtgccatagaaggggcaaaaacccttggaataaggggattgaatgtaacaattccccataagagagaagttataacatgtctggatgaagtggatcctattgcaaatatgataggtgctgtaaatacaatcaaatttgattatgatgaaaatgagggcatatcaaccaaaggatacaatacagatgcctatggctgcttaagggccattgaagagaaagcatcagtcaaagataaaaaaataacaatagtaggtgctggaggagcctcaagggcaattgcctttcagatggcaagttcagacattggggaattatccatattgaatcgtaatttcaataaggcagaatcccttgcaaatgatataaaaagtaatttaaagcaattaaacgataatttcaatttaaatatcaatgcttatgatatggacagcctaaaaagagagatacaggaatcagagattttaatagacacaactcctattggaatgtatccgaacattaatgacaagccaatagcaagtgcagatatgatgcatgatgacttgattgtaaatgacattgtctacactcctatggagacctctttgattaaggaggctaaaaaggccaatgctgaagtggtttatggctataagatgctattgtatcagggcattcgcagctttgaaatatggctaggagaagaagcccctgtaaaagaaatggaaaatgctctattgaaagtttttaggcatttaaatggtttttaa

SEQ ID NO: 1243 - DNA, 540 bp, Methanobrevibacter ruminantium
  source 1..540: mol_type = genomic DNA
atgaatctatgtatgacgactttaagaatgtcattagcggagaagagacagcatctaagcaagctctttttagaggtcttaaaggaacattcaggaaccatttctgtatatgaccttatgagcgttacagctgagcttagggaagataccaaatatgtccaggacaaatatagggaagagacaaatgctgtctatgtaaaatacttcttaggccgtataaagaacatacgtgatgataataatcagtatgatggcagcatagacaaggatgacttcattgaatcagttgctaccttaaagtcatatcaggaaggtgaatcaaaaacatcaaagaccaagtttcctttaatatatgcaatagtctccttatacacaacttatattcttgaagagcctattcatcctgttggaactccgtttccaggctcacttaaggtcactcagaaaaatggagtcttttattgtccggttaaggaagcaaatcttgaatctccaaatgctgtctgcaagatgtgcatagcagaacagttggagttttag

SEQ ID NO: 1244 - DNA, 4620 bp, Methanobrevibacter ruminantium
  source 1..4620: mol_type = genomic DNA
gtgagtaaaacgaataaaaagaaattatttttatctattctaattattttaagcgtattgatatctttatcaagcgtttcagctataaatacaaatgattcatctattcaagataatggagatttatccattcaagactcaattgatgaaatttcccaatttgatgaatcagaacaattaaataaaatcaataaggattcaccagaatccaattttaatcaagaattatctaatgattctaaagacatatctgcagattccaatcaagacctaatgggatttgagaattatgatttcaaatacaatacaaagagctcttattcaaatgccctaaaggactcaaatgtcataaatgttacaggaagcacatttcaagatattcaagatgctatagatagggcaaatgatggggacatcctttatctcaagtcatacaaattccatgggaatgggaccgccatcagcatcaataagccccttacaatcataggtagctatgaagccaataacaaaagccattatttagatgcatacttaaagtccagaatattatatatagattcagacgatgtcacattaatcaatattcactttgactatgggggaaatattgacaataatggcaatggaggggccatatatttggatggaacaaactgcgcaattgtaaattgctcctttaaggggaatcatgcttggctggggggagccattttccaatcaaacaattccaatgacctttatgtgggtggctgcaaatttgtagagaacaatgcccaaattggggcgggaattaccacatgcggattcaattgccttgtttcaaattgcagctttgaaaacaatagcgccgttaccgccggtgcaataatgacagacactcagaagaatggggatatgactttcttccgcttggaaaattccactttcataaataacaatgccacagggggaggcggggccatcaattttgacggctactaccaaagcgtctataattgcaagttcatagataactatgccaaaaattctgggggcgccatctatggcagtttaaaaccatttgacgtttccctatgccaattctataataactatgctaataccggaggtgccatcagaggcactgcaaactataatgtttcggactgccgattcataaataactcagctcatcatgctggcgctgtattccttcattcctatagtaatgtcatagatagttattttgaaaataactatgccgaagcgaatggaggagccatctgtactgattccaacacagtgggagttattattaaaggctccactttaataggaaataatgcaactacaggcagtgccattatgatggtttcaagtagaagcattatagaaaactgtaatttttcaggcaatatcggcaaaagcgaaggcgccatttattcaatccatgactgtaacatctcccattgcatcttcgacagcaatcaggcagaaaagggaggggccttctatatttataggggcaacaacagcaatattgacaactgccgcttcataaacaactctgccaattcttcaggaggggccatatattggtatgtcaataagggtaagatttcaaactcttattttgaggaaaatcaggctcgatatggatctgcaatttattgctcaaatgtagaggcggattcaggatttataatcacagattgtgattttataaataatcatcctaaagaggatggatctaatacaaaggggggagcgatatatttatatgatcaattaaaatgtatcatagttgcaaattccacttttgagtataactatgcctctagaggaggagccatctatgttgagggagatgtaaatcttattgcaaattcaaccttcaagtataataaggcagatattttttcattatctgcttataatgataatgccaatcttatagtcacattaaggggctatgagaattatatgaatgccatctatgccgagaaaactgtcgattttcacaatgtcacctattgggatggggaatttgtcaccggcgactatcctataaaaagaaatctggaagctggaataaacatcatccttgactgcaggggtaatggacatagcttaaatgtcactaagatgaccaatagcatgggagaggttatatttgatgagatgaggaccttgccaagcggaacttatgcatatcaggtctccgttccagataacagctattacactgccaaaaagcttaagcctgacatattcaatgtcccatatctttgtgaaaacattcttggcattgatgtggcggatatctcttatgaccagtatcctgttgtaaatataaccgccaattatacaggtaactacacagtctatattgcaaattcaagctatgatgtcacattcacagaccaggatgttgaaaggggaagggtattgggatataatatcacaatcaccgatgaggatgtagtaaaaggagaaaagctaatagtaattccacatctttttgacataaaggatggctatggggcttatgttcaattgagggcaatcgatcaggagaatgttgagcttgtctatattcaaaacaggacatccttcaatgtctataaggcagcttcagcccttgaagctgagggggcagttgctgtaaatggaagcgatatagaattgaattatatggctcaaaacggcactgtaactatagaaagcattaaaaaggacggatctcttttagaaaatggaacagactataatttcacagtaaatgatgataagataatcatcacaggattggatgcaggccattatattgctaatctgaccttgattgtcgacgattatcataacagctcctctatagatgtttcaattgatgttcttatcaaaaccagcatcgatgtggcagattctatttccattgccgaaacagagagctctctaataaatgcaacactatctccagaggaagcaggtttattgaattaccaaagtgataatgaaactgtggcggtcattgataatgatggaagaataactggaattttaaaaggaaatgcaactatatttgttagttatgctggaaatgaggattattctccttccaatgccactgtaaagataaacgtttatcctttggttgatttgaaaataaacaaaactgcaaatgtatctaaggcttttgtagataacatgattaagtttacagtctctgtggtcaatgatggtccttccaatgctagcggagtttatgtggatgagacattaagctccatccttgatcttatttccaattcctcaacaaagggaagctatgatggaaataaatggttggttggcaatttgaataatggtgaaagtgcaagcctaacaatagttgccaaaatcaacagagctggaataataagcaatgatgtgactgtcaaggccaatgaagccgattccaatcagtccaataataattgttcaatctccattgaaggattaatgattgaaactgtattgacagttccaaatgtgacttcaagctataatatggataagaattttacaatcagcttaaaagatataaacggaaacccaattggagatgcaaatataactgttgacttaaatggcaaaaagagttatataacagattcaaatggacaaatcaagctttcaactacaggattggctgtagatacacatgttttgaatgtcacatttgcaggcaattacaagtacaacggttcaagctcttcaagcaagatagttattatcaaggattcaagcaaattaaatgcaacagacattattagcacttataatgatgatgattatcttattgtaagcttaactaactctcagaacaatcctattgcaggagcaaatgtatttgttgatttggctggaaaaagaaattacactacagattccaatggccaaatcaaagtgtctcttaagaatctaattccagacaactacaatgcaagcattgcatttggaggaaatgaaaactatacagaatccagcacaagtgcaatggtgacagttaaaagggcaaagacatcatttaactacacagatatgaatacagttgcattcgattcaaaattagagggaagagttggagaatactttaaattcaaattgctggataataatggaaagccaatagccggaagacaggtattcataggtttcaatggagtcaaatacaatagaacaaccaacgaaacaggtgaggcacagcttcagataaaccttaagtatgccaaccattacacatttgcaatagcattccttggagatgactgctatagcggatcattcaatgttgcgctgattagtgtaactgaacagactcctgttctaactacaagtcctaagacctataagtcaagcgctaagacaaaggtcttgactgctacacttaaatcctcaagggaaagtgcccttccaggcaaaaaggtcactttcactattaatggaaaggtatattctgcaaatactaatgaggatggtatagctactgtaaaggtcagcctaagcaagaaaggaacctatagctttacagttcagtttggaggagacagcacatataagaagattactaaaagctcaaaacttactataaaatag

SEQ ID NO: 1245 - DNA, 5061 bp, Methanobrevibacter ruminantium
  source 1..5061: mol_type = genomic DNA
atggataaaaaggtgagtaaaacgaataaaaagaaattattattatctattctaatccttttcagcatattggtatctttatcaagcgtttcagctgcaagtgatttaattcaagactatgaagatttaactattcaaaattcatatgatgatttaatcattcaagactcttttaatgaagatttaattcaagattcttctaatacagagttaaaaactcaagattcatctattgacaatctaaaagagactataaatcaaacagaatcaatagatgacacattaactaatcaagatttatcaagtctccaagactcttcaaaggagaatataaaggattccaatttaaaaagctcaagactgggaaaatccataaccgttaagggaaatacatttcaatccattcaatcagcgattgatggtgcagaagctggagacactattattctaagcgaaaatatgtttaagggagataattattatggccttggagaacaaatttatattaataagtcccttaccataatgggcagttctcaattcggcagccaatatataattttaaatgcactacatagttcccgtattttcaatatcactgcagataatgttacaataagcaatattcaatttaccaatggctacgtagtaggtgaacccggaggagctatttactggtttggaaacaatgggaaaattataaattcttacttctcattaaattgcgccaattcctctatggaatgggatattgaaggaggtgcaatttactttgggttgaaattcaaaaatcaatatattgaaaattgtttattcaaatataattctgcatatgatggcggagcattatatacctgttcgcaaaataccacaatctcaaaatgtacttttgacagtaattttggtatttcgaataatgctggtggcatggccaatggtgcagctctcagttttagtgctaaagatgtttatgtaattgattccactttcttaaataatgatgctccagaaggatggggtggtgcagtatatatctataaacatgggtatgaaccttatttctttaattgttcctttaaaaataattctgcagcttttggaggtgcaatatgttggttaactgatggagggacatttttaaattgtacttttgagaataatcatgcaaccggcggtgacgctattccccatggtggtgctatctataaaatagggcgcaatggaggcaatattataaattccactttcacaagaaattatgcaactacaggcagtgccatttatctaaacgcttatttaaacatagacaattgtactttcacggataatcaggctgatagtgaaggtgccatttacataataactgataatgttacgatacgcaactgtttatttgacaaaaattatgcatataattacggcgcggccattttttcttgggaccatgacaatatcaaagtggaaaattccagatttattgaaaatcatgctcgcaatgaaggtggcgccatctatttcctcggaaagaattgtcagatatatggctgcctatttgagggcaatagggtaagcaatttttactctttcggtggtgccgtctttatggaaattagtggtgaggatacttccattctagattgtagctttaaaaataactctgctctttataagggcggagccctatacatttcttatggctcttcggaaaagattgcaattataaattcaagttttgaggataattcagcaagtaatggtggtgcaattcaggcggattggaatttaagccttattgcaaattcaagttttgaggataattcagcaagttatggaggtgcaatacaggtgtttgggagtgtagaccttattgcaaattcaagctttgaggataattcagcaagttatggaggtgcaatacatgtgtttaggagtataggccttattgcaaattccacctttaagaataattatgcaaacagtttagagattaaccaatccaaagagtcatatggaagagtatttacttttaagggcaaggaaaattatattaatgctatctatactgaagattacagtttgaactttgagaatgtgacctattgggacggttcatttgtcaccagcggcagccctataaagagtgactgtgaagcaggcataaaaatcagaatagttcttcgccaaggcgtttcggcaggtcctgttgttttaaatattacaaaaataactaatatcaagggggaagttgtttttaatgagtataatggtctttctccaggaatctattattatgaggcatatcatcctaaagacagctattattcagagtcagagaagttaagcggcatgatcactgtccctaaaaaagccactgacaacacccttgctatttctctagatgattcaatctatggggaagacctaaaggttaatgtaaatactgacgtctctggagaatacaggatctatattgcaaattcaaattatgatgcaatattcaccgatgacgatgtcgcaaagggcaatgtattggcctatgatattacagtaaatgagaatgagctcaagggaaataaatggacaatcctaaaaaattctttgaatgttaagaacggatatggagcatacattcagtttgcagaccttgaagacggcgaaaattacataaatattcataataggacttcattcaatgtctataaggcagaatccagcatagatgcaaatgaaacaattgccattgagggggatggcgctgaggtaaactacacaattgaaaacggaactgcaagcatagacaacattagaaggggctctgccatattggaggaaggcactgattataattttacagtcactccagataagataataatcactggattggatatgggcaattatactgtaaaattaaaaaccattgttgattccaactataacccttcaacaaaagaagtctttatttgcatcctaggtcgaacagccattgacgttcaagagtcagtggcaattgaaaaggataagagctatcttttaagtccaaccctaattcctgaagatgcagggactctacgttacatcagcaatgatgaaagcatagtgaaggttgactctaaaggcaatctcactgcaatatctgagggaaacacaaccattatggttctatttgatggaaacgatatttatgccccttcaaatgctacagtgaaggtctctgtctattcaggaagcatgccaacatcaatcaaagtcaataagtcatttgaattgtatatggatgaatccattgatatgggtgcagttctagacccggcaaatgcaggaaacttgacttataaaagcagcaatgaaaagatagtgaaggttgacaattatggaaagataactggacttggccaaggaaaagcaaatataactgttagcttcagtggaaatgagaagtttttagccagcaatgctacagctttggttacagtttatccgttagtggatttaaaaattgctaaaagtgcaaatgtatctggtgaagtctatattggtgataagatcaaatttgtcatcactgtttcaaacaatggcccttccaatgcaactggagtatatgtaaatgaagcattaaactctaatcttgttttggcttccaattctacaacaaaaggcaattatgatggaagcaagtggactattggcaatctaaataaaggagaaacagttaacctaacaattattgcaaatgtaaaatctgttggtaacattgataataaggtaattgcaaattccacagaaagggattccaattatacaaacaatattgcaagcataagcacaattaaagcactccctattgttgatttgagtattaatgtgacttctaataaaaaatcacttaatgtgggagatacattcacttatacaattaatcttattaatttaggtccttcaaaggctacaaatattattgtagatgaattattaagtcagtttattgagcttgtcaatgtcaatctaagcattggaaactatgataattccacttctgtatggtctgttgatcaattagatccgaatagtccagttagcttaaatttaactgttaaggcaataagagcaggcaaaattgaaaatagtgtaactgcatattccaatgaaaaggattcaaatgaatccaataataatttcacattatctattaattgtgttaaaataaatactcaattgactgcaaataatataactacaagctataatcttaataaagatttgataattggattaaatgacagcaaaggcaatccattaagtggatttatagtgtctgttgacttaaatggcaagaagaattatacaactgattcaaatggtcaaataaagattccaactaagtctttaattccagacacttataatgcaacaataagattcgaaggaaatgagaaatattactcctctcatgcaagtgcaatcatagttgttaaaagggcaagcacatcattaaactatacaaatatgaatacagttgccttcgattcaaatatagagggaagagttggagaatatttccaattccaattattggataatgatggaaagccaatagcaggaaaacaggtattcataggtttcaatggagtaaaatacaatagaacaaccaaccaaacaggtgaggcaaggcttcagatcaacctaaagtacgccaaccattacacctttgcaatcgcattcctcggagataacaactatagcggtgatttccaagtagcactgatcaatgtgactgaacagactcctgttctaactacaagtcctaaaacctataaatcaactgcaaagacaaaggccttgactgccactcttaaatcatcaagaggacaagcccttgcaggcaaaaaaatcactttcacccttaatggaaaggtttatagcggaaataccaattctgatggcattgcaactgtaaatgtaagcttaagcaagaaaggaacctatagctttacagcccagtatggaggagacagcacatataagaaggtgactaaaagttcaaaactaacaataaaatag

SEQ ID NO: 1246 - DNA, 1302 bp, Methanobrevibacter ruminantium
  source 1..1302: mol_type = genomic DNA
atggaatttgaaagaccaagaggaacaagagacttcctctttgaggaaatgagagaaagaaagatggctgaagacactttaagaaatgtctttgaaaattacggattcggcgaagtgcagacacctctttttgaagacttaaaattattcactacaaaatccggagaggagattgtagatcaattatacaacttcaaggacaagggagatagggatttggcccttaggccagagataaccgcccctattgcaaggctatacttaaatgagcttcaaaagacctcaaagccaatcaagatttactattatggaagctgcttcagatatgaaaggccccaaaagggcagattcagacaattctggcaattcggatgcgaattgattggagcaaagactcctgaaggtgaggctgaagtcattgcaatgtgcaacaatgcaatcgaagagcttggaataactacagcagaattcaatgtaaaccacctcggaatcataagagggctctttgcccactttgacattgacacagccacccaaagggagataatggttgttatcgataagggagacaaggacctattaaaggactcccttgttggagaaaacccaatcataaaggacaagccagagcttaatgaagtgctgttcaaacttatggacatggtaggggattcatcaatcataaaagacatagaagagcttgtcgctccatacgaagaaacccaagaggcattggaagagtttaaagagcttgtaaaaaccttagaaagcttccaggtattcaactacaaattgaaccttggcgtcgccagaggccttgactactatacaggaatcgtatttgaggtatatgtggaaggacttggcgcacagaagcaggtctgcggcggaggaacctacaatctagtcaagctattcggaggagaggatgttgtttccacaggatttgcattaggatttgacagactgatgaatgcaatagaagagcttaatggcaaagttgaattggaaccaatagttaacacttatgttgctgcaatctccgactcaacaagacacaatgctttcagcattgcacaagaccttagaaaggccaacattccaactgaagtggacctatccagaaagaaattcaagaagatcttggcttatgcaaataagatagatgtaaaatacacagttcttgtaggagaacgtgacctagaggaaggaaaggttacaattaaggacatgttaactggagagcaggaattggtagccattgatgaagtggttgactacattaaaggcaaattatattaa

SEQ ID NO: 1247 - DNA, 414 bp, Methanobrevibacter ruminantium
  source 1..414: mol_type = genomic DNA
atggaattaaacttcagacttaatatgggtggagaagaccttgtaattgcagttgcacaagactacgaaacaaatgatgtgctcatggtagctttcatgaacaaggaagctgtagaacaaacattaaagaccaaaaaggctcactactactccacatcaagacagaaacaatggctaaaaggagaaagctctggaaatgttcagactgttaaggaaatgtatattgactgcgatgcagatgcaatcattatgaaagtcgaccaaatcggtgcagcatgccatgaaggatacaggtcttgcttctttagacaattggacattgataaggagaatattgacttagacagtcttacagatgaggatataagcataatctcagaaagactctttgatccaaaagagatgtatggataa

SEQ ID NO: 1248 - DNA, 2163 bp, Methanobrevibacter ruminantium
  source 1..2163: mol_type = genomic DNA
atggattttaacgattatgactatgatagcgaatacaacaatgatgaagaagaatacaatgatgaaattaaaagaattgtgccagatacaagcgcaataattgaaggaaatgtagaaaagataataaaggaaaagggattgaactaccccgaaataataattccagaagctgtcattgccgaacttgaacatcaggccaacaaccaaaggccaacaggactaagaggtttggaaaacctaaagaaactacaggaaatggcagagattggagagctgtcaattagaataaccggcagaaggccaacaaagtttgaaaaggacaatgcaaagcttggagagatagacggacttataagagatgttgcaaaggacgaattggcactactcattacaagcgacaagatccaagccaagacagcagaggcacagggaatcccagtcatatattatgctcaagagtataaaggctcaatcgacttgaagatagcaaaattctttgatgaagagaccatgagcgtccatttaaaggaaaacgttccacctatggctaaaaaaggtaagcctggccatatcaagcttgtaaagcttgcagatgaaaagttcacctttaagcagcttgaattcatagctgaagagatattggaaaaggaaaggtatgaccctaagacctatcttgaagtggacaggcagggagcgattgttgttcagtcaagagaccttaggatatcaattgcaaggcctccatttgcagaggcacttgagataactgcagtaaggccagtagcagaagtgtcccttgatgaatatcacctatccagccagcttatagacagacttaccaacagcgcaagaggaatactcatttcaggttctccaggagcaggtaaaagtacatttgcccaggcaatagccaaattctatgacgaggacttgaataaggtagtaaagaccatggaatctccaagagaccttcaggtggcagatacaatcacccaatatgcccctcttgagggggatatggaaaagacagcagacatacttcttcttgtaaggccagactttactatctatgatgagcttaggaaaaaccatgacttcagcatatttgcagacatgaggcttgcaggagttggaatgatcggtgtagtccatgcgacaaagcctattgatgcaatatcaagaatagcaaacagggttgaccttggtacaattccttcaattgtagatacaacaatctatatagaaaacggtgagatatctgcaatatatgaaaacaagcttacagtgaaggttccaactggaatggaagagcgagaccttgcaaggcctgtaattgaggtcagggactttgagacaggaacccttgtaaacgagatctacacctacggtgagcagaccatagttatggacataggaatggttgaagagtctaaaaaggcaaaggataaggaggaaaagacccctgtacaaataatagccgagcgagaaatcctaaggaccatgaaaagaatagtccctaaggctgcaatggaagtgagcatggaaaatgacagaagggtaaatatctatatgagtgaaaagtacattcctaaagtcattggaaagggcggaaaaagaattgcagagcttgaagaggacattggtataagcatgaacattgaacctcttgacaaggctccagacagcttcagcgaaagattatccaaaagatccaagaaaaagaagtctaaaaaggagaaaaagaaaaaatccaaaaaatcaggattgaaggaatacaatggagtagaggatggagaattgtctgaagatggtttgaaggactataataaggataattattttgacttcaccgatgataatgaagattattatgaggattatgaagattatgatgattctgacatattggaagatgattatgaagagcttttctatgacacctttgaagtattcccaaaagttagaaagagccgtgttgaattgccaataggcaagaagtatgtaggaaaatcctttgacatattcattgaagatgagttcctgttcaatgcaaccgtaagcaaaaagggaaatgtcaaggtacataggaagttaaagtcctatggaaagatagtctctgcattagatgcgggagatagaatcattgctaaggttagaaaatag

SEQ ID NO: 1249 - DNA, 768 bp, Methanobrevibacter ruminantium
  source 1..768: mol_type = genomic DNA
atgaaattaggagcttcaatatttcctagaaagataattccaatagaaaaatccttagattattttgaatcaaacagatacatcgaatatatggaaatatttcacgactatccaaatagggacattgatgttgaaaaggacttgattgacaagtttaactcatatgatttaaagtacacagttcatgccccctttatagaagtgaatcctgcttctgtaaaccctgctcttgcaaaggcatctgtagatgagataaaaagatctgttgaccttgcaaatcttctggactctgacattgtcgtaatccatccaggaagagccatatttacaaatgatatggaatatatggcctctgtctatagaatagctgaagaaaacctaaaggttataggagaatatgccaaggacaatggagtgatgacatgcatcgaaaaccttccaagactaaggggattcatgtatcaggacattaatcaattgaatgagactctagagagaacaggtcttccaatgacccttgacatcggccatgcatacactgcaggctttgatgttgatgatgtctcatttgattgcataagccatatccacatccatgacaatgacggcatccgtgactcacatcttcctttaggggaaggaatcattgactttaaaagattctttgaaatctttgacaaatatgatggaatctataattttgaattaggctcaaaggaatatatagaaaagagcatagactatttgaaaggcttgaaattgatttaa

SEQ ID NO: 1250 - DNA, 774 bp, Methanobrevibacter ruminantium
  source 1..774: mol_type = genomic DNA
atgaaaataggagcttcaatgttagcaacagaagataagacaatgaaagaatccttagactacttcgatagcaacaaatacatcgaatatgtagaaatattgcatgactatccatatagagaattgaatgacgataaggagcttattgatttaatcaactcatatgacttaaaatatacaattcactctccattcattgacttgaatatcgcttcccttaactcagcgcttgcaaagctctctgttgaagagataaaaagatcaatagaccttgcaaatatgatagacagcgatatcgttgtagcccatcctggctttgtatcatttaatggaagaggcaaggaagatataatttatgaaataggaagagaagggctagtggaaattggagattatgccaaggacaatggcgtcaatgcctgcatcgaaaaccttccaaagattgaagggttcatgtatcaggatgtgaaccaacttaatgatacacttgttgaacttgagcttccaatgacattggatattggtcatgcacacactgcaggcttcagtcctgatgagatttactttgactctgttaaacacattcatgtccatgataatcctggtgatgatgatacacaccttgcattaggtgatgggacttttgatgtaaatggcttctttgatgtttttactaagaatgggtatgacggcatatatatgttagagttaaatcatatcgatttcattcaaaaaactttggactatatgaaaaatctaggattgatagactaa

SEQ ID NO: 1251 - DNA, 1302 bp, Methanobrevibacter ruminantium
  source 1..1302: mol_type = genomic DNA
atgtggaatgaagaaatagaaaccatgcctagagaagacatttacgaacttcaattgaagaagctgcaaagcactgtaaaaagagcatttgacaagataccatattacaataaaaagtatagtgaagctaatgttttccctgaggacatagagactttagaggatattgaaaagttgccattccttaccaaagatgatttaagagcatgttatccatttggaatgtttgcagttgataaaaaggaaatcatagaagtacactcctcctctggaactacaggaaagcctgtagtaagcggatacacccaaaatgacatagacaactggggagagattgtagcaagaggacttaccatgatgggccttgacagtgacgacatcatccaaaacacccacggatacggcttgtttaccggaggattcggcgttcactatggagcccacagattaggggcaaccatcattcctatctcaaccggacagacaagaagacaggttgaaatcatggcagatttcggcaccacttgccttattttcactccatcctatggaatctatcttggagaggtagcaaaggaggaaggaatagactttgacaagctaggacttaaggcaatcggatttggagctgaaatgtggactgctgagatgagagatagaatcgaagagacattcaagaccaaggcatataacatctacgggctaaccgaacttatgggtccgggagtaggtatagaatgttctgctcaaaacggattgcacattgctgaagatttcttctatccggaaatcatcaatcctaaaaccggagagaccttagctgaaggcaaacatggagaattggtattgaccaatcttgaaagggaaagcatgcctataataagatttagaacaaaggaccttacagcacttcactatgacacctgcaaatgcggaaggacacttgcaagaatggaaagaatcaccggaaggtcagatgacatgatcaaggtcaaaggagttgccatcttcccatcacaaatcgaaaaggcccttcttaaggtcagcaatattgagcctcactatcaaatcatagtcacaaggccagacattatggatgaaattgaaattaaggtggaagcttctgcatccctattttcagatgacatcaaagagatgatggctgtaaaacgaaagattggagaatatattcaaaatgagactggaattgcagttaatgttagtttagtagctcctaagagcattccaagaagtacaaaaggtaaaatacaaagagttattgacaaacgtaacttacactag

SEQ ID NO: 1252 - DNA, 435 bp, Methanobrevibacter ruminantium
  source 1..435: mol_type = genomic DNA
atgtataaaataacacaattatccatatttttagaaaacagaagagggaaactttacaatacattgaatttgcttgctaaaaatgacatcaacatcagagcattgtttttagcagacactaccgaattcggcattttaaggcttgttgttcaagaccctataaaggctaaagacattcttgaagaaaacgaccatatagttaaaatgactccaatcattggagcagagcttgatgacactccaggtggactttcaactgtcttgaaaattatcaaggacgaagagattgatcttgaatatctttatgctttcactcatgagaaaactgaaaaggccattcttcttttgcaagcagatgatttagacaatttgattggtattttaactgcttataaggtgcctttagtacctgcagaagaagtttataatttataa

SEQ ID NO: 1253 - DNA, 951 bp, Methanobrevibacter ruminantium
  source 1..951: mol_type = genomic DNA
atggtaaaagtatgtattattggagttacaggagttataggtaaaaatgtagcttttaaattggcaagagcagacactgtagacgaaatagtgttctttacaagggaaaaaagcctatcaaaagcaaaaggagagatatatgacatgtatgatgcattggctgcagaggatattgactgcaagctcactccaacttcagattataaggatatggctggctctcaaattatccttataacagcaggggctccaagaaaagagggaatggaaagaagcgacttggcacatacaaatgcacagattgtctataactatgcaaagcagatagcaatccatgctccagattcaatcattctaattgcaacaaatcctgtggatgttatgactgcagtggctcttgaagcctctggatttaataagaaaagagtcatcggccttggaaaccacttggattcattaagattaaagacatattttgcaagacgcctggacataaacagcagtgaggttcatacaagggttgttggcgaacatggtgaaaggatggttcctcttttaagctctacaacaatagggggtattcctctaaagtactttatcaaggatgtgaaactagaccttccagatattgtgaagacccttagaaatgctggaaacactatcatttcaaagaaaggggcaaccgagtatggccctgcctatgcaatatcaaacttgattaccacaatcattacaaacatccataagatacttactgtaagcatgtatcttgaaggagagatagcagatgttgaaggagtctgcttaggtgttccggttgtattatctaaaaaaggagctgccatgattgttcctattcatatgaatgactatgaggtaaataagtttcaaatagctgcaaatcatgtcagggaacttactaatgaagttcttgaaagattagaaaaatag

SEQ ID NO: 1254 - DNA, 2505 bp, Methanobrevibacter ruminantium
  source 1..2505: mol_type = genomic DNA
atgtataaagatgcaattttagtcaggggagctaaagtacacaatctaaagaacatagatgtggacattcctcttggaaagatagtggctatagctggagtctctggaagcggaaagtcttccctagcccttggagttctgtatgcagaaggatccagaagataccttgaggccctatccacatatacaagacgaaggatcacccaatctgaaaaggccaatgtggaatctgtccaatatgttccggcagctcttgcattgcatcagagacctaatgttccaaatataagaagcacctttgggacttcaacagagcttttaaattccttaaggctgctatactctcgctgtggcagctatatatgtccaaatggacatatcctcaagccttcattgaatgttgcaagggagattgagcttgaatgtgatgtctgtggcgagagattctatggtcttggagctgaggaatatgccttcaattcagatggggcatgtcccaattgtagcggaactggaatagaacgtgtcattgacgattccacacttgttccaaatgaaaacaagaccttggaggaaggtgcagttgaatcatggaacatgtttggaataaactggatgtatcatgtggctggagagcttggagtgagggtggatgttccctttaaagatttaagcgataaggaaaaggaaatcgtttataagggaccctctgtaaagagatacattaacattccatctaagaacggaaagctatttgagttgaatgcagaatacagaaatgcccatagggcagttgaagaggcattgaagaatgccaagactgaaaaggggcttactagaataaacaaatatctaaagataagggagtgcagccagtgccatggcacaaggcttaataaaagagcaaattcaactcttttaggtggaataaacattagccaagcctgtcagatgactctagaagatatcgtcaaatggattcctaatgtcataaacaatctgccaaaggaaatgcaagatatggcaaataacattgcagaggagtttatggacaatgccaagatattgcttgacttggggctcagctatatctcacttgataggccaagcaataccctttccactggagagcttcagagggtgcagcttgccagaacccttagaaaccctacaacaggggttctatatgttttggatgagccttcaataggtcttcaccctgcaaatgtggaaggcctgataaaagtcatgaacaggctgatagaggatggaaatagcataatacttgtagatcatgacgttaggatattaaggatagcagactatctgattgagttaggtccttcagcaggttcaaatgggggaaagataattgctgaaggcacaatagatgaaataaataaaaataaagaatcattgatttcaggattcctctcaaatgaggaaaagattataattaggaaaaagtcagataagaactccatattcaaaaacggatccattgacatttcaacttgccaaatccacaatgtaaagcctatggatattagttttcctaaaggaaagctcactgtagtaagcggagtttcaggaagcggcaagaccacattgctccttgaatcattgtatccagcagttaaatcattgataaatgatgaaaatatccctaacaatataaaatccatcgatgcaaagaatattaataaaatagaacttatcgatagcgttccaataggaaagaatgtgagaagcacagtatcaacctatagtggagtattggatgacttgagaaagatatttgccaaattggactcctctattgaaaggaatctgaaggcatctgacttttcatataatacaggcagcctgagatgtccatcctgcaacggcacaggaacaatctctatggatgtccagttcctccctgatgtggagataacttgccctgactgcaatggccttagatattcagatgaagctggtgaaataatgttaggtcatctttccatttcagatataatggcattgacaatagatgaggccattgatgaactgtccaatattgaagatgagagtatagatcctcttttaaaaagagcgataaataaattggctaaactgtccaatttaggccttggataccttacaatcggagagtcaacaccaagtctttcaggtggggaagctcaaaggttaaagcttgcatctgaaataggcaaatcccaaaggaattcaatattcatctttgatgagccttccataggtcttcatccattggatgtgaaggtattgcttaatgtattccagacattaatagatgacggagcaacaatcatagtaatagagcatgaccttgatataattgcaaatgccgattatataattgatattggaatagatgacaagcatatgggtggagagatacttgcaaagggaactttagaagatattcttaattctaaggatagtctgactgctaattatttaaatgagattaatttatag

SEQ ID NO: 1255 - DNA, 498 bp, Methanobrevibacter ruminantium
  source 1..498: mol_type = genomic DNA
atggtaaatgaaaaaatggaagcagcattaaatgcacaattaaacgcagaagtttactctggatacttatatttatctatggcagcttactttgaagatgttgatttagcaggatttgctaactggatgagagttcaagcagcagaagaattggaacacggaatgaaattctatgactatctcattagaagaggagcaagcgttacccttactgctattgacgctccacaaaccgaatgggaatctccattagcagcatttgaacatgttttagaacatgaaaaaatggttactggtttaatcaacgatttagtggacttagctattgaagaaaaagaccatgctaccaacaacttcttacaatggtttgttgaagaacaagttgaagaagaagaaaacgctatggaaaacttagctaaactcaaattagctggcgacgacaactctttattatacaaactcaatgaagagtttgcaggtcgtggagctgcagaatag

SEQ ID NO: 1256 - DNA, 156 bp, Methanobrevibacter ruminantium
  source 1..156: mol_type = genomic DNA
atggtttttgtatgtgacatttgtggatatgaatacaatccagaagctggcgacccagataatggaattgaaccaggaactgcatttgcagacttaccagatgattggacttgtccattatgtggtgcagaaaaagcagatttcgtagaagaataa

SEQ ID NO: 1257 - DNA, 159 bp, Methanobrevibacter ruminantium
  source 1..159: mol_type = genomic DNA
atggctcaacacagatgtactatttgcggatatgtatacgacagtgaaactggtgaagaaagaagagatcttgctgctggaaccgaatgggaagatgtacctgacgatttcacctgcccattatgcggtgcagtcaaaaccatgttcagagctcaatag

SEQ ID NO: 1258 - DNA, 618 bp, Methanobrevibacter ruminantium
  source 1..618: mol_type = genomic DNA
atgatttctttgaagacaatagtaatcaatgcaggtcctaaaaaaagaggcttcaatgcagagatggcaaagtctgctttaaggggcgcccaatctgttggtgctgaagtggaattcatagacttatatcgtctgaagtttacaggctgcttgagctgtctcatttgcatgagagatgattttgaaagctgcaaatgcttccttagggatgatctttcacctttgattgaccggatattggatgcagattgccttttgatagctgccccaatcttcttttcaaatccctcaagccattatatggcccttttggagcgattgatattctgcatagtttcaaacaagggagaaaatcttttcaagggaaaggtcaatgtaggccttatctatacattccattatgataagggctattttgaagagtctgtccgccctcatttcaagcattcagaggacatcttaaagatgctcaatggagaagtggaaatctactcagcagaatatgattccaagaaaacctattccacaagctttgatggcgaaattagttcggaagatgaatgtttcactctcaatttagaaaaaacctatgaaatcggtgctaaattaagcaattaa

SEQ ID NO: 1259 - DNA, 411 bp, Methanobrevibacter ruminantium
  source 1..411: mol_type = genomic DNA
atgtttaaaaatattttagtggctagtgatggctcaaaatgtggagacaaggcagttgatatagctattgatttggcttcaaagtatgatgcaagggtagctgccctttatatcatggattttggccttgatttgtcctatgatgatatggatgatgcaggaggggctgtattggatgatatcacagcaaaaggtaaagagaaggatgttgttgtggttgagcacattataacagcagatcctattcaagatatggaaaccatgataagaaagataaaccctgatatagctatctttggagctttcggcaagtccacagacaaagaggacaaaataagatatgataagataggcagagttgccttgaatgcattaaaggtggctaaagttccggtccttctagtaaaataa

SEQ ID NO: 1260 - DNA, 1722 bp, Methanobrevibacter ruminantium
  source 1..1722: mol_type = genomic DNA
atgataagtattaaaaacctttctaaatcatataaattagaaaatggagaagaacttcctgccttaaaaaacattaatctggaagttgaggatggagaaatcctaggaatcataggaaccagcggatctggaaagaccacacttttaagaatattaagaggggttgaaaaatttgatgaaggtgaattcaccataggaagatacaccattaagccggattcctcccaattttattataatcaagtcaagaaggaaactgcaatccaccttcaaaggtcatttggtatttggcctgaaagcgtgctggacaatgttgttcgaaaattatacggtgccaaatacggagatgagtctggaactgactttgaaatagctcatgaccaatttgacaaggaagctatggaaatcatagagcttgtaggccttgagcataaggctgatcatttggcatctgtcttaagcggaggagaaaagcaaagacttatcatggctcgtcaattggctaaaaagcctgcagtaatgctattggatgaacctgccacaatggcatgtccaaagacaaagcaggaaatattggatgcaatcaagaaaatcaatgatgaacttggaataaccgtaattctcgtatcacaccttccggaaatccataagttcctagcagacagggtagtccttatggaagacggtgagatagtcaaagacggagatgtcaacgaagtggtggatgagttccttaaggacattgaggaacctgttgacatagacatcgaatccactgacgaaaccataattaaagcaatagatattgacaaaaggttctatttgcttaagggcaaaaacgttctccatatgaaagacgtcaaccttgaagtaaataggggaaatgtgctatctctagttggcccaagcggtgcaggtaagactgttttgcttaggatgctaggaggtcttgactatcctgatagtggagatgttctcttcaagcttgtaaataaggaagatggagaagaagaaatcagatgggtaaacattgaaaatgcaagccttgacaggatggaaatcagaagaaaccttggatttatgcatcaggaatttgcattgatgtattacgccacaatacaaagtcaattggctgtcaagctaggatacaaaagatgggatatggtagaggaagccaaaaagagagctaaggaaaatggccttccagatatcttgcttgatgcattgtatcaattgacagaccttccggaaagggaggctaaggcacgtcttgaacagattggtcttgacccaactatattggatgaattattccctaaattcccagaaactcaaatcaaggaagaggttaaggacttgtttgaagcccttgacttgccgctcgatatccttccaagaaggtcatatgaattgtcaggcggtcaaaaggtaagggccatgcttgcattggttcttgtttcaaagccagatattctcttgcttgacgaaccgtttggagaccttgaccctaagacattgagaatagttgcaaactcacttaagagaatctgcaaagagtttggaacaacccttgtgatggtttcacataatacagacttcattaaggagctaagcaatagggcagtgttcattgaccaaggtcacctaaaggacgatagcgaagatgttgataagcttgtagatgacttcattggattctgtaaggctgattacttgatgtaa

SEQ ID NO: 1261 - DNA, 2586 bp, Methanobrevibacter ruminantium
  source 1..2586: mol_type = genomic DNA
atgaatattaatttaaaaaaaatcacattcttatgtttggttttagttctaatcggtttgatctcatttaattcaatcagcgctaatgatttaggcactgtattggaggataatgataataacggattaaatgacttaaataatgatgattttataaattcagatgtgaattcagatagtataaataaagaagcaatttctaatttaaaaagtttaaatagtcaggatgaatctacatcttctgattctaataattctgctagttctaattctaatagttccgttgcttctagttctaatagttctgcaagttctaattctgctaattctaatagttctactagttctaattctgctaattctaatagttctgtaagttctaattctactaattctaatagttctgcaagttctaattctactaattctaatagttctgcaagttctaattctactaattctaatgctaacaccaataactccagttcagatgcatctaaaactcaaactataaaattatcctctcaagaggaaagtgcccttaatgagttcttaaatgcaatcaaaacaactactaaaggcacaattgttctaaaaaacgatttggtccttaatcaaactatctcacttaataacaatattacaatagatggtaggaatcattccataagctccttagatgttacaaacatgtttaagacctttgcaaagatcacacttaaaaacattgtctttacaaactatcatgaaatagagaatttaagggcaatacttaactctggagaattgactgtcctcaattgccaattcaatggattttcatatcttacaaacggctcagctatctataacagcaaaaagcttaccgttcaagggactaagtttaataacaattatgtcaataacagcggaggggccatctatagcacaggaaccctgactataaacaattcctcattcaacaaaaatcatgcaggcaaaaatggtggagccatctattccactttaaacctaatcctaaaccagtctgtctttagcaataattccgctaatgaaagcggaggagctctctattcaaaaggcagcggattaaatataaaatattcccgatttaataataactctgcatcattaaatggaggtgcgctctacagctcatccaacagtacggtgatttcctattcaaatttcgtttcaaactttgtggaagcctatgataaagcaagcaatggaggggctgcatttatctattatggatctaaaattgcatattcaaacttcacatctaaccattgtaaaacaactcttacaaacagttctcagaaaaagtcaattcaatcaatgggtggagctttattctattatggtggaaatcatactttaagcttctctaattttaataagaactctgtagaaaacgacggaggtgctgtgcgcatagccaaaaatgtagggaaatttacattgaacaaatgtaatttcacaaataacaacgcatcctatgaggatgggggagcaatttccttagcaaccccaaacatcacaatctcaaactccattttcaagaataactttgcaaatgaggacggaggagctattgacacattcagtctaggaagctataaggtaaatgtattgattaagaattgcctattcaattcaaacactgcattcaaggcagcaggtgcaatatatttaggagtaaacactgtccaatcaatagtaaactctaatttcacatcaaataaggcaaccgttgcaggtgcattctatatagaatccatttcagtaagcattagcaattgcatcttctcatccaataaggcagacaatgtatccaaaaagacaatatataacaagcaaggcaaggttgtctcccattcaggaggggctgtattcgttaagaatggaagtacagtcaccattaaaaacagccttttcaagagcaataaggccacatcaggtggggccataaccaatcatggaaagatggtcattgataagtgcaatttcacaagcaattctgcaacaaatggtggggcattatatggcggtggaaaaacaagcacaataagaaattccatattctataagaattcagcaacaaaaactggaggagcattattcatcaatgaaggcaatgtcaatatgaaatcaagcatgatagtctcaaacactgcaaaatcctattctgtctacagcacagtttcaatcacattaaacaataactggtggggaaacacattgtcaattaaggacaagtcccctaagactttaggattgaccaatgttaaagtgagcacttggcttcatttaaaaataagggctaagaccactaagcttgctaaaggaaagaccacaacattgactattgacttaagatataataataacgataagcttgtttcaactgcatttaacaatcctcttactttgactgtatctgaaggcactttatctagcaagaaagtgaatttaaaaaatggaaaggccacagttaagtttaaaaagaccaattctaagactgcagttgttaaggtcaagctattgggaaaaacagcacgttgtactataaagactaaataa

SEQ ID NO: 1262 - DNA, 1056 bp, Methanobrevibacter ruminantium
  source 1..1056: mol_type = genomic DNA
atgggaatgaagaatctaattttatccaagagcgatcaattcaatcattacaaagataaggcaaatcaattgaaaaaggaaaataaggaattaaagctaaaaaatgaggaattggagtttaaaaacaatgagcttagtcctgaacttgaagagggaattagcctaatcattcctagctataagggagaaaatcatattcagcctcttttagagtccttggaaaagcaaacaatttcaaaagacctttttgaagtaatcttcatcgtcaatggagaaatggattccacaatagacatattaactgattttgcaaaatcaaatcctgacatgaacataataattagctatacaagcgaagggggagtgtccaatgcaagaaacattggaattcggattgcaaaaagggaatatataggatttcttgatgatgacgacttcatcagcgataattatctaaaagccctttatgaccatatagctccaaatagggttgtgctctctaatttcatcgacatcgatgaggaaactggagaagagatagggtctcgccttgtcccatattccatgaacagggaaggcatattcaatgatgttgttgtaaaactgactaacctttccatcataacaactgcaaagataattccagcattagccgttaagggaactgacttcaatccaaatctcaacaatggagttgacgtttcctattatgcaaggctatatccaaagaatcattttgaattttattttgtaagcaaggaagaaggagctgtctattatagaataaggcgaagcggttccatttcaagacaggaaacttcctatcaattcaatgtactggaccgattgaaggtcatcgatgacattaatgaaagctataaacaagttgataaaagcgatgaactctatgtccacttcctaaagatactctttgatgctcaaacatacttcattggattgtatttggatgaatatcctcaagatcgtgaaaaggtcattgaagaagtgagaaagcataattttgaatacttttcatatgaaaaactagaaggataa

SEQ ID NO: 1263 - DNA, 642 bp, Methanobrevibacter ruminantium
  source 1..642: mol_type = genomic DNA
atgtcatttagtttagaaagcattggaataaaggctggaggaagatatgagaccatctacaccaccatgaacaaggcaggtgaaatggacgctgctccaatcggattgaaatacattggagactacgatgttgctgcaaggatatttgaaggaagcaagaccttaaaaaacattcaagagacaggaatctttgtagtaaacattacaaatgacccttcagtctttgcaagatccctttatgacaatctgaaggaagaggaattcgttaaggatgatgacattgtttatttgaaaaatgcagatgcttacttcattgcccttgtaaaatccattgaagagatgaagccggaacatgaccatgtaaatgaaggggcaaagaattatatcataaaggcagagccattgaagataatcatcaataggcaaggagccaaggcactaaacagaggactatttgcattccttgagtcattagttgactatacaagagttgacatcatcgatgatgagaaaaaggaagaatataaaaagagatttattgaaaatgaaagagtcatccaaagagttgcagaggatgatgtaaaagagaatatggctattttaaaggaaaaaatgattgaaaaaggattggatttggaataa

SEQ ID NO: 1264 - DNA, 1119 bp, Methanobrevibacter ruminantium
  source 1..1119: mol_type = genomic DNA
atgtataatgaaaatgtggcatcaaagactaagaaaatattagatagcgctcttgacgggcctatctcagttgaagatgggaattacctaatgaatctaaagggttcagagatttttccgcttttggctactgcagatgcgatacgtgaaaaggtggttggagataatgttacatttatcaacaattgcaatatcaactttacaaatatctgcaaggtccgctgcggattctgcgctttcggaaaggatgcagatgatcctgacgcttatcatctaagcgatgaggaaatattaaagaaggctgaaggtgcagtgaggactggagctcgcgaattcacattgatgggaggggtccttgaggatgcagacattgaatactatgagcatcttctcaagctcttgaagtctgaatatcctgatattgagattcatggattttccccaatgatgattaaggatgctgcattgaaaagtgaaatgcctatagaggaagcattcaagatactcaaaaaggcaggccttggaacattgcctggaactgcagctgaaatattgactgaccgttcaagagagattatatgccctaagaaggtcacaacacaggaatggatagacattattaagacagcccataatgcagggataactggctctgctacaatgatgtacggccatattgaaacaatggaagaaagggttgagcatttggacattcttagaaatatccaattggaaaccggcggcttcaatgagttcattccaatgacattcatgcatgaatactctcccatattccttgaaggacaggaaaacttaggagcaactggaactcaagaccttaagctttatgcagttagcagactcatgtttcatgacattattccaaacattcaagtctcttgggtaaagatgggattcagatttgcacaggtgtctcttttggctggtgcaaatgatttaggtggaactttaggtggagatgaattgtctgaagcatctggtgctccagatggtgttgatgcaagtataaaagacctaagtagacttgtaagagacttaggcagagtccctctagaaagaaactctgaatatactgaattttatcctattgaattataa

SEQ ID NO: 1265 - DNA, 537 bp, Methanobrevibacter ruminantium
  source 1..537: mol_type = genomic DNA
atgaaaagaaaaaaccgtggcttattaattggaagaatgcagcctgttcataatggacatattgaagttataaaggagactttagaggaagtcgatgagattataatcggaattggaagtgctcagttaagccatgagctaaaagatccattcactgcaggggaaagagttttgatgatgagaaatgccctaatagaggaagggattgacttgaataaaacatatataatccctatagaggacatcaaccgcaacaagctatgggtttctcaggttgagatggtcagccctcctttcaagaaggtctatagcggaaattcccttgttcaagtcctattttccgaagagggatatgaagtaatcgctcctgaattgtttgatagaaaagtcctttccggaactgaaattagaaaaagaatattgatggatgaggattggcaatcattggttcctaaggctacagttgaaattattgaagagataaatggtgtggatagaataaaacaccttaataaaaaggaaatcagtgaattataa

SEQ ID NO: 1266 - DNA, 438 bp, Methanobrevibacter ruminantium
  source 1..438: mol_type = genomic DNA
atggtaattaagattgttgaaaaagatgacgaatactttacaataggcgatttaatagaagagattaaaaagtccgacagagtggacgaagcaggagccatctacagttttgaaggaattgtaagaggagaagaagagaatttaaccgttgataagcttactttaacacttccagacaaggaaaaaggacttgaacagatagaatctatcgtagaaaccgctaaagtaaagcatggagtatttgaaataagcgttatccatttcattggagagttctatactggagatcagttattcctagttgttgttcttggacctcacagaggagaaaccttggaagcccttactgaagttgtggaaagagtcaagcatgagattgactttaaaaaagaggagctttccaatcaaggaactaaaatcataatggcaggaggataa

SEQ ID NO: 1267 - DNA, 207 bp, Methanobrevibacter ruminantium
  source 1..207: mol_type = genomic DNA
atggcaattagtgcaagaaatggtattaaaggtactgtagaaagtgtaaaattaggtaaagttatggcaagcatcaagattaaagtggaagatcctgctttaattactgcagtcattactaaagaatctgcagaagacttagacttagctgttggcgatgatgtaagtgctatcattaaatctactcaagttatggtagctaaatag

SEQ ID NO: 1268 - DNA, 207 bp, Methanobrevibacter ruminantium
  source 1..207: mol_type = genomic DNA
atggcaattagtgcaagaaacggattaaaaggaaaaattgaagatgtaaaattaggagaagtaatggcaagcatcaaaatcgcagtggatgaacctgctgtaatcactgctgttattactcgtgaatctgctgaagaattatctttagctgaaggtgatgaagtaagtgcagttattaaatctactgaaatcatggtagaaaaataa

SEQ ID NO: 1269 - DNA, 207 bp, Methanobrevibacter ruminantium
  source 1..207: mol_type = genomic DNA
atggcaattagtgcaagaaatggtattaaaggtactgtagaaagtgtaaaattaggtgaagtaatggctagcatcaagatcaaagttgaagaccctgctttaatcactgcagcaattaccgctgaatctgctgaagaattagaattagctgttggcgatgaagtaaaggctatcattaaatctactgaaatcatggtagcgaaatag

SEQ ID NO: 1270 - DNA, 207 bp, Methanobrevibacter ruminantium
  source 1..207: mol_type = genomic DNA
atggcgatcagtgcaagaaacggattaaaaggaaaaattgaagatgtgaaattaggtgcagtaatggctagcatcaaaattgcagttgacgaacctgctgtaattacagctgtcattactagagaatctgctgaagaattagctttagctgaaggtgacgaagtaagtgcagttattaagtccactgaaatcatggtggaaaaataa

SEQ ID NO: 1271 - DNA, 207 bp, Methanobrevibacter ruminantium
  source 1..207: mol_type = genomic DNA
atggtaattagtgcaagaaacggattaacaggaaaaatcgatagtataaaattaggagaagtaatggcaagtatcaaaatagcagtagatgaacctgctataattactgcaatcattactaaagaatctgcagaagacttaggtttagcagaaggtgacaaagttaaagcaattattaaatccactaatattatggtggaaaaataa

SEQ ID NO: 1272 - DNA, 1224 bp, Methanobrevibacter ruminantium
  source 1..1224: mol_type = genomic DNA
atgtctgcaaataagaaattcatcagagacagtattcatggaaacctccccttaaattcatttgaacttgaaattttagactatcctcaattacagcgccttagaagagtgaagcaattaggattcatctatctaatctatccaggagcaaatcactccagatttgagcattcaatcggaaccatgcatcttgcaagcaagctggcagatcagcttgagcttaacgatgacgacaaggacttagttagaatagccggacttctccatgatgcaggacatggaccattctcccatgtatccgaagcagtgtttgatgttccccatgaggagctaactgcatttgttgtcaagaacacttcccttgcagataagctctctgaaaaattcaacacaagtgaaataatcgacatcatcaatggaaaaggtaaattgggaccgatcatctctggagagctggatatggatagaatggactatctaatcagagattcccactatacaggagtggcttatggagtgattgataccgaaagaatcatcagcaatctgaagctagaaagggaactgattttagacataaaaggggttcaagctgcagaagcagcacttgttgcaagatatcttatgtatccaagcgtatatcagcaccacaccacaagaattgtcaatgcaatgtttagaagatgcctaaggcatatgattcatcaggacattttaaatcctaaagagatgtacaaatatgacgatgcagacatgataagcatgtgcagaaactctgaaggattctcaagggacattatggagcgcattgacaacagaaggctcttgaaggttgcaaagtcaattccagtcaacagatttgagaacccagacaagatatttaaaataagcaaggaagagttgcttaaggccgaagaggaaatcagccaggacttcaatatagacagaaactatctcattatcaaccttccggaatatcctagatttgatgagatgaaaacctgggtgtcctttggagataaattatatcatttgaatgagatttcaagcattgtaggtgctttaagcagcgcaagattcaattccccagacatttgcctttatgtgcctaaggaagaccttgaaaagaccaaaagaatcaagctggaaaactatttggacttgcctgaagaagtgagaaggtatgatacaattcactttaaccagtccaaattgtttgattaa

SEQ ID NO: 1273 - DNA, 555 bp, Methanobrevibacter ruminantium
  source 1..555: mol_type = genomic DNA
atgattattatagcaattacaggtgcaagcggagtaatctatggagtggaactcttaaaagcacttaagcaacttaaaatagaaacaggactgcttataagcaatcctgccaagattgtaatcgaatatgaattggaagaatcagtagaagaaatcaaatcattagcagaccactattttgaatctgaagagatagactcctctgtaaacagcggatctttcaagtttgactctgctgtaatcataccatgttccatgaagacagtatcagcaatagccaacggctatgcatccaattccataactcgccttgcagatgttgcccttaaggaaagacgcacccttgttctggttccaagggaaactccattaagggatgtccaccttgaaaacatgcttaggatatctaaggaaggaggcataatccttcctgcaatgcctgccttctatcatgaccctaaagacataagcgacatgaccaatttcatagttggaaaagtcttggatgtcctaaagatagataatgatatgtttaaaagatgggagaaggaataa

SEQ ID NO: 1274 - DNA, 564 bp, Methanobrevibacter ruminantium
  source 1..564: mol_type = genomic DNA
atgataaaagattttgactttattaatacctgcgatatctccggattcattaaagaggaaattagagcaatagccctctataaatcagatgtgagtaaagaggacattgttttagacattaactgtggaattggagaaatatctacagaattttccaaattatccaaggaagtctattgcatagatgaagacaatacagcaatagagttttccaagacaaatattgaaaagcatggagatattgataaggtcaaattcataaatcaggaccctctttctgctataagaagcatcatcgactttgacattgccataataaaagcaaatgatgacaatattggtgagattatagaagagattcacaatagaatcaattcaaaaggcagaataataatcttgacaaacattcttgactttgctttaatgagtgtaaataagttagatgaattattatacaatccaacaattagtcagattgatgtatctaaaggacagcagttaaataaaggggtaaaattaatttcagacaatcctatgactatgatttatgttaaaaagagatag

SEQ ID NO: 1275 - DNA, 732 bp, Methanobrevibacter ruminantium
  source 1..732: mol_type = genomic DNA
atgaataatcaaaataagtattcttgcatagttttagctggaggcatgagcagaagaatgggtcaggataagggatctatgattatttacaataaacctatgattttacacatacttgaaaggctaaaccataagataaatgatgctgtaattgttttaaataatgcagaaaggatttcaatttatagaaatcttctaaatcaatatgcagacaatgatatagaagaaaattttgattatgaattgagcttcattgaggatgaggtcaagtcaaaaggccctatttcaggggtcatgactggattaaagaatataaaaacagattatgcactagtattgccttgcgactctccatttataagtggagaatatatagaaagcatgtttgggattcttgatgaaaatcctttagcagatgccataatcccttttcatattaagtcaaataaggataagttcaaggacaatgaggagtttaactttaaaaatgcagatgaaatgtctttagagatgaagatacagaattcagagcctttgcattcaatttataaaaaggacaatctgaataatataaaatctcttttagatgatgacagcttgtatgtgaaatcttttatcaggtctttaaaaagccctgtttttattgaagtggataataaggttttatttgatgatgactttaaaaatctaaataaacaagaggatattgataatttaaagtttaaaaaatag

SEQ ID NO: 1276 - DNA, 699 bp, Methanobrevibacter ruminantium
  source 1..699: mol_type = genomic DNA
atggatatattaaataagtttgacatagtgccaaatgatatggaactgtatgagacagcatttacacactcatcctatgcctccaagcatcatttgaacgattatgaaagattagaatttttaggtgactctgttttaaacatgctcacttctgaatttcttcaaaacatgcatcctgatttcggtgaaggcaaattgactaagcttagggctaattatgtctgtcagaatgcattgattgtttattcacatgagtttggattggacaaatgcgtgaaattgaatcttgaggacaatgcattaactgataatgaggtcatttcaatcacagctgatgtcttcgaatcctttttaggagccatctatctagaccaaggcatttctaagtgtaaggagttcctgacaataacagtatttccttatattgaaaatgagcagattttcttccatgactataagtcaactataaaagaatatggcgatgccatagataaggaaatcacttatgagctgattgaagagcatggcgctccccatgacaagacatttgtgatgaaaatattgatagatggcgttgatttcggccatggagtaggaaagagcaagaaggaagctgaacaagtcgctgcctgcaatgcaattaagactttaagattggatcatggccaggatgttgcgtatatgcgtttgtataaatag

SEQ ID NO: 1277 - DNA, 459 bp, Methanobrevibacter ruminantium
  source 1..459: mol_type = genomic DNA
atgctattgaattggtgtgaagagataacaaatatagacccttcaattaactttagagcaactggaggatggcttaaaaccgttactggtttagataaaagtgtcttgaatggctattcattagttggagagtttgttaaatcaggagattataaacatgaatattccgatggattgtatcttgattgcaacaaggaagggaaaaaatcaaagccaaaacaggactttagactctttagacttaaaaacggcaaactgactcttatcgatcaagtttatgacggcaaaaagaattgggcctgtgaattctgggaaagcgttagcgaagagctgaatcccaatttcagagaaagcgaagctgataagataatcagccttattttagataaaacaggtaaagacaaaaagcttttaagagaggttcaaagccaattggatttagtcatttctgaaatttga

SEQ ID NO: 1278 - DNA, 513 bp, Methanobrevibacter ruminantium
  source 1..513: mol_type = genomic DNA
atgacaaaaagcttaatcctatatttttcaagggctggagaaaactatacaagccaaggaataaaaaacattgaaattggaaatactgaggtcattgctaattatatcaaagagtttacagaagcggatatgtttaagatggagcctttaaacgactatcctgaagattatatgcaatgtactgaagtggctcaaaaagagctgaatgatgatgcaagacctgaactgaaggaatacattgaagacattagtgaatatgatatgatctatcttggttttcctaattggtggaacactatgcctatgcctgtctggactcaattggaaaagcttgatttcgatggaaaaaccataaagccatttgtcacccatgaaggcagtggattcggcaaatctgaaaaggatattaaaaacctatgtcctggagttaaattagctaaaggattatccatccgaggcagttcagttgaagattctaagaaaaaggtaaaacattgggttaaaaaaggttaa

SEQ ID NO: 1279 - DNA, 186 bp, Methanobrevibacter ruminantium
  source 1..186: mol_type = genomic DNA
gtgaaaggaactccatcaatgggtaaaaagaataaaaagacccatattagatgtagaagatgtggtaaaaactcataccacgtacgtaagaaagtttgtgcttcctgcggattcggaagatctagcagattaagaagttacagttggcaaaacaaaaaatccactactcgccaaagattagtgtag

SEQ ID NO: 1280 - DNA, 234 bp, Methanobrevibacter ruminantium
  source 1..234: mol_type = genomic DNA
atgagcggacaacaaaatgttcaaagaccacttgacgcattaggaaaagcagtaaactctccagttttaatcaaactcaaaggagaaagagaattcagaggcatcttaaaaagctttgacttacacatgaaccttgttcttgatgatgctgaagaattagaaaaaggagaagttttaagaagattaggtactgttctcattagaggagacaatattgtatatatttctccatag

SEQ ID NO: 1281 - DNA, 705 bp, Methanobrevibacter ruminantium
  source 1..705: mol_type = genomic DNA
atggtggaattaagagtaaatgctggaaatgtaaagaatcctaatgttcacaaaattggcataattgcccttggatctcatcttgaaaatcatggtcctgcgctgcctattgatacagatgctaagatagcttctcatattgcctttcaagcatctcttgaaagcggagctaagtttttaggagttatctatcctgctcatgagctaaaggaaataaaccatggcatacatgttagtttagaagatttaaccgatgaaatcgttaaggtattaaaatcagcaaagaaattcttaaggattagcagcgtaatcattgtaaatggtcatggtggaaatctgcctattgtaactactttatatgatattgaagagagaactggccttcttataacattaaacagcaagatcatagaatctgaaggacctcatggaggttctggcgaactctctatggctaaggctttaggaatcatagatgaaagtcaggttgaaaaccagaccaatcttgaggaatatggtgaagtgggcctttatatgtttggggaagctcgtagaaacgatcctaacattgaggaaggggctcttgacgttgaagagaatggcgtttatgtggatgatgtctatggacaggagcttttaaagctagccattaattctgttcttttggatgttgaaaaacagttggattctcattatggctattag

SEQ ID NO: 1282 - DNA, 546 bp, Methanobrevibacter ruminantium
  source 1..546: mol_type = genomic DNA
ttgattaaattaattaaaatcattgatttttttaatttaaatctactaaatggtttcaaggtgctgattttgaaaattaagaaaagatattttttaaagaagaagaaagtaaaggaaattaaaagcgaacttggagattacggatcatttataaataataaggacactcttgaaatgcttgaggcagaggattataactttattcttgtaaatggagagccttatattattataattaatgacaagccatatcctaccttaaaggctgccttaaatatggaattggacagcaaggttgttgttgtggatatgggtgcagtcagatttgtaacaaaaggggcagatataatgagtccgggaattgtggatgcagatgagtccatcgttccagatgacattgtcattatcgttgaagagactcataacaagcctttggctattggaatcagtcttataactgggcctgaaatggttgaaaacagtgaaggaaaggctattaagtcaattcattatgttggagatgccatttggaatcttgaggtctga

SEQ ID NO: 1283 - DNA, 1488 bp, Methanobrevibacter ruminantium
  source 1..1488: mol_type = genomic DNA
atgagtgataaaaatgaatggggcagcaatctatcatttgttcttgcgatggtaggttctgctgtcggacttggaaacatatggagatacccgtatgtattatacagcaacggtggaggggcattctacatcccatatatcgttgccatactattgatgggaattccatttttaatattggaatatggcgttggatataatttcaaatcatcctttccaaaggccattcgcaagattagctccaaagcagaatatctaggatggctgcttcctacctcagtattcatcatcatgatatactattcatgcatactgggatgggatggaatctatgtgatattaagcttctttaagggatggggagcagatccaaacacattctttgcaagcacattgctccagtcaagcgaatctgtcagcggaataacaaactttattccagtcattgcaattgtaatgcttataagctggggaatcgtttggtacatttcccataaggacttggaagagggccttggaagggtgagcaagattcttgtgcctttgctttttataatcatgattgtgattgtattgttttcattgaccttgcctggcgcaatgattggattgaatgaactcttttcaccggattggaacttgcttttagacttcaacatatggatggcggcattcggccagataatattctcccttagcctgggaatgagcattgcatttacatatgcaagctatacaggaaaggaaggagacattattacaaatacactggccattacatttgcaaattgcgcctttgaaaacttctgtgcattgggagtcttttccattcttggatatatgtcccttcaaagcggaacagcggtggcagaccttgtaactcaaggtacaggattggtgtttgtagcatatcctacagtcttaaacgtattgggacaatatgcatatgtaatcggacctttattcttcataacagtctatcttgcagggcttacaagcatcctatcaactattgagccattgtctttcagcatacagaataagttcacttggtcccgtaaaaagaccatgaccgttctttgcctgataggggcagtcctttcaatgatgtatgctacagcttatggaggaaccttgcttggatatgttgatgcatatatcaaccaaatagcaattctatttggagtgatacttgaatgcatagtctttgcatggatattcaaatgcgaaaacatcattccaatcttgaatgagcgaagcaaaaccataaaattaggcaaatggtgggtggttatagtaaaatatattttgccgttgttcataacgattgtatggattggtggagtattggatacaatcaatgatggttctactgatcaattgattgtatttggaatacttactgtaattctgcttggattaactgcattatttactcatttgccagctacaaatgaagaatgggatgaaactgaatatagattatga

SEQ ID NO: 1284 - DNA, 450 bp, Methanobrevibacter ruminantium
  source 1..450: mol_type = genomic DNA
atggttaatgatgaaaaaagtttaagtcgtatgagtaaaacagattactaccttgcaattgcatttgcagtatcaaaaagaagcacatgcttaaagagacattatggtgctgtaatagtcaacaatgatgagataataagcactggatacaatggaaatccaaggggagaggaaaactgctgtgacagaggatcctgtaaaagaatggacgttccttctaattctggagactattctgactgcttttcagttcatgcagagcagaatgcaatgatcagcgcaagcagaaatgaaatgattggagcaaccatttatcttgctggtgaaatgtttaaggacgattcttggttcgaaatagaagatgcagaaccttgtccaatatgcttcaggatgattaagaactctggagttaaaaaaatagtaagtaagggagtagttattgatttataa

SEQ ID NO: 1285 - DNA, 2424 bp, Methanobrevibacter ruminantium
  source 1..2424: mol_type = genomic DNA
atggaaggggaacaaaataacttaagaccttatattgaggatttctttagagatttgcaattatatgacgattacaagaatggtcatcactataaagaccttttagaaggaagcattattctttttttagaaaaggaaaacacatataccgcctatgaaatctatgaaaactttttcatgatctatcaaatcacagatgaggacaagtcccatgggcataagactgaaagcatagacatcagcgagtccaattcattattgaaactggtcaatgtaatgaaggactatgaagagaatacaggggatttgattgaaaagcagagggatcatttcatccattcagtaaacgtattcatccttggtttggccatttatgcaagcaatcataaatataggaatgcatttgaggcttatgtgacagacagtccatataagaaatactataagactgctgatggtgaattttccgcagaggagttcctataccgttggggaatagcttcccttttccatgatatcggctatcctgttgaaatcattggaaagcagttatccaaatttataaacgacagcagccaatcaatatctcaaaaatataaggtcaatacagctgtcaactttaagaatttcaatgaattgaattccatcataaagctagaccctaaattcccaataatctataggatggactatcctgaaaccaatttcattgatgtatacaagccaacaaaccttatggctcatcagatttttactgatttgtatgtggattctgatattagggccattgacgagtttgatgagttgaatgaatatctatataagttggttgtccatttggatggctttgtggattatatgacatcaaacaatttcattgaccacggcttcttttcatctatctttgtattgaactcctatggagccattatgcagaaacattatctcaatgatgatgaggaaaaattcgactattatataaataaatatgcttatttcttttatcctgtcttaaacagcgcaacttccatattgcttcataattattttagaggaaccttaaatgagaaggaaagcaagactgatgagtttaatctaggcaaattggaacctatgcaaaacccattagcttttcttttgattttctgtgacgaacttcaagaatggaaccgcaggccaattggactaaaggacaaggctaaaaaccatgtccatgatattaaaatcaatattaatgagaatcaggtcttagttgattatatcgttaaaaacagtgcattaggtcttaatttctctgaaaataaggaggaattaattaataatcttttggatgttacatcaatattctccaatggtttgaaagtaaacataactccttatttggatgagaagtatcctttagaggacatttcattatctgaagttgagactccaaggatattgctccgccatgttgaggagattgcacgtgcaagccataacagatataatgaaatcggaaaggcccatggcaatcctgatgagccttatgagtcattaagtcctaagaggaagctctccagcataagacagactaaggagtttcctatgaagctgaatctcattggatgtgagatggtctcagaaaatgatcctagagatgaatattcccttagcgatgatgagcttgatttccttgcagaaagggagcatgaggcttggtgcagagaaaaaaggaatgtaggttacatttcccatcatgatgcattcaaaagaggtcttatcgatgatgcagaatatgaccgactatgcagaacaaatgaggaaggctgcgagaccaataagcataataagatagaatctccagagagaaacctttatgttcattcaaatattattccttatgacgaactcaatcaatattctaagaataaggatagaaggccgtttgaagaccttccagataatttgaaattgattaagaacaatcctttaaagattgttgaaaacagatataagttgtttacagttgccatgcataatgaatatatggattatattgcaggcaagaaagaagttcctgagtttaaggacttgccatttgaattgcagcagataaattataagcaaacctatctcattgcaaaatacctaaatgaaatcggctatgaaattgttgaaaaggatgatgagagacctgctgtaactaagtttgagaacaataaggaaactggctatttggctggaagagagcataatgcttggtatttaagaaaattgaatgatggttgcactaatggtaagaataaggatggaacagacaatcctaggataaatccttgggatgaattggattacagtttgaaaaagcctaatatgaatacctttaagaaattgcctaaactttgtttgaaagctgatttgaagattattaaaaataaatag

SEQ ID NO: 1286 - DNA, 795 bp, Methanobrevibacter ruminantium
  source 1..795: mol_type = genomic DNA
atgaatgataaacttatagaattgccaaattatggtcgcttgatggttgtaagcgatttgcatggtaatttaaatgactatgaaaagtatattgacctttgggattgccaagatcctgattttcatattgtctttcttggagacctaattcattccccttactttaatgataagtctgtagagctgttggatgatgtaatcgaaaaggataagaaatattccaattttcatgtattgctcggaaatcatgaatgggctcatattgttcatagggacatattcaaaaatggagaaaacattagggaggatttcgaatacttgatatcctataagaaaggtactatagagccagccattacagaatatatcagattctttaaatccatgcctttctttgtaaaaactgaaaatggccttttcttatcccatgcagggccttcaagaaaggtaaagtcaatcgaagactttaatggcatttttgatggagattatcataatcctattttagatgatttcttatggcttcgcccaaaaagaaacctttatggacgtagaaacatattgactgacagtaatttgtatgatgagggagacatcttcaatttcctaaatattgtgggagcaaactgcatggtggtaggtcatagtcctgtagatggctataagcagtatggaaatcaattgataatctcttccagctttcaaactgaggacaaggtttatttggatattgatttgtctaaagaaatcaaacacatgagggatttattggactgcattaggtattttgactga

SEQ ID NO: 1287 - DNA, 360 bp, Methanobrevibacter ruminantium
  source 1..360: mol_type = genomic DNA
atgatagacagttttagatatgcattaaatggaattgcagtttctattaaagatgagagaaacctgaaaatccaaatgattgttatgatgcttgttataatagccggatttcttttaaagattagcagaacagaatggataatttgcataatcctatttgcacttgtaataagtgctgaaatgataaacactgccattgaaaatgctatagactacaccagagaaatgactgttgataaggacaatgacttagccagaattgctaaggatgtctctgcaggagctgttcttgtaattgcaattgcatctgcgattgttggattaattatttttattccgaaagttctcttattgctttaa

SEQ ID NO: 1288 - DNA, 255 bp, Methanobrevibacter ruminantium
  source 1..255: mol_type = genomic DNA
atggaagaaattattcaaaccttaaaagagattgaaaaggaaaataacattgaaatcctatatgccattgaatcaggatctcgcgcatggggattcagcaatgaggaatcagattacgacattagattcatatttaaaagaccgatcaaagactacatctccctaaaaaacaataaagatgccttagacattacaatcgacgattatgacatagtgggatgggacattaaaaaagactttaagcctccattataa

SEQ ID NO: 1289 - DNA, 444 bp, Methanobrevibacter ruminantium
  source 1..444: mol_type = genomic DNA
atgggaaattgcgactttctaaatgaactgccagacttcgataaggatgttttaaagtaccattatgcaagcatagcatttaatgtatggaaagaagccttggatagagaagaaatggatagaaaatctactaaacgttatttatattgtattcgttgcatccttgcttggaaaagtgcagatttaggcaaagattcttcaataagcatttttgagctgatggaagacagtgagattaatgatgatttgaaaagtgatataaatacacttattgactattacaaatcattatgcaagaatgaattggatgaagagctgattgatcgcctaagcatttggatagatgatactgtgaaaaacatcaaggatcactatcctaaaaaagagaaaaaggacatgagtctttatgatgatgtcttatttaaagtcttggagattgaataa

SEQ ID NO: 1290 - DNA, 834 bp, Methanobrevibacter ruminantium
  source 1..834: mol_type = genomic DNA
atgggatttaaagaagacaataaagacaaatacctagacccttttaaaagagtcactgttgatgtcggaagctcttttaataggataaacgtttcagcagatgtaattggaaacagaatccgcataactgtgccaaaggacaagagtggtaatttaactggaactattgtagagaatattgctttggaaaattccacttggatttttgagcctgttgccgatgagataatggaagatcgcatcgaccgtaagctctctcctagaaaatatatggatttatctaaatttgattttgaaaggggatttttgccaaaggaaatattggatgatttggtatatccaattaattacagaaaggattattctccatttgcaaagaaggtattggagcatccaaacgatgagattcgtaagattgcccttggatatatcgatgatgaggatgttttggcatccattattcttttcagcaaggataaggatctttccttatttgttctagaacatattaaggataagtctattctattagatattgtcagaaatgatttcaattactattatttcactggagcagtggatattttctatgatatggataaattgcctttaaagctctttgatttagatattcgtaaggctgctttagaaaggatagatgataaagagcttttatttgaccttgcctttgactgtgaggaatggtttaagcctattgatatgatcaaagacaataatcttttaagtaaaaaagagttggatagtctgaatttatatgctcaaaacagagagattcgtgaaatcattaaaagtaggttaaaaaatgagttatag

SEQ ID NO: 1291 - DNA, 1740 bp, Methanobrevibacter ruminantium
  source 1..1740: mol_type = genomic DNA
atgtgtggaatcgtaggatgcatacttaaagataagcaaaagtctgtagctcccattttacttgaatgtgtggaaaaccttgactatagaggatatgattcagttggaatagctacttttgacggcagcatccacgtaaaaaaggacaagggaaaaatccctgaagtggatgaaaagctagacttggccgacatgcctggaaactttggaatagctcatgtaagatggccatccactggaattgcaagcaaggagaacgcacatccccaattggatgaatccgacagcattgcagttgttcacaacggatcactgaaaaactatgacgaacttaagggagagcttatagcagatggattcaaattcaaatccacaacagacactgaagtgattcctcatctaatcagaaaatatatgaatgaagggcttgaccttgaacatgcatttagaaagaccatagaaaggcttgacggctcatatgcaattgcagtaatctcaaaagaagaaagcaataagattctagctacaagataccaatcaccattgaagattggaatatcagatgatgcctacttcatatcatcagacataccggcaatcataaactacaccagaaagatcattcttccagctgaaggggaaatggtcatattggatgaagatggagtccatgttcatgatgaggatggcaatgagattgaaaaggagattctagtgattccatggaccgctcaaatggcaagcaaaggagaccacccttactatatgattaaggaaatcctagagcagccagatgctgtggaattcactttaggtgaaagggagaatatccaaagaatcgttgatgaccttggagatattaaaaacatctgctttgtagcatgcggaacctcataccatgcatccttaactggaaaatatctgcttcaacatctggctaagataaaaacagatgtggttcttgcttctgagttcaagtacactgcagacacattagataaggacactttggttgttttcatttcacagtcaggagaaaccttagacagcatgaatgctttaagaattgcaaaggaaacttcaccaacccttgcaatcgtcaacaatataggctcttcaatgacagaggaagccaaatatacaataatcactcaagcaggccctgaaaagggagttgctgcaaccaaaacatatatagcacagcttactgcaatctatctgtttgcaggtcttttggcaaatgatgaaaaattgatcaatgaattgtataatgttccaggttacattagggaagtgttgaaaaaatcatctgaaatcgaggttctatctaaaagatacagctttgcagatgacttattctaccttggaagaggattctcttatcctattgccttagaaggtgcattgaaattaaaggaaatctctcttattcatgcagaaggctatgcatcaggagaattgaagcacggccctttagccttaatcaaccataagattccagtgattgtgattctacctccaggcagtgattatgaggacactatggtaaatctggaggaagttaaggcaagaaaggcaattatcctatcaatatgtgctgaaggagatgcgaaagcagaatgcaaatcaagagatgtctttacagtcaattcaaaagtcagtgagaccattgcacctcttgtctatacagttcctctccaattgttagcttattatgtgactttagaaaaagtagcatga

SEQ ID NO: 1292 - DNA, 3105 bp, Methanobrevibacter ruminantium
  source 1..3105: mol_type = genomic DNA
atgatagcaaacagccctaaagaaattaaatccagattaattgaaatctataatgaagaattattaaatcttaacatattcattaagaatagagatgaacttaaagggaataaggatttaagatatcttcttttagagagaatcaaggaggaatttgattatttggatgatgaggaactttttattcttttatcattttatcaaaccatcccttcattttatagaaaaacttttaataagattcttgaagcatctattgataaaaattatattgaaattcaagatgaattattgaaacttgttgaaatcattaaagaagaaatatcaaatatagatggggcaattgaagagcaaaatctaaagattgaggaaaaactcctaaagagtttatattctaaagacaatcaaaatggagaaaattcagatattaatcatttgaacgaaggaaaaagcttagatatcaataatctaactgatgaggaaatacttgaactatacaacattagcgatgaggaattttctcaattgcaggactattatgaatgggaaatatttgaaagtgattttctaaatgaagaaatcttagaggattatgatgaatctgcctttctggatatagcctataatcataaggatgcagaggttcgagggtttgctttaggcatggttttaaaaccatatgtttggcttgattttctatttaatgatccagatttatttgttcgaaagtctgctttattttatctttttaaagaaagatatttaaacgatattgaagacattgattatttgggcaaaattcctattgaaatagattttaatttggattatagcgacgcaatcgatgattttaaaatcgatgagtctctttttaataggcatgacaagatcatcattagtgaaatttcaattaaggatgatgatcttattgtaaagacagaccctaaaaactcatatgaacatgctgtaagcaagataagaagtcaagacgccttaaaggcaatcgcaaattatcataatcaatggtctgtacgctatattgctgtaaataagataacagacattgattatttatatgatattgcattaaatggttttaataaggatgcaaagcctagacatggaatattatattatcctggggagattagtgaaggagatgtattgaaatccctattaaatagacttttaagattgaagaacttatctgatgaagattcacaaagcttcctaaaggagcttttttataagtcaaaggatagcataataaaaagatattgcttatcaaagatagaagatgatgtatttttagtgaatttagcaaacactgaagcaaacccaagctttgcaagagtttgcttggatacgattaaggatgaggattacttgattctcctttccattgcaataataacaaaccctaggttcaaaggaaaaaatcaagatttatatgacgggctctgtgagggaggtattggggatgaagatagtttcataagggagtctcaatttgatgaaatagattatcacaatatccgggcctatgcctctaagattcttattgcattgcctagaaaaactctaaatgagactcttgaaagctttagtttaaaattagatattcccaatctaaaggaacatagagtttttaagcctataattaataaaaggattacagatattttaggagatcttgctaaaattgatgaaagtcctttagttcgctctattgcagttttaggtcttgaagataccaatgatttgatgtctattgctttagatgatgaggatgataaagtctcatttaatgctataaaaaagttaaatgatgataatttcattgaatattacttaaaagaaaccaataggaaagcatattatttagttgaaggaaatctagtaaaagaccaatcccttttaaagaaaattgcactaaatgattcatggggacctacacgcagtgaagctgtaagaaacatcaaagatgaggatttattgataggcattgcaaaaaatgaccctgaagcaattgttagaagggaggccgtactaaaaataaaaaatcagtctgctttgattgatattgcatatgaagatgaggatgatttagtaagggattttgcaatctcaaatattgatgatgaggatgttttggaggatttaatctataaaaatgaagattcaaatatattaagaacaatcttgtccaaattggataatgaggaaataattaaggactttgcttataatcatccaagagggattgtaaggaatgcagcaatctcaaatattgatgacaatcgtgttttggtggatattgcaaaaacagatgaagattggacggttcgacgaaatattattgctcgcctagttggaaagttcattaaaagcagtgttgatgtttatgaggataaatatttaaatcatttaaaaagaagggaatattataattctttgattaaaggagataatgagaagtttaaatctgaaaataaggtaaaatctagtgaaaatgagaaaaatgaatatgcagatgcaagttcaatagttctatatgaagatgatgaaccatacacacttcaagatcttttagttgacagggcacttaatgatgaatcagaaaaggttcgtgcatttgttgtttcttatattgatgatgaatatttcttattttacattgtaagcaatgataaaagcatcaaagttcaattatctgccattgatggaataaaaagaaatgagctattggccaaaatatttatcaaaagcaagaatcatcatgtatatagaaaagccatttcccggataagatatgaatatattcttttaaaattggtttgtttgaagaattattatggggagctttggcctaaaaggcaaatggctgaagctagaatggaagaattaggatttaagtctcctttaataaagaaagaggataatagaaaaaataaattcttcaggcctatatttgatataagggattatcaaagagatcttgaacttttagatcgtttggataaggaatataaaaatcgtagtaataattcagatgattctgatggttcttccgatgattttcaatttaaacgaattgttttttaa

SEQ ID NO: 1293 - DNA, 462 bp, Methanobrevibacter ruminantium
  source 1..462: mol_type = genomic DNA
atgaaattaatgtttgtttgtactggaaacacttgtagaagtgttatggcagaatatttatttaaaaccatgattagtggagatatagaaatatcctccgcagggattatggcaaaagacggcagttccccttcattgaatactattgatgtctgcaaaaagcatggtttggatgtatctaatcataaggccactaatgttaagaggtcaaatatcaaggatatggatttggtattgactttagaggagtctcatagaaacaccttattgaatatgtatcctaatctttccatctatacaatcaaggaatttaatgatgttgattatgtttatgatatagaagacccttataatcaaagtttggaggtttatgaagccactttcaatgaaatcaaggagtctttagaaaagattgatccagataagcttttaagctatggctttaatgtagaaaaggattaa

SEQ ID NO: 1294 - DNA, 381 bp, Methanobrevibacter ruminantium
  source 1..381: mol_type = genomic DNA
atgattatggacaatatgtggattgaagcattaaaaaacaaatatagatttgaattcaagggtctaatcaatgttgaagacttattcgatttaaagttagaggaccttgactacatctataagaatttaaaaagagacgaaaatgacttacaagttgattctctattagatgctaataaaaatcctttaaaaggagaattagactgcaagatcaatattgtaaaaagcattttccaaatgaaagtcgctgagattgaaaaagcaaaaattgctatggctaataaggctcaaaaggaaaagatcttagcaattattgaaaacaaacaagatcaagaattatctgaaaaatctattgaagaattaagaaaaaatctacgatga

SEQ ID NO: 1295 - DNA, 2013 bp, Methanobrevibacter ruminantium
  source 1..2013: mol_type = genomic DNA
atgcgtgacagattattcaatcattttaatgaaaatatggcaccaagaaaattatttattgtagaccgtgattgggaagaactatggaacatgtatctagacggatttccaagagaaatgaacccaatctatcgtgaaagaagagaactggattgtagtgcatgccgcagcttttttaaaagaatggcaaatgttgtagcacttgatgaagacactggtgattttatttcattatttgctggtgaaaccaatggagaaaaagaagtattccgtgctttagacgaatatgtcaaatccgcaaagattaaggacgtatttatgagcgacactcaaagggtaggaatcgaaagcaatcatgaaatgcttgatagcggaagcgtccatacttggtaccatttctatgtggatgtgccaagtgaatatgttggaaacttaagccagaaggcaatctatagaaataacagaattgtcctagaaaacagtacccaaagaatctctcaagatgctgtagacactgtattagagcttatcgcatctaacagcctatatcgtggagaccaatgggaagacgctttaaaaagttttaaggactacttaaaggaatatgaagcaaacgacatggatgaagatttattctactggattaaaagcattgagcttggatcattacttgttagaatcaaaaaccacagtattggagttcttttaatggacgtaacccaaggagtgccattagatgaagctgtctcaaactatgaaagaattgtagcacctaccaattatcaaagaccaaagccaatcttttctaaaagaatgctagaggacgcacaagagaagatcaatgaattaggttttggagagtcaatctacagacgctatgctaatatggcagacttaagcattaatgatgttctatttgcaaacagggattacaccagtgagattcaagacaatcagaatttctttgacaagctaaaagagctaactgttaacagggctcgtaactttgataaggttcaggagatctcactagaggactttgttgaaagcatccttcctactgctcttgaagttgaactatacctatcatatgacttaagcaataatttcatgtctttaatcgcaccggtcaatagggacgctccatcaatgtttaaatgggacaatcctttcagctgggcttataaaaacaacattgcagacagccttatgaaagagagagtaaaggctttaggtggagacgttgatgtagatttaagatttaccatccaatggaatgacaatgaatgggacaaaaacgatttagacgctcattgtaccactcctgaaggggaggaaatctacttcagccatatgagaagctcaaaaaccggaggatggctggatgttgatatcatcaaccctgaaaagaatgtacctgctgttgaaaacattcaatttaaagacagaaatcagatgattcctggagattacctattccgtgtccatcaatacacctaccgtggtggagatgacggatttaaggcagagattgaatttgacggaaggatctttaacttcatctatccaatgagactgtatcaaaatgaatatgtcgatgttgcaaaagtgagcttaggtgaggatggaaacttcactttaaatagctttttagacaatcaaaccgctagcgctaaagaatggaacttaaactacaacagattcgttccagtaagcctgatttgctacagccctaactactggggagacaatgctgtaggtaataagcatatcttctttatcctaaaggactgtttaaatgacggaagaccaaacccatggtttaacgaatacttagttagcgaattaagggaccatcgtaaggtaactgaagctttagcaactattgcaaaagtggaagagtctgatgagcagctaagcggtattggtttctcattcactcaaaagaataaggtcactttaaaggtcaaatctgaaaacattgaaagagtgtttaatgttgttattggatag

SEQ ID NO: 1296 - DNA, 1185 bp, Methanobrevibacter ruminantium
  source 1..1185: mol_type = genomic DNA
atgggaactttaccattaggaaacgataatgatttagatgattcacagttttacaatagagcagaagaaatttcatttatttctgagaatttagaattaactaaaaagggatccaccccaacaatactccttacaggcattagaggcgtaggaaaaactgcattgatgaaaaaattaaaaaaagatttccaaaaagatggatatatagttgtttatatggaattatctggaatgaataaatataaaaaagattccctagaccgcttttgttttatgaaattattctatgaatccattataaatgcatacaaggaatcaaatatcttatccataaatacgcaaatcttgaaatacataaaaacccgtaatttcaaaatagacaaaatatcatcatttgaaaaaattccaattccaatcatcacaacggaagaggactattccaaatttgcaggttttgtaatggatttgcctcaaatgatatatgatgattttaaagacgagataaatggagttttaatatttatggatgaatttcaaatcttaaaacaactcgatgaagatgtgaatgggttcttatggtacatcagaagcattattcaatcacaaaaaaacataggttatatattctcaggaagcatgagccttaaagatgatttgattgcagacattgcaggtcaaaaaggtgcctttggcgggagaatattgaattatgaaataaaaagattttcttatgaaacaacaaaaaactatttgaatgaaaaggcagattatcttaattttacagaagagggttttgaaagattttaccattgcaccaaaggcaatctatattatgtaaatagttttgcaagattgctccctccaaatatagaattaaatgaagaaaaggtaaactctgaatttgacaagtccctgccttatttggtaattcatttatcaagcgaatggtataaattaagcaatcaagaacaaagaatcgtcattgccctaatcgaaggaccattaaaaagaattgaaatagcaaataaattacaagtaactagcggtgcaattggcagttccttaaaaacactgcagaataaaatgttgattgaaatggataataataaatatcagatatatgattccattttcaaagcctggctaaaaaaggaatatagggaaaagggagattatcccttttaa

SEQ ID NO: 1297 - DNA, 4440 bp, Methanobrevibacter ruminantium
  source 1..4440: mol_type = genomic DNA
atgggttttttcgataagttgaaaaatgcacttgaatcaggaaataaatctcatgataagagggaatctcaaaagaatgaagcgatttcagataatccaagaggagattctctttcagataataaaaataggaattctcttccagataatcaaaatagaaattcttcagataacaataatgttcgaaatttcaaatatctggatgatctaatccatagcggccaaaaggatattgttctggattgcgatattgttctagctgatagtgaaattgaatcttacaaaagaggaatagatatcggcgggagtaatataacccttgatgggaatggacatgtggtggatggaagaaataaggcggaaatatttaaggtttcatctaaaaaccttgccattaaaaatcttagaattgaaaatggatatagtgagcttgattcaatcatagatgtgttttcaaaaggcgagttgcatttatccaattgcagcttttttaaaaattccaatgagtcccataggatatttggcgataatctggtttgtataggaagcataatacgaaatatgggggagctgaccattcaccattgccatataagaaacaactcttccaggggacagggaggaaccattaaaaatactggaacccttaatatatccgattcaatttttgaatataatctctctttagaggacgggggagcaatctttaatgaaggtttgctcaagctttcagactcaagatttgaattcaatcactccaataaacggggaggtgcaatccacaatgaattcaatggagagacaattattgaaaatagctcctttgataaaaatggaggccgcaaatcagctaatgacatttcaaacagattcaatcttgttttaaaggatatgcattcagatttgaaaatagataatgaatggactgtttttattgaaaagggaaaatcctttgatattgataataagggaggtataatcgaatttgctccattaaataatgatgagaaaagttttactttcctaaaggaattattggatggaaatgactcccaaatagatttgatgcatgatataaagttagacatagccaatgacgagcaattgtactttccagatggaataaactttaatcgggacaatctcatttttaatggaaatggccatactattgatgcattaagaatgagaaacattttcaccttggcaggtaatgatattatatttagaaacgttaatttggaaaatggattctcaaaactctccaatggtgctgcaataagcatgaaagaaggatttcttaaaatatatgaagtggagtttagggataatgcagcatataatggaggtgcaatctcaattaaggatgcatcggtttcaattgacagttcaatatttaggcataacgctgcaaatgccataaaatttgaaactggaggaggtgcaatatataatgaaaatggctccctttccataatcgataccctatttataagtaattcatctctttggggagaaggtggagctattttaaataagagcggtgcattgtcattgaataactgtgatttcactgataatcgttctgtaaaaaatggtaatgatataagcaattatgatagcttaagaatctgcaaatgcagttttgaaagtgataaagctaataattccaattcagatagtggtgaaataactaattccaatttaggcagtaaaataaacaattccaattcagacagtggtgaaattagcattttcaataataacctctccaagttatatgattccaatttcaaccattcaatcatcataaacaagggccttttaaagatagataaggacttcccaatcaaaagtgcccaaataaaaaattccggaaagctaaaggcttataactttaatgataagcaaattgaaggcattgatataaataatgaggatggaggcaagctggtttttgtaatagatggggtggaagttttaaatacagtggaaattagccaaaagtggattgaaattaagatatttataagctccacctttaaggatatgcattccgaaagggattatctcattactgaagtcttccctgagctaagcaaatggtgtaaggaaaggaggatattgcttactgaagtggatttgagatggggtatcacacgtgaggatagcagatcaggcaattcaataaatatctgcctccagtatattgataagtgcaggcctttctttatatgcttccttggacagcgcagaggtcgaattccagaaaaaggagaaagaaaggttactgaagaaacatttataaatttcccaaaggtttcaaatcttgttggacatctgtcagttaccgaaatggagatagagcatgccacaacattgcctttattcaagcttttggaaaatgattttgataatgagcatgcaaaaagggcactgttcttcttgcgtgagaacccatttgaagatgtagatctctcccctgcccaaagggacatctatttgaatagaaagcctgaagatgatgagaagctttcccaactgaaggacttgataagggagaaatgcatattctttgattattcctgcatttgggatgagaatatggagctttatgaattgtcatcctcaaagggagggctcactgatttcacctgtaatggcagacccctttccgaggtcattatcgccgaggttaaaaagcagattgaaaatgagtttccagattataagcctgttaaaacagatgatatcttcctagatgatgcaatgcttcagaacttggagataatgtccatatcacacgattttgtaggaaagcaaaaggaaatcgattatattaatgaattcatcgaatcagacaatgaaagattgcttctagttaagggagcagagggcattggtaaaaacacccttctttctagggtacatgccctattgaatgaaaagggaatatcttcaataatgaggatatcaaatgcaacagcaaaaagcaattcctcttccaatttgtccttaagcattggaagtgaaataggtcttttcaatggagaggaggcattatataaaggagttaaacatgcccttgatgatgagttccttaagcagttaagcgatagtggagtgagagttctaattatttccaatgcagataagctaaatgaccgtttggtctttaatgagattccagacaatctccatatcatactctcttgcggtgaaagctatgaaattgccattcttcataaggagttgatcattgaaggatttgaagatatctctgaaagggagcaattaatcaacgaataccttaatcatatcctaaagaacttgaatcaggcacagaaggaattgataatatcaaatcccgcttcaaagtctccattattccttaagatactcttgaatgagcttaaaaacttcggttcctatgagaatttagttgaaaagattgaaggattcggagattccacattaagcgcttttgaggaactgcttcgcgcacttgaaaatgatgcaagctttgcaaatggctttgctagagacacattgcttttgctcatctattcaaaacatgggttgaatgaagaggaattggtctttgggcttgaatcattaagccatattgatgcaagatcaaagctaaggctattcctctatagaatgggcgattatatccttgccattgaggataggtacttcatcaagtttgatgagtttaaaaaggctatccttggcttatatggtgattgtgagcaaaggataagggaaatattggttgaaatatataagaataacattctaaaatctccagattcacttgcaaacggaagcgatgagatattgtataatctagaactcctaaaggattatgatggaataatgaatgttttaaatgatgatagattgattaacggcattcatcctagttgcattttccttggatataaatatggaaagttctatggacctagcaaagagtatttgggctttacaatgatagactctaaagataagtttgagttctttagccaaattgcgttagtccttgctaaaaagagtgccgattcattgaagtatgcaatgaaagcatatcctcaccctcacactcaatggccgcgtaaattcagaaatgagaatgacagcgagagctttatgaaatatcaggatgccttttatgccattcctatgtttatagaagctgcctgcagatatgccaataaggcaattaaggatgaagaggatttggataaattaagggagtttaaatctgaatttgataaaaggataaatggtgtagactcatttttgaattatatgtctaattttggcagcagtcaattggatttgggatataaggttgaagccttggcagatgatgcaatattttcattggataatttaaacgagtattataatggtggggttagtgaaaagtag

SEQ ID NO: 1298 - DNA, 2196 bp, Methanobrevibacter ruminantium
  source 1..2196: mol_type = genomic DNA
atgtcaagaagagacaaaatgattgcaaagataaaggaattgatgtacaagccagaatacatcagaaacataggaatatgtgcacatattgatcacggtaaaacaaccttatcagataacttgcttgcaggtgctggattgatctccgaggatttggctggagaggcacttggtatggacactaaaaaggacgaacaggaacgtggaattaccattgacgctgcaaacgcttctatggtacaggaatatgagggagaacaatacctcattaaccttattgacactccaggtcacgttgactttggaggggacgttacccgtgcaatgagggctgtagacggtgccgttgtagtggtatgtgctgtagacggtgttatgcctcagactgaaacagttcttaagcaggctttaagggaaaacgtaaagccagttctattcatcaacaaggtagacaggcttatcaatgaattgaaattaggtccagaagagctattgaagcaacttacaagcattatcgttgaagtcaatgcattaatcaagtcattggcccctaaggataagaaaaatgaatggatggtaaatgtagaggaaggaagtgtagctttcggttctgcattcaagaattgggctatcaacattccaaagatgcaggagacaaaatttacctttaaggacattatagattactgcaatgaaggcaaggaagacgaattgaagcagctcttgccattgactgaagtcctgttgaatatggtagttaaacacttgccttcacctaatgtggctcaagtctacagggttcctaagatttgggatggcgatattgagtctgaagttggccagaccatgataaagatgtctccagatggtcctttagccggaatgattaccaatgtggctgtagataagcatgcgggaatcgttgcaacatgcagaatctatggaggaaccttggagaagtctagcgaaatatatctggtaggttcccacggcaaggcaagagtccagcaggctggaatctttatgggtgctgaaaccatcgatacaggtaaggttccagttggaaacattgcttacttgacaggtgtaaagggagcaagcgcaggtgagaccatctgttctgcagattgtatcatcgatgagtttgagcctatcgaccacatttcagagcctgtagttactgtagctgtagaggctaaaaacaccaaggatcttcctaaattgattgaggtcttaagacaggtctctaaggaagaccctacaatcaaggtggaaatcaatgagaccactggagagcaattgatttcaggtatgggagagcttcacttggaagttgtaacaaacagaataattaatgacaagaaattggaaattcttgtttcagagcctatcatcgtatacaaggaaagcgtattaggtcattctccagtcattgaaggtaaatcacctaacaagcataacaggttctatattgacgttcagcctttagacaagcctctttatgatgccttgattgaaggagacttgaaggaaggcagaattaaaaccaaggaaactgctcaagacttcattgagcttggaatggataaggaagaggcaagaagggtatgggatgtctacaacaggtccatgtttatcaatatgaccagaggtatccaatacttggatgaagtaaaggagctattgcttgaaggttttgaagcagccttaaaggacggtcctttggcaaatgaggaagctgtaggattgaagttcatcctctcagacgctaagcttcacgaggatgcagttcacagaggtccggctcaagttcttcctgctatcaagaaagcgatttacgcttcaataatgtctgcaaacccatgtctattggagcctattcaaaaggttttcatttcagctccattagagtatatgggcaattgtaataaggacattcaaaacagaagaggtagaatcattggtcaggagacaaaaggagtcattgcagagatggactttgaagttcctattgcaaagatgttcggatttgcaggagacataagatctgcaacaggaggtaaaggtgacttctcaacagaaatgaaaggatttgaaaccttgccaatctatctccaggatgatattgtaagacaaatccgtacaagaaagggtctttcaccagagccttatggtccagaacactattctgcatag

SEQ ID NO: 1299 - DNA, 1986 bp, Methanobrevibacter ruminantium
  source 1..1986: mol_type = genomic DNA
atgactattcctgtaatgtatgatttggatgaggaacgtttaagagccttaaataaagatgaaaagaaggaagataggcttttttcaatcagccttctaaatcctttttatcctcttgactctttagtaactgatgaagaggaggatttagacattcgcatagctgctttagactgtcttgatctatttggagtcacattataccatattgatattgacagcgttccaaaggagcttgctttagctgttatagaaatgcttgacgatgggtctaagctaaaagaaatagctttaaaccataatgatattgattatcgtattaaagcattggaaaacaaacatctaactgatgaagatgccttaaaatacataattgaaaatgaatcagcccccaaattgcgctctcttgcagcttgtcacccttgcttaaatgacagcaaatttttagaaggccttgcattgaatgatgatgatgaagatgtccgtgccgctgcagtttctaactattctacaaagggtgtggatgttttaaagaaagtcattagtgatgatgaggatattgttcgcattcctgctttaaagaacttggtttttaaatataatcttttcaatccttccttaaataagaaatttaactttaaaaagaaatttcatgacatgtcttggcatatgattagctctatcgatgattatgtccctaaggaaatggataatgatgagggaataagggatctgattgactttgagctattggatcagatttatatttcttcagctaatgaatgctataatgaattgatagataagcttaaaatcttttttgaaaaggccctttaccattatgagattcataatccatttgatgagagtaaattagagaatgattcctataggaaaaaaatgtatgacaagctaaagcttgcagaaggtgaccaaaggagcttttatctctatcaaatggcatatgatggaggacatgcttatttgaacttttatttggactatctaaatggtttggattatgattcttatttgggagattctgatagttctaatgaagattcggatttaaaaaaactgtttaatgagtctaatgattcctactctttagataaggagattgaagagtcttacttcattgatttggcatatgccgattccaattgtgaaatggttagattggctattgaagcaatatctgacaattctgtattgtttgactttgcaaagaatggaaaaacaagtgatattcgaaaaactgcaatcaaaagattgactgattcagcatatctactagatttagctgtcaatcaaatcgataaggatattagggaagctaatttctatgatgatgattggatatgcgattatatctctgataattcaaatgattactttgatatctttaatacttatgacttttacagtcatgacctagagcattacgagcgtctatttgacaataggctggattccttttattatgaaaaggtagcttggaactattatagaaacaccatttcattttgtcttcttgaaaggatagacaactatctggatttggtttatgctataaaaaacactcgaagctttgttttaagggacttggtgatttataagattgaaaatccattgtttctaacagatattgcattaaatgcaatcgatgaacgcattcgctatactgcattcggcagaatagagtcaaaggcattcttaaagtatgtctatttgaacagcaatgattttagaataaaattattatatctttctaaaacaactgataatgctattctggaagaggccttcctaaatgaggaaaatgatgtattaaggaagtacgttttggataattccaattttaaaatcagtccaaaggtgattgagcactgtattaatgaagagtctgttatttccgattatgcagagaataagtttgcagagcagtttgttaattacaggctgatggataagaaatttttatag

SEQ ID NO: 1300 - DNA, 372 bp, Methanobrevibacter ruminantium
  source 1..372: mol_type = genomic DNA
atgggatttataatgattattaataaactatttaatatgaatgaagataatgaaatttatttagtaattatacttgtattagctcctttaatcttttctatcattgattttacaagctgtttagtagatcatggagtaataacatggtttaactgctatacatttaagacatatatttgttttattccaatattgcttatttgttctattatagccaaagtgatttggagagagaaaagccttaaagatgtccttgagatagcatttgctcctttgtttttctggctaattgaaataggatttgcattgtttgtcagtttattcattggagtatttattgatatgattatagggatagaagctatggtttga

SEQ ID NO: 1301 - DNA, 477 bp, Methanobrevibacter ruminantium
  source 1..477: mol_type = genomic DNA
atggctaattggtgtgaaaacaaattaacagtaaaaggaacaagtgaagaattagtaaaacttatagaagaacatgtaattgatggagaattgtcctataagacatttgcaacagaacatagattattcggtgaaaatcattttgaccttgatgagatcttaaatgaaagaataagcgaaatagtcttttggttttcaacaaaatggtcacctgtccctgcagagaaagtttgtgaagagataaatcagacttatcccacccttaaggcagaattatcattcttttcagcagaaagcggattttggggacaatatagcgactatggcggtgaggagtattatgaactaaaagaagaggatattgaaaaaacaagtgaggaattttttaaatttggacttgaagaaggctttttagaaaaaacagaaagtggaaaatacgccttcacccatgatgtccctacttttagattattatga

SEQ ID NO: 1302 - DNA, 4764 bp, Methanobrevibacter ruminantium
  source 1..4764: mol_type = genomic DNA
gtgagccttatggaatggaaatatgcaactatatttataagcagcagtttcatagacatgcatgcagaaagggactaccttatcaaaaaggtcttcccagagctagaggagtggtgcgaagagcacaagatacacttatcaaacattgacttaagatggggagttccagaagaaatctccaacaacaaaagcacaatcgaaaagtgcctaatcaatattgacgaaagccgtccattcttcttatgtttcctcgctcaaaggaggggatggattccagatttcgctgaagacatcagcgatgacactttcaaaagatatgaggagattgcagcctatagcggtctttcagccactgaaatggaaattgagcatgcattgctttcaccgttaaaagactttttaaatgatgacgatgagcttccagagaatctacgtacaagacattccctattcttcataagggacaagtcctcattggatgaaatcacagacgctcaaaagagggtatatacaaattacggtttggtagatgctgaacatggagagtttatccctggagaatatgacagcgaaggcaattgcataagggaacctaagataatagatgacttgtccttaaaaaccaaggaaatcatcgaagatgccgacaattcctctcaaaagattgttgatagaataatcaaaatgaaaggggactgtgatcttccagaggatgaaaagaaggttcacattgaaataacaaagtacactggggattggaacaggaacttgaagattccagaaattgaggctctcaccaataaggataaggacgatccagagaaaaaggtccgccgttacaatgactatgaatggatgggcaggctaagtaattttaaagaggttaaagaggattataaggatataagtctaatcaagaaatctgaaaatatagaatctaaaatcggcaggccacttaaggatgtcataatcgaacagatgaagagacagttggaattggaattcccagaaaactttaaggaggatgaggacctaaccgaagaggaaagaatcctccagaatgagttgaatcaacaggataactttgcatatcttaacagccaaggctatattccaatcaaaaaggacacagacatattaagcaaatacattgaagacgccgatgaaagcaggatatgtcttgtatcctctgaggcaggtttcggtaagactatgcttcttgcaaacttggccattcaacttgagaagaaatatacaaataaatatgatgagacaaggccaaaccaaaaggctatctataagagattctgtggagcttccaatttaagttcaaaggcattctctctatgggatacaatcattcaagaagcaggtttgacagaggatgatgatttcaagattccaaagaatttggatgagctaaagaaatccatagataagattcttgataaaatttcccagaagggagagtctgtaatcataatcgatgcagtcaatcagatgcctgacggcttagagatgctaaaatggctccctgcacctgaatcatctaatctaaagataataatatcatgtaaggaagataatgaagataaggaactatgcctcgaaagcttaaaattcataaaggatagaaatgcaatctgcccttactttgaggacggtcatgaggatgagcttggaggagaatataagaactatagctttgagcttaaggccttggaggattgtaagaacgaaaagactaagataatcaatgcatatcttaaaaactacttgaaggagctttctaataaggatattgaaaccatatgtagtttcgatgcatctaaaaaccctcttttcctaaaggtattgttggccgagcttagggtatttgcctcatttgaaaagctaagggatgagattcaagagtttattaaggatgagtttgcagatgaatctaaattgacttctgaagattcttctaatcattctgatgattctgaaggctctaaaaagcaatctcaaggttctccaaagacagcattcaaccatgttttggaaagattggagcatgacgaggaccttgttgaaggtgaagctcttgttcctttaatctttgcactgcttgcaaatgcaagggtgggattgtccagggatgaaatggcttccataataaaggccgcaaagcctgatttggatgatgaatacatcagagatacaataaaccttaacctaaggcaagtgaagccattcatggcaagaaaggaaggaagggacgacttcttctatgaaagcttcaaactagctgcacaagaaaggtatgctcctaaaaacattccaaagaatgagcgtttgaatgaatactttaaggataaggaagattctgataagttaatcaatgtcaatgccttgcttgcagattatttcttaaaagatgctttaggtcaagattcggcggattctaatgataaaaccctagacttaagtactatagatggtttcaactttaaaggggaaaatatccgctcatataatgagcttccataccatgcaaacgagtcaagagactttgacagattgaaagatatattgtcttcatactcattcattaaaaacaagatcaatctaagcgacatcaacaatcttattgttgattatcagttcaaggactttgaagatgcccaacatccattcataaaggatgaggaggaccattcaatagtcctgataggtcgggcattggaactctctgctcctatcctctctgatgataagtctgagcttcctgcccaattatatggaaggatggttgacttaagggatgatgaagtgataagtccacttatagatgaaattgaggctgattatgagatggtcttaaagccaaaatccaattccctttactctccaaagagctcaatcataaaaaggccaaaggtgaatggaacaaaatccacatcaagcattgaaataaccgatgataaattgcttatctctgcaaatgaggatggaacattaaacctctttgaccttgaaagcaatgacttggagattcttgaagagcctcatgattctaaggtaatcagaataataccaacagatgaaggccaaaatatgctgatggcatcaagcaatggccaaatcaataaatgggacataaacaatcgttcaatcttcaaggatgacgataacatttatccaaaaataaatgccaatatcacagacatctatctctctggaacatataataagatttatgcatcttcccatgagggaatattcacaatagacctggatacaaaagagctatgtgaagaaaaagagatagagcataagaaatataatcaaatccttgttccaagaagaaacgaggcaatccttgtctgtgacgagaaggaggttgacggctgggatgtctatgaaaagagaaaggcatataacaggcagcatcagcaaaatcctgcaggagaggaaagctccacccaattggattcatcagaggaaataaggtttatgggacttaataagagattccttaccttgatttctgaaaacggacagatgaagttctggaacacccttaaaaactctggcggtggagaaagcattgatgaggcacaggtatgcagccctcacgacaagttcgcccaagctatcacattagagaaggaggaccagataataaccatttcagatatgggagtgctaagggtctggaacattccaaggccaaggcagcctaagtttgaaatagctaaaatcgaaggctcagacattcctatggacattcagacaggtattaagtcacctacagctattgactatttcactgatggtgatgagagatgggtcattgtagctaatgagaacaatgacataagcgtaatcgacctgaataagaaagtggaagccaataaggaaactaaacatagtgagtctgtattgtcaataaaaatagatggaaatcatatgattacagcttcagataatggtgaaatatttgcttgggatttaaataaggaagaatgcattaataaatttgcaagtgaattcagagtcaattctatttcatatgatagggacaagtcacaattgctcttatcaggtgtaaagaaggagaaagacggcaataagatatataagatagctagccgtgacgctacagatatgtgggagcctattaaggtccaagatgatggaagcgattctaaaaagtccaaaaagcttattgacttaaatgctgatgatagggacaatcctaatcctgtcattgatattgctcaaatcagtgatggaatggtattcattgaagagaaaaagatttccatgcctgattatgaggcaggctttgataaaaaggctacaagcttagctactcaattcgactccaatctagcatttgtaggatttgaagacggaagcattagttcatatccaagagaaacagaatttgatgcaggaatcaattctccagttgttaaaattagagtaagtggcgatagattagtcgcaggatttaaggatggatctgttgtgatatttgacttaagcggtacaaaaacagcaagctttaaggctcatgataaggccataacaaatatctatcttgatgagtccagattaatcactatttcagaagacaagacattaaaattctggaagaatgatgagtgcacttatacttacttcttagacatatttgcaacatctgtcagtgttaatgatggcaaattgattcttggtgacactttaggtaatttaaggttctttgaattgtag

SEQ ID NO: 1303 - DNA, 2286 bp, Methanobrevibacter ruminantium
  source 1..2286: mol_type = genomic DNA
atgatgagacaaattagacgaaatacaattgattttgcaattgatctaggaacaagcgactctgtaatagcttgttttaacggtcaagagtctgagattataaaaaatcactctacaggtgaggaccatactccatctgctgtttatatagacagtttaggtgaaatccacgttggcaggattgcaaaggaagctgtcttaaaatgtccttctaatgccacaagtgaatttaagctcaatatgggctttccaattccatttttatttgaaagctcacagattaagatgtatccagagcaactgtctgcggaacttctaaaggatttaagaaaatccatctatcaccaaacaaaccaaaacattgaagagattgtgataacagttcctgccaattcaaatccccttaagacaaaggcaactaaagaggctgcagagctagctggattcaaatcagtttatcttattttagagcctgttgcagcagccatcgcctatggattaagggcaaaaaaagaggatactggtatttggatgatctatgatttagggggaggaacatttgatgtgtcccttgttaaggcaaatgggcaggagatagagaagcttgcaacaagcggtgaagacaatttaggtggaaagctctttgattggaagattgtagatgactatttcactccaaagatcattgatgacttgaatctgactgactttagaagggacaatcctaattatcttaaggtattttcaatacttaaaaatgaagctgagaaggctaaaatagctttatctggttctgataatgacattaaagattatgaactttctattgaaaagcttatcgaaataggggacaaatcatatgactttaattatatattaggcaaagaagatttaatgaatataatgaagccatttttaaaaatcacctttaatcattgctatgaggtattggaagaaagcaatctttctattgatgatgttgaaaagatcattcttgttggaggttccacattaagctcaattttaagggacagcctaaaagatgaattcgataggccattggaatatggaattaatcctttgactgtcgttgcacaaggtgcttccatttatgctggaaccatagaaaaacaatttattgaatgtgaaaatcacagatttgctttaattttggattatgaaaagataggttttaaggataatattgatattaacggaaaggtctttgcattggacgagaaatattcatttttggattattcaattgagattacaggctccaatggagaaatcatttatattgaggactctaaaactggaaatcctactgaaaggattgatttagatatagatggcaatttcagacttaatctgaatgtaaaagatagctataatgagtttttaatcaatatctatgacggcaatggggatcttgttgaacttgatgaaaattctccaaattcaattcattataagaaagccttaaatccaggttatcctattttatcttcctcaatcagtctttatcttgatgaggattcttcattgatattaaagaattcagaggacttgattgatcttgacacagaaaatgactttataattgaatattctaaaaggttcaactcttcctatcctattgcatctaagggggatataatcccaatgagcagaaaagagattctacacaccagtaaaataatcaaaaaaggagatggtgacagcttcattaaattttcattctattttggagagcttattctagccaattataataccttattgggacagatagtcatcacaggcaatgatattattgatgatttgcctaaggatagcgagatagaattgaatataaatataaacgagtctaatatgattgattttgaagtatttattccttatttaaggcaaagctttaataattcatttagcttcaataattacaataattataatggttttattgataattatgataatttaaagagcaagcatgatgagattataaaaaaatacaataaaattagggattttgctcgtgatgaagataaaaaagagctttttttaaaaaatggcatttatcaaagcatagagagagtctatgagaatattgaagagatagaggaaaaggagataattgattatcttgatatattggttgatatggctaggtatgataagatagctgtttatccatctttagagtatttgaactatttggatgatgttttagatgaatgcaagttctttttgaccattgcagatgtggagctttctatttaa

SEQ ID NO: 1304 - DNA, 1659 bp, Methanobrevibacter ruminantium
  source 1..1659: mol_type = genomic DNA
gtggttctcttgaattataatcaaacaaaagacatgatagaagattatttccatggccaatatgaggtcttaaagtttttaggggaaggatcattcgctcaagttttcctcgtaaagcaaaacttcctaaacgataaaagagccatgaaaataatcaaagaaccactttcaaataccaaaaatatcgaccatatctttcacgaagtgcaaatagcaagccaactccaccatgagaatatattggatatatatgatgccggacttatcggagatattgcatactttgttttggagtatgtttccggcggagaccttgaggactataggacttcatatcttaaggccaacaggccaattccaatccatatttccttggatataatcaagcaaatccttatggggctaggcacccttcactcttcaaatcctatcatcatccatagggacctaaagacaaagaatatccttatgaattatggtgatgaaaggctgattgttaagatatccgattttggctttgcaagggagctcagttcaaatgcagatgattttgaggtaggtggaaccaagccatatatggctcctgaatgctttaatggagtgttttcaacaagaagcgatgtatatgctgttggagttatattctatcttcttctagcaggtgaatttccttataggctttctgattatgtcattggtgatatagttgatggaaagccatggaagattgatttgaagcctcctagccattttaatcaaaacgttcctaagtttgttgacaagcttgtattgaaggcattggatgtcaatccaaacaaaaggcatattgatgcaaaggactttgaaaatgatttggataaggcaattgaaaaatttaaggaatattcttattataaggagtatttgaatgagcttaaaggacttgaagaactggatgaattagataatttaggaaaattgggagaattaggtgaatttggcgaattaaaggaattggaagaatcttctaggattgctgaattaaaggaatcttctaaattaggggaatctaataaggattctaaagaccaagaccatatcctaaatgacaatattctagaggcattcagattggctaaaacagaggatggattggatgaggcaagttccattcttgaaaaggaagtcttgaaggattatgaaattagaaaaacctatggaaaaactcttaggttatggaaaggggattatcccgatgccaaactaatttcagaggctttcacagttacacttaaaggagaaaattataaattggctattgatcttttaagagaagcctttgcatataatcctatattgaaggacacttacggttactacatagatttatggagtatttttatagatttaaataaaaataaggattttattatatctattaatcgattagagaatcttatggatagaaatgataagataagggatatttataaggattcaatagacacactaaaaagctatgatgaggataggattttgaatgaggcaattgatttggctgataggggtaatttgatagatgcttctaagttattggagctattggtagtttatgatgatgaaataagaaaggattatgcttataaattgtccttgtggaaacaggacttgagtatgtga

SEQ ID NO: 1305 - DNA, 1146 bp, Methanobrevibacter ruminantium
  source 1..1146: mol_type = genomic DNA
atgaagaaaaagttagaatatatacaaactgaaaaaataaaaaacaagaactatgaattttatcgcaacatagaaaataacaaaacagtgatttttagaaaaacaaagtttggaaaaagagagaaagtcaatatcatagattcagatgacttgacagagcagataattaatttatcatacaataaatcttctagaaataaaaaaattcaattcccttatgataaaatctgcaaatttgtttttaaaaacaattttcaagcatgcaatatagtatttaaactaggtatagactttaattattttttagatactgaagtgatcaatcagatttttgaatctacaagatcagacatagtcatttgtgcaaaggaagaaataatatatataatagaattccaaaaggataagcttaaaaagaaagataaaattcggtttggaaattatcagaccaatcttcataattattatcacggccgaaaagtaattgtttttgttattagttttgaccctaatgaagaattgggagacattccctatggatatgataaggaatatgggtttactatgcatgtcaaatcgtttaacgagcttgatgcggaagaaactataaatatcataaataaaagaattagaactagggctaaaataaattttattgatattgttttattgcattttctaccatttatgaagtctcataggtcccaagaagaactattaaggatagctgtggatttgacaaaccaaataaggaccttaaacgaagataagatcttggagttaaaaattacacaaactgtacttgcacaagaaattttaagtgaagaagaatttgaggaattattcaaggtgataaaaatggaagacactggattagttgaagaagttagacagctctattgggaacataaaataagaaatgacatgaatgagctaaatcaaatgagaaacgaactcaacgaaagaagcaaccaactcaacgaaagaagcaaccaactcaacgaaagaagcaacgaactcaaagaagaaggaaaaatagaagttgcaattaatttactaaaactaaaacaaccatttgatttaattgcaaaagctactgaactaagcgaaagcaccatcagaagccttcaaaagacaatattataa

SEQ ID NO: 1306 - DNA, 804 bp, Methanobrevibacter ruminantium
  source 1..804: mol_type = genomic DNA
atgagcgaagaggaaattgactatacagaatttatagactttgaggattccaatctgatttcatttaagctggcagcaatcaacaacaaggtcagattttccatactcgaaatattaagggattttcaaaagctcaacatgaataaggacaagacattcaaaaaagacccttattactctcgcgaacttaatgagattcttttaaagaaatatgatattaatatttcccttcagatgttaggccagcatatgaagcagcttttgacagctggcttgattgaagaggttcctctaaagaaagaggttcctaataagataggtgccagaaacgtcaagggatatatcctaaagcctgatgcctttgaagagctgtttcttgaaatcaacttcctctcagatgagctcttaagtttctttgacttatataagataaaccaaaagttccatgatgaggactactgcatattgaccatattcaatggagcagataagggcaagacatttaaggtccataaggatgatacagtccttattggaagaaaagcagatttctcaaaaggagatcttgcctcatttgcaatacttttagacaatagctatactgcagtgagcaatgtaggcaaacctcatctaaagttattctataaggatgacagttggtgcatattggatgaaggaagtacaaacggtacttttatcggacaaaatgaagttgccactggcagaataactcctttaaagaagaattcatttttaaaattatccagaggtgaaggaggagcagttatttactgttctttctaa

SEQ ID NO: 1307 - DNA, 771 bp, Methanobrevibacter ruminantium
  source 1..771: mol_type = genomic DNA
ttgaatattaggccctcatattcatatgcaagtatcttaaatgtctttatagaagaaaaatacaaagataatctagggtgctttcgaaacactaatttttatgatgtattagatttccaatcagatgattcttctttttactatgatatggcttttttcagcttctattatggggactataagtcatcattctttctaagccaaaaggccatgattttaggtcatgatgagggggacttgaaattattgcgtcttgcagctttcaatgaattgtctccaatcaaaaaactattatttgacagtataaaagaagagttctctaatattatcaaggaagacgatgaggaactgttcttattttatcttgaggacatgcattatttggagattgccttaaatcaaaaggacattaatgttgaagaggactttctaaatcttatttcaaatttatatattcaagtgaaatatatggattatgtggattattatgcaatgatcaatctatatcagttcttttatataaataagttttatagcgaggcattgcttcttataaatgagattctagctcgcaatctaaacgtatttaatttaaatagaaagttagatgtattgtttaatataaatgacattcctggagcatatgacgtctatcaggatataaggctattggatcctaattattttgattcatctccaaatagggaagagatgtatctggaagtgtttaccgaacatttctttaaaaatagtttgggtaagttagaataa

SEQ ID NO: 1308 - DNA, 717 bp, Methanobrevibacter ruminantium
  source 1..717: mol_type = genomic DNA
atgactaatttagaattaaatatcctggatttaagcttaaatgaacttttaagaactgtaaataaaacagaatcaattcttaaagaccaatatgatgaaataaaggaattcagagacattatcttaactgctagaaatttacgctttgataatggaaatgatgcaaccatctttttagcaggttctggcaggtctggttttgtagctaagttctttgctatgagattgatgcatttaggctttcatgtatatgtttttggcgaaactttagttcctcctgttcatgatggagatataatcttattcatatcaaaatcaggtggagagaatgctgtaaccgattcaatcgaatccaccaagcttgaaaacattaaaaagtccaagagttccccttcaaaaaacaatatgatctttgagaatgtaaagattctatcagtttgcggaagctttgactgttacttggctagccactctgatgctaagattgtcattgaagcagaaagggatagaaaatccaccaaagaagagtctgaaagatttgattcattaggatttaactctaatgagcttgtaatcatgggaactggatttgaagactctgcattattgattcttgacgctttagttgtagagatgatgaacaatctaggtctttgcgaagaggacttggaaaacaatcatgagaatattaataggcctaaagtgtctaaaaaataa

SEQ ID NO: 1309 - DNA, 1113 bp, Methanobrevibacter ruminantium
  source 1..1113: mol_type = genomic DNA
atgtttgaattaagtggaaagtacaatacagctaaagtctttgcagacaatatagacaatgacagcgtatctcaaataattcaatttctcaatcagcctatagctaaggaccaatccatccgaatgatgccagatgtccatgcaggaagcaattgtgtaatcggaaccacaatgacaatcacagacaaggcagttccaaaccttgtaggctcagacattggctgcggtatggaaacagtctatcttgacacagatgaaatagatttcaatcgctttgatgagatagtccgcaaatacgtccctcatggctatgacattagggaaaatcctcatccatacataaagaaactaagactcactgaaatgagatgctatttcgatcttgaagcaggaagccaaggcaatttttccttaggaacccttggaggaggaaatcacttcattgaagttggaaaggacaaagaggaaaacttagtccttgtcgtccacacaggaagtagaagaatcggtgcagacgtatgcgaatactatcaaaaccaggcattgaagagctttaaaagaatgcataagactgcaacaaacaaggaactcatatactgtgaaggccaattgtttgaggactatatccatgacatgaagataatgcaggaatttgcaagctggaacaggaaggcaatcatcgaaaccattctcagccattatggaatggactatacagacagctttacaacaattcacaattacatagacacagaccataatcaaatgatcttgcgaaaaggagcggtttcagcttacaaaggagaaaagctattgattccaattaatatgagagaaggttccttaatctgtaagggaaaagggaataaggattggaattgctctgctccacatggtgcgggaaggctgatgagcagaagagaggcaaaggacaagatctctttaaaagaatatgaaaatgcaatgaaaggaatttttacaaattcagtaaacagaggaaccattgatgagtctccaatggcttataagccaattgaagccattgtaaacaatattcaagacactgttgaaattattgatattattaagcctgtttataactttaaggcttaa

SEQ ID NO: 1310 - DNA, 735 bp, Methanobrevibacter ruminantium
  source 1..735: mol_type = genomic DNA
gtggaagttgaaggggataaaatgaatttcaaggaatttgaagaattaataaatagcggagtaaaggagatttctctaaatgaagatataagtttggaggataagacacaagcgcctattgaaatcaagacagatggcttggtcattgatggaaaaaaccatatcatcgatggaaataacaagcttccaatattatatataaaagcctctaatatcactttaaaaaacatcatatttaaaaacggattctcagaggactatagcggtgccataactaactattccaatgacttaaaggtagagcactgccaattcatagataactctacagaaaatgcaggtgacttgtatgggggagccatctacaatggagaaaactctaaattgactgtggaaaagtccatatttaaggaaaatgattcagactttggaggggccatttttattgattcagattcaacagtaaagataaataattctgtatttgagctcaacatctctgaattcgatggaggagccatttacaataagggagaattgatcatagacaaatccatattcaatcagaacatggcctttaagggaggagccatctttaatgaaaacagtttgactataaatgattctcattttaaaaacaataaagcaagcgatggaaatgacatacagacagaaaatgaggatatttccatatcaaactctctttgtgagtttataaataatgataactattga

SEQ ID NO: 1311 - DNA, 1113 bp, Methanobrevibacter ruminantium
  source 1..1113: mol_type = genomic DNA
atgaattttacggaatttgaagaattattgggcggcgaagcaaaggagatctctctttatgaggatgtcattttagaaagtgatgaagattacagaagaggcattgaactcaagagagatggcttagtcattgacggcaagggacatgtcattgatgcaatggaaagggcaaaggcattccatattcaaggagataatataactataaaaaaccttaagtttaaaaatgccgtttctcataagggcaatgggggaggagccattgagaatgtgggaaaagaattatccataaaaaattctcattttttcaataattgttcactgggtcctcttggcggcggagctatttgcagctttgaagatatgaatataaatgattgcatatttgaatctaacacttcagtaagatctgatggcggtgcaatatatttggagactttttttaagcctaatgtaactgtcataatgaaaaattgcagctttaaaaataattatgcagatggcgggtttaaggattttggctctaatgccggtgcaatatttaataaaaacgctaatttatatttatttgattgcaattttgaagataatggggtggtgagcgcttatgattcaagcagtgaatcgattcaaaataaaaatggcattataaccatggacaattgctgctttaataccagagagtcccattccatattcaatcttggatttttgttaatcaatagttccagattttatcatcatccggaaaatcttgaaattcaaggttcgattttcaatcgaggctttgtaggattattatatggggaaagaaaccaatataaagtggaattagatggaaaggtactggatagctcagatattggtgatttaatcaatgagtataagaagacatacaatctcgatacaaaagaagttggcttcatctttaaaaagaatattattgaatccattaatgatttaagttcggataactttaatttagaggatttcaatttaggcgatattaatttatctgactataaagatgacgaatatttgatggatttattaaaaaataaaattgatttgatttactctggagattttgaagactctgatgaatctatttaa

SEQ ID NO: 1312 - DNA, 411 bp, Methanobrevibacter ruminantium
  source 1..411: mol_type = genomic DNA
atgttatattatcgtggagcaggatgggccgattgggatttggataattttggaagcagaatatcatatattgacgattttccatttaatatcttgaaggctctcttaagctattttgaaacaggtgatgaacagtctgtcgaattcaatgcagaaggatggttttatactttcaagttctcttccgatgtcagagttggtgagagagtgatatatgaaagcactattgattttgcaaatgattttatctgtgaaattgaggaaagaatgggcttatgggctttttttccatcccgaagaacaagtgatgaagactattatgaattggtggatttaatcgtcaaaatcaggacagaactattagataaggatctaataaataaatggattgatataatttcacaatcttaa

SEQ ID NO: 1313 - DNA, 1761 bp, Methanobrevibacter ruminantium
  source 1..1761: mol_type = genomic DNA
atgatgggggattatatgaatacggattatcttaaggaatttgaagagttgaatcacactacagaaagcctatttgatttgggaatctctgggcttttaatcattttaaaggacggaacaaatctgaccagctggagtgagctaagcaatcctgatgatatcttatatctaagtgcagacttccggtgtaaggaaaattacactgaatttagtaattttaaaaatgcaaaggtgcttatcctacagaattatgtccgccccaattttggagtgggcagcttgtttttcaaagaggcagatctaattactaaactgtctacttggcattcattggtggctttctatggaataaactgggacatctccagcactgattctttaaagaatatgtttgccaattgcctttcattggaatatgcatattttgaggattgggacacttcccatattcgtaacttttggggaatgtttgttgcctgctgcagcttaaaggccatagatggaatggagaattgggacttgagctctgcagagaatatggaatccatgtttgagtcctgcatgtccttggaagacatttcattcctatctgactgggacatgtccaatgtggaaaacatctttgaaatgtttagggattgctatagcctaaaggatgcaagctgcttgaattggaaatttaagaatctaaaaaatggtgacaatctatttgccaactgcagaaagcttgaaagctttccaagctggtatgatgatgagttcatcaatcaattcggcatcagaaatcagctaaaccttattgatgacgattcatttttctataagattgcagggggattcgacccccaggacattttcatagcagtaggatatatcagggatgaagaatgcctgaaaagattgcttagagattcctctgtccatttttatgcaagaagggccgctcttttaaatccaaacttaaatgacacagagattttagaggaatttgcagatagcaaggattatgtggaaagggcctatgcaattgaaaatcctaatttcaccaatattggaatcataagaaggcttgccaataatgataaaagtcatttggtccgcttcaaggcagagaataagttaaaagagcttaaaagtgaaggacttgaaataatagaggattatcctagagagttcaagcaagcctttgaaggtcatgacagagaaagggcatctctagtcttatcccaatggagaggatatgattccacagatgctaattttattctggccaaggttatttcagactcttcagatgaggaaatagaattcagcgaaacctttgaagcctatattatatcaatggaggaaaaaccacaagacccatcattatttaattggtttagttccacagctgtagaatgtatggaaaaaagggtggatgaggatattggattctcccagttgtttaacaatatgtataagtcacatatgaactcaactgattatgcaacggcctttttagactttttccaagatattcttgaaaatgatcgcgtcgaaaagttgaatctgcttaggggtctagttgattcttgggatactgactgtcctgatgacgccaatatgcactgcgcttatgttattttaaatataaaaaagatttctaaagatgaattggaggatagaatagcgaaggctaaagtttgcattccagaaaatttgaattcatatcctaaactgatggcctttatgaatgcagtattggaggcagataaatag

SEQ ID NO: 1314 - DNA, 945 bp, Methanobrevibacter ruminantium
  source 1..945: mol_type = genomic DNA
atggaacttgaagaaagaattgaagaagctttagaatatattcaaaatgatagcaattatgcattggaacttttcaatgggattctaaaggaagacccccataatataaatgctctcaatggcaaagggtcagcccttatgaagctgcatagaaaccaagaggctctagatgcatttaatgactcattatccgttgaagaaaatccttctgcatatctcaataaagggatcatactgaaaatcaatggagactataggaatgcattgaaatcctttgatagggcattgaactataatccccgattggcttccattgtgagtctgctcaaaaacgaaatactggaaatctttgagaaggaatctacggatataagtttgctatatgatttcaatgaaagctgtacagcactgattaaaaaagcttatggctataaaaaccaaggccttctctgggatgctctagactgcttggaggaagccgttaaacaagatccaaaatctgaaaattccataaatgacatcattaaaaaacttattttaaccatcaagaaagaattcttatacaaagaaataaattccaaaagcaccaaaatcgacaaattgaaatttcaaacaattaaaagcataattgttgaagacaatccccataaaacattactgcttacaaataagatatttgaaataaatgaaaatgatttagatgccttaaactatcagggcattgcctattttagcttgggagaatatattaaatcgatagaatcatttgataaatgcttatccattaatcccaattatacttactgctcatttaataaaggactcgttttaagaagaatgggactcttaaacgagtctttagactgttttaataaagtgatgaatgaatctgattttttaaataaggttaagccatttcaagaagaggttttaactaagatatag

SEQ ID NO: 1315 - DNA, 603 bp, Methanobrevibacter ruminantium
  source 1..603: mol_type = genomic DNA
atgaaaacaatagcaaagcctttccagaattcaatagacataaagaaatctcaattcatctgtcgcctttttcctgcacagactgaaaaagaggctaaagatattataaaagagatatctgaagagtataaggatgccacacataactgcactgcttatgttgtaagcgatggggaaggctatgatgataatggagagcctggaggaactgcaggaaggcctatgctgaatgtcctaaagaaaaatgagataaataatgtggttgccattgtcacaagatatttcggtggaatcaagctaggagcaggagggcttgtgagagcatatagcaaatctgttcttgaatgcttggcaattgctgagatagttgaaatggaactttatgaactctttaggttcacttttgaatatcaggacattaaggcaattgatgctgaggttagggccaagaatttggctgtaattgaaaagcagtatgaagcacaggtcatttattttgttgcaacagataatgttggcattgttaaaagcgttcaagataaattggctaaacaggtaaaaatagagcatctaggcagcagatacttggaaaaaatagtttaa

SEQ ID NO: 1316 - DNA, 510 bp, Methanobrevibacter ruminantium
  source 1..510: mol_type = genomic DNA
atggaagatagaaaagcaaaatttatcgtttatgtcgttgtatgcttacttgcttttatctgcagcagcacagtcttctctatgactggcggtctttctgattggattgtatcaaatgtaaacactaatgaggatgccaataacaatggctatatagacagcagcgaaggacaatattattctgactctgacggacaatattattccagttccgactcctatgacaattcaaatggaggctctggatttttagatgggctcttttcaagttcggacaattcagaatcaaactactattcaagctctgatgaagaacctgattttcttgcaaggctcataagggaattcataggtggcagttcaacaacagacagttattatgactcctctgattcaaactactactatgaggacacatcaaatggatatgatcttggaaatggattctcatatgatttaaatgaactctttacaaaaacagacaataagcttaatcagttgtttaattaa

SEQ ID NO: 1317 - DNA, 3513 bp, Methanobrevibacter ruminantium
  source 1..3513: mol_type = genomic DNA
atgatagttttaaacaaaagaaagaaatcttgggaaatatatcctattggaagtcctaaaggagctcttaatacaaaaaggcaggctgagtttgtaggcattctccgctttatggaaggggaggacggattatcaatcaagcgttttctaattaaaagcgataaggaagaaaagcctcttgctccttctaaggcgatcaatttattaagatctcaagctgttttcttggcacaaaaagatgatgaaatggaggcattccttgaaaagaacaatgtcaaggtcagatttacaaacatctgtcagcattgtagttatgaaggatatgtgaccattataaactcagatttttcatataactatcatgatcagctcatctgcaaatcctgtgccgaagagacaatcaagagagagcttcagcttaggggatatgacaagaaggtatttagaaacttcaagaaggtccttgaaaagactggcagcttggatgatgttttagagatgctttcaccaagatttgaccctctcgcccatacagacttgactttatttgacaccataaaggttcatgaggataagatacctaaaatcgcaatgaagcgtcttaaggttccaaaggaatttagggatgttctcctcaaggataaccaatatctcctgccggttcaataccttgcaattagggaaggcctccttaaggatgagaatctcttggttgtttcagctaccggaagcggaaagacattggttggagagcttgcaggggttccaaaggcattgaatggtaagaaattcctctttctgacccctcttgttgcacttgcaaatcaaaagtacagagacttcaagaagagatatgagccacttggccttaaggttgcaatcaaagtggggatgaacagaatcaaagcaaagggagagcttaagcttccagattcaaatattgccgatgcggacattgtggttggaacatatgagggtattgattttctacttagatcaggcaaatcagacctcttgaatgatttaggccttgttttaatagacgagattcatacaatctccgatgaggagagaggtctcagactcaacggacttataaaaagaatcgagcatctctttccaaacacccaagtgattggcctctctgcaactataaaaaatccaaagactttggcacaggactttaacatgaaactggtccagtataaggagcgcccagttcctttagagagacatatcgtttttgttaatggagatgttcaaagaagactgttaatgagaaaattagttcaaagggagttttactcaacatcctcaaagggattcagcggacagacattgatatttaccaattcaagaagaaaaacccataagatagctaatttcctatctggtaagggaataaacgcctccgcttatcatgccggactatcctactttaaaaaggaaaagatagaaaaggacttttcaaagggaaagattgcagcggtggtcaccactgcagctctagctgcaggagtggatttcccggcatcccaagtaatatttgagtcccttttaatgggaaacaaatggatttctccaaatgagttttcacagatgttaggaagagcaggaaggcctagctatcatgacaggggaatcatatatcttgttccagagattggaagtgaattcgacggtgaaagtgaggagtccgtagccctagatcttttagaaagtgatgtggagaatatcattgttgattatacagaagacggatcacttgagcagatacttgcagacatctcatcaaggtctttaactaaagtgagggatgtaatcaatttctataaggatattccagttccaattgatataaatactgcccttgaagaattaagggataaaaaagcgatagagatacatgcagatgatactattgatgtaactcggtttggaaaagcggtggctatgtcattcttgtcaattgatgatggggtaatcattaaggattccattaatgataagaattatttaagccagtattacagcaagccattctttaagaccaatcttagggagcttagaaggttgtccgataggattgatgaggagaatgaggagattcttaatagaaataggaagatacaacataagttggatcagttaaagaagaacgaatctcaaaagaaagaggataaggataaggaagataagactgataagaagaataagaagtctaaaaagaataaatctaagaagtctaaggattctaagaaggataaaggtaaagataattctaagaagtccaagaaatctgaggattctaagaaagataagaaaaataaaaataattctaataaatctaaaaaagataaatctgagaataagaataaatctaataaatctaataaatctaaaaaagataaatctgagaataagaataaatctaataaatctaataaatctaaaaaagataaatctgaaaataagaataaatctaataaatctaataaaaagaacagttctaataaggaatttaaggattctaaaaaagataaaaagtctaagaattctaaagacaataaatctgagagttctaaaaaggataaaaaatccaataaatctaataaatataataaatataataaatctaataaatataataaatctaagaaatctaataaaaataataagaattcaagttcaaagaacaaaaatgataattctaaagattctaataaagataaaactaatcataaagagtctaaatcagaatctaatcaatctaaaaacttagaaaaagacagccatcctatctctaaggactataagaattcaaatgcatctgtctctgatgatttaaaggactattctaaaaaagtaatgtataataaaagaatcaacatgtctaaaaagcagcataaaaccatagaagataagcctattcttgtaaacaagcttaactttaaggaaaatatatttagcgagatcaatccaagaatgtctaaaaaggaagtgaacgctaacaatcttcttaaggtccagtccatagcccttgacttggaattgtttgaaaatgcatatcttgctcctgttgttcataagcagatagtatctgcacttaaagtaaacttttccacaagattgttttcagaatcaacccttgatataatatcctctggtgaagccattgccaaattggatattaagttccaggatgctcttttaaagcttcagatagatttcttaagatgtgactgcaatgacaggccattctgtgaatgtcttcaaaggggaatttcctattatatattgaatcaaagattgaataagagggatcctattgacatttccaaatcacttcttaaggaatatcagattcaagcttatcctggagatattttctcatggctggatgcctatgtgagaaatttggatgctattaaaagagttgcacaggcatatggtaaaaaggacatagttaaagaagcggataaactaataaagataattgaaactggtaaataa

SEQ ID NO: 1318 - DNA, 969 bp, Methanobrevibacter ruminantium
  source 1..969: mol_type = genomic DNA
atgaacatactaatcaatggaactggagctatcggaatagggcttggagcatctatgatttcacaaggtgcaaatgtatctttctttgcaagggaagagactgcaaatgcaataaggaaaaacggaattaaaagaacaggcatattcaatcactattcatttggtccagaatcatttaaagtctacacagattacaaggatattccagataatgagtttgactttgtccttgtatcaagcaaaacaatagctaatgacgatataagcagaaagctaaacgaacacaagtccatcttaaaagaggatgctaaaataatcatatttcaaaacggctttgcaaatgacgaaccatacttaagattctttccaaaggaacaggtctactgtgcaagagtcattacagggtttaaacgcccagaaagatacatcagcgaagtcactgtccatacagaacctatattgcttggttctcttcaaaaggatgatgacggcgagttcattgacagccgcccagtctcaatcatttcaaagatgatcaacgattcaggaattccatctgaaaccactgaagaactggataagttcctatgggctaaaatgctttataactgctcccttaatcctcttggtgccatattgaatgggaattatggaaaactgatggaaaatgaatattccgttaaaataatgaatgagcttattgatgaaatatttgaagtaatcaaggcatcaggatacagaaccaattgggacagcccagaggagtatagggaagtcttctattcaaagcttgttccagacacttataatcacaggtcttccacattacaagacatttccaaaaggcaaaagacagaaatcgatacattaaatggaaaggtcattgaacttggagagaaatatggtgttgatgtaagtgtgaataagacaatttataatattattaaaacaatagagtctgaattttaa

SEQ ID NO: 1319 - DNA, 489 bp, Methanobrevibacter ruminantium
  source 1..489: mol_type = genomic DNA
atgataatagtcactacaatctgtgttatcttaattttgatagttcttttttatggattgttccctggattgacaaacagcaatgataacagtgacaataatctaattattcaaaatcagacttctcattttaccatagatattgaaaacggcacttatttaagcggagaaggcaaatctaaaatggtggattccaattattccacattagaatcctatgagaattttacgatttcaggctatgaggcctatgagatagaacttgacaatggctcttggtatatagtcagtctgtataaggtggattataatactccatctagcgattgggtatataatagtgatgtagatgaggatggaaacgcttatatcttcttcaatagcaaaggagagtattatggctactttattaacattccaagctctagcgatccttccacttttgagaatttaagctttttaactagcattttccattataatcattaa

SEQ ID NO: 1320 - DNA, 243 bp, Methanobrevibacter ruminantium
  source 1..243: mol_type = genomic DNA
atgtctgatgttggtaaaactgtaataacaactattattactttagtaactactgcatttggtttagtcgcaggtttagcatggaacgatgcaattcaaaaattaatcgactctgtaatgggtcctggagacgcacttactggattatttacttatgctgttattgtaaccattcttgcagttgttgtaaccattatacttgctagaatagcagctaaaatgggcgtagaattagaagaataa

SEQ ID NO: 1321 - DNA, 387 bp, Methanobrevibacter ruminantium
  source 1..387: mol_type = genomic DNA
atggaagagatagtatttaagccgatcggatatattaaatccaaatatgaaacagttgaaaacatgcctaaatccccaagggaaggcatggaggatgaggcagagctaatagtcaatgaagagtacttggaaagcatgtctgacatgaaagcaggcaaggagtatatggttatattctatttccataagtcaaacggatttaagcaaagggttccttttagaggtgacggtccaataacaggcttgttctcaacccatgcccctaataggccaaatcctattggagtttcaataataaaagtcaaggaaattaatggaaatgtgatcaaattcaatggtgttgatatgttaaatggcactccagtccttgatataaaagatgcttag

SEQ ID NO: 1322 - DNA, 339 bp, Methanobrevibacter ruminantium
  source 1..339: mol_type = genomic DNA
atgaaaagagtagttgcggtttttcgtcaacaaaagtttgaagatgtaaaaagagcccttcttgcaataggctgtgaaggaatgaccatctccgaagtaaagggaaggggaagacagttaggtgttaaagaatcatataggggctctaactattgcattgaccttattcctaagacacgccttgaattgattgtaaatgaagatgaccttgaagatgttattgacacaatcattgaaagtgcaaggaccggtgaaatcggagacggaaagatctttgtatccgatgtagaggaagttattaggataagaactggtgagagaggttctaaggcggtataa

SEQ ID NO: 1323 - DNA, 1212 bp, Methanobrevibacter ruminantium
  source 1..1212: mol_type = genomic DNA
atggtagtacttagtgcaggagatactgcatgggtgctcattgcaacaatccttgttcttttaatgagcatccctgaagtagctttcttttatagtggtttaacaaaacgtaaaaatgtcttaaatacaatgtttctgacttttattgcattttccatagcaagcataatatgggttgtatatggatacccatttgcctttggagatgtcagtataagcggtttgatagctcaacctgctcatttcttcatgagcggaatcggaattgaagatcttacaggaaccatccctacaatattgtttattgtgttccaattaacctttgccggtcttacagcggcccttatctcaggttcaatcgtcggaaggatgaaggtctcagcatggatagtcttcatcattgcttgggtcacccttgtttatgtaccgattgcccactgggtatggggaggaggattccttatgcagatgggttccctggactttgcaggaggtacagttgtacatattaactctggtgtaacagctcttgcattggcccttgttctcggaagaagaaaagacacttcccttttgccacacaacttaggatattcagttctcggtgcaggattcctttggttcggatggatgggattcaacggaggatctgcccttgcagctaacggacttgcagcatcagctatccttgtatcaaacgttgcagctgcaacagcacttatcacttgggtaattatagatattgtaaaagtcggaaagccaaccatgttaggggcaatcaccggtggagtggctggacttgttgcaatcacccctgcagcaggattcgttgatgttccagcagctattgtcattggttttgtaaccacattcgtatcctactttgcaatctattacttaaagacaagattcggctacgacgatgctttggatgtatttggagttcacggtctttcaggtatttggggagcaattgcaaccggtatatttgcagttccagcagtcggaggtgcagcaggtttgctctatggaaatccaggtcaagtcacaattcaagtaataagtgtaattgtaaccattgtctatgcattcactataagcttcatacttgctaagatccttgataagaccatgggaatcagagttgatgagaaaactgaaatcgaaggacttgatactaaaatacacaaggaatccggttatagattatag

SEQ ID NO: 1324 - DNA, 420 bp, Methanobrevibacter ruminantium
  source 1..420: mol_type = genomic DNA
ttgaaatcagataaacgggctaaatttgccatattcttctcaattgcaatccttgccttgggactgagcaatattgcagctgtatggactggagacttgataagcggttcacttccggtaatcaatgaaacagataagttgattgccttggacaatgacaatttctctccagcaagtttgaatacagtttatgaagaaaaaaaggttgtagaagtagttaatgacacatctgatgcaaacgatactgattccactccgaacaatgcagattccaatacggaaagtgatgatacatcaaattcaaacaataataacaataatcaaaacagcaatggcaacggcaatcaaaatacaaatccaaataacaatgccgagcctagctctggaggatctgcaggtcagacagaaacagaggaatag

SEQ ID NO: 1325 - DNA, 570 bp, Methanobrevibacter ruminantium
  source 1..570: mol_type = genomic DNA
atggaagaaaataaaaaattcgctcaaaaggtaaaagacattagagaaagacaacaaatgagtattgaagaacttgcagaaaaaagcggcgtaaagcttgaagtgcttcaggctatggaaaacggtgaaatcattccttcactcactcctcttacaaagatggcaaaggcccttggagtaaggcttggaaccttccttgacgataccgaacagctcggacctgtagttgtaagggacggcaagatggaaaacaccttatacttctcaggaagggaagacgtcgcaaatgcaacaaatcttgaattccactcattaggtgcaggcaagcatgacaggcatatggatccgttcatgattgacatagaccatgacgacgaatatgaattgtcctcccacgaaggtgaagagttcatctatgttatggaaggagagattgaagtggtatatggccaagacagcattacattatccaaaggagacagcatatactatgattcagtagttcctcatcatttacatgcaaaggctgaaaaggctaaaatattggctgttttatacactccattctag

SEQ ID NO: 1326 - DNA, 1665 bp, Methanobrevibacter ruminantium
  source 1..1665: mol_type = genomic DNA
atgagtgaactatttacagagcttccaattggaaagttctttgaaatgcaagtggaaaagcaaccggatcacgaatttatggtttatccagacagaaatctcagatttacatatgaacaatttaacgaaagggtggacaaccttgcaaaaggcatgctctcaataggcatagaaccgggagaccgtgtaggaatatgggcaaagaacgtccctgaatggcttacattcatgtttgcaacagctaagataggtgctgcaatcgtaaccatcaacactgcataccagtcccacgagcttgaatatgtcctaaagcaatctgaaatgaaagcgattgcaatgactgacggattcagagacacaagctatttcgatatcatctatggccttgtccctgaaataaaggaaagggaaaggggaaaccttaaaagcgaagagttcccttatcttgaatacattatccatgtaggtcaggaaaagcataggggaatgtacaacaccaatgaacttttattacttggaatgaactatgacaatgataagtatcaagagataaaggatgcagttacccaatatgacgttatcaacatgcaatatacaagcggaaccgaaggattccctaaaggagtaatgcttacaagcagaaacatcctaaacgacggctattacattggagaaaatatgaactataccgaaaaggacaggcttctcctccaggtacctcttttccactgtttcggaaccgtgcttggggtaatggctgtaatcacccatggctcaaccatggttgtccttgaggaatacgaccctctccttgcaatatcccccatccaaaaggagaaatgcacatcagtctatggagttcctacaatgtttatcggaatgatgaaccatcctatgtttgacatgtttgacatgtcctcacttagaacaggaatcatggcaggctcaacatgcccagttgaaaccatgaaagatgcaatcaacaagatgaacatgaaggaaatcacaagcgtatacggccttacagaggcaggtcctggatttacccaaacaaatgctgcagactcatttgaaaagaaaatcagcacagtgggaagaaaattccctaatattgaggtaaagattgtagaccctgaaaccggagaggagcttggccctggcgaaaccggagagattatgtgcagaggattcaatgtaatgaaaggatactacaacatgccggaaaagactgctgaaacaatcgagccagacggatggctacactctggagaccttgctacagtggatgaggatggatactactcaattgtaggaagaatcaaggatatgatcatcagagggggggaaaacatatacccaagagagatagaggaatatctattcacccacgaatgcgttcaggatgttcaggtggcaggtatccctgatgaaaaatacggagagattgtaggagctttcataataaaagagcctggatacgatgacattaccgaagcagacataagagacttctgcataggcagcatcgcaagatataaggttcctaaatatgtcttctttgttgatgagttcccacttacaacaagtggtaagattcaaaaatacaagttaggagacattggattaaaactcctggaagagagaagagaaagaggagaattataa

SEQ ID NO: 1327 - DNA, 879 bp, Methanobrevibacter ruminantium
  source 1..879: mol_type = genomic DNA
atgacacttgttttgataggtcctgcatgtgaggatttgattataataggcaatgagaagagctctaggataggaggtgcaagctattttcaaagctttgtctatgaggagttttatgatgactacattgctattgtaaatgctcaaaacactgatttgattaatgaatttccagatatgtctaaaacagaactcattttaaaggacgatacccattattttatcaatgaatatccagataaggacaatcgagatattagaaagcaatccactaattttgcagacattccaattctggctgatgatttaaaagctatttttaacaatttgggattgaatgaggataatatcgatgcctttgtcataaatcctttaaacagcaatgacattcctttagaaactctagagtatttaaacagttttaatttgcctatatttatatcccttcagggatttttgagattcaaggataaagataattccatggttttaaagtcatatgaagatttggattatatttttaatattgctgaagcgatctttttagatgaaaaggaattaaagattgtcagtgatgaagataagtctgattctaaaattgaaattcaagacattggttttgatgaaaaaaccaacactatttttatcattacaaacggaagcaaagggtcaagaatcactgattttaagggcataaacataaagatagattcagtgaaatgtgataatatagtggatgccactggctgtggagatagttatatggctgcatttatttctaatcttctaaatggaaatgatttaaaggactctggtgattttgcatcattgattgcaagtaaaaaattagaattctttggtccttatagaacagattaa

SEQ ID NO: 1328 - DNA, 552 bp, Methanobrevibacter ruminantium
  source 1..552: mol_type = genomic DNA
atgaacatcttaaatctgccacttaatatcctcataggaaatggaatctcattctttgcctcaattgcacttatcctaagctgtgtagtcaatgacaagagagaggcctataaatatcaggtcattgaagcccttatcctaacggtttcatcagccttcttcctctcatggactggcatacttacaatgctcattgcagcggcaagaaactatcttgtcatgaatgagagattaagctccagattggccataatctttatcataataacactgatcatatgtcccctaattaatacaatgggccttatcggacttcttcctatgattggaataatacagcttacaatctgcaactattatcttaagacaatcaaatggataaaggtggcattcattgtaaatgtattgatatatgctgtttacttcattggaatctatgaccttgtatcatgtgcaacccaagtgattacagcaataatcggattcatatctttagtaaagctaatcaaggatgaaaaagagggcaatatagactctcagcccaataattaa

SEQ ID NO: 1329 - DNA, 273 bp, Methanobrevibacter ruminantium
  source 1..273: mol_type = genomic DNA
atgtctgatgatgaattatatagaagagctgaaagaaaagtggatgaaaaaattggattttataagcatttatatagctatattggtgtaaacatacttctttttgccataaatgcaatcacatccttcggcaaatggtggttctattgggtaactatcttttggggaataggcattgtaattcactttttaaaaacatttgtcttgactggaaaacttgaagacaaccgagaggaaatgattcaaaaggaaatggaaaagatgaaaaaataa

SEQ ID NO: 1330 - DNA, 951 bp, Methanobrevibacter ruminantium
  source 1..951: mol_type = genomic DNA
atgaaaagactttttaagctagttgaaaaatatttctttataatcatcataattgcagttgcaattgcagttgtctttccaggctcattcgattgggttatgggagagtttatgggtatcaacatcataaacattctacttggaataatcctttttggaatgggtaccactttgaagatagagaattttgtaaacgtattcaaaaggcctaaggagatattgcttggggtcggcgcccaatatatcatcatgcctcttgttgcaattggggttgccagcctattcggcctcaatgaggcattgacagttggccttgtccttgtgggaacagttccagggggaaccgcttccgatgttatcacattccttgcaaagggggatcttgcactttcagtatcccttactgcagtctctacagtcatatcaccgattcttacccctttaatcactctgattcttattggaaacaatattgcattcaatcctgtggatatgttcatttcaattgttcagattgtaattcttccaatagctattggattgctcttgaattacaagtttccagacttctgtgaggagcttaaggattatctgcctgcagtgtcctctcttgtgattgcaataatcgttgcaggtgtgataggtgcaaataaacaggccattcttggctcatctgtggtgataattgcagcgatcgtggtgcaatacttcatagccatgcttttaggatttgtgataggatatctctctggaatgaaaagaaagcagatggtgaccatagcaatagagcttgccttccagaactcaggattgtctacaagccttgcaaagactcactttccagcattgtcccttgcaactgttccaggagccttgtattcagtatggcaaaactttgcaggttccatacttgcatatatttttagaaaatatttcactgatgaggaatag

SEQ ID NO: 1331 - DNA, 2817 bp, Methanobrevibacter ruminantium
  source 1..2817: mol_type = genomic DNA
atgtctgaaaatagatgttatgatccagattgtgatgctgaggattgccgtaatccccaacattacaattacatttgtttcgaccctgactgcaacgatgagaaatgtttgaacgaagagcattacaataagcagctattaagggattatcaagaaagcactgatttaagtgtttatgatcatagagaagagatagattatgatgaagatgttgatataagtctttgtggatgtcctgattgtgcggatgaccatgaccataatcacgaccatgaccatgatcatcaccatcatcatgaccatgaccataaccatgaacacagtcatgagcatgagcattcttatagtcatgagcatgagcatgagcacagtcatgaacatggccacgagcatggggatgagcatagccacgaacatagtcatgaccatgaccatggccatgatcacgagcatgagcatggggatgagcatagccatgaacatagtcatgaccatgagcatgagtctgaggatacttgtggatgcggttgcgatgatgatgactgccatgatgatttagaagaacatagtcatgagcatgaccatagtcacgaccatcatgaacatgaccatgagcatcatcatgaacatgaacatgaccatcatagccatgagcatgaagatgagcaccatcataatgaagaacattctcatgagcacgaacacagtcatgagcatgatcacgaccatgagcatcatcatgagcacagtcatgaccatgaccatagtcacgaccatcatggacatgaccatagccatcacgaccatgaccatggagactcctgcggatgtggagaggaccacgatgatgacgacttctcattatgtgcatgtcctgactgtgcagatgatgacgatgatgaccatggccaagaggaactcctcgcagagggaaagccactcatatacaacagacctattcaaatcatggtttccagtggaatattgtttatcacaggccatatcctcgaattcctctcattcagcccaacaattgtcacaataatctacatgcttggagcacttatagcaggctatgagatagcaatccttgcatacaagtcccttgtcaagcgtcacactgtcggtcctgcacttcttgtggttatcgcatgtattgcttccttcatcataggccacggtgaagagggtgcagctgtagctctcttgtactatatagcagaattccttgaggaccttgctgagcacagggcaaagcgctcaatcaagtcacttgttgaaatcgctcctgaaaccgctagggtcaaggtaggtgacggtgaagagtcccgcaggattgaagaggttaaagttggagagattgtgcttgtaaaacctggagacaaggttcctttggatggtgaagtggtctatggaacttcatctatcaatcaggcatcaatcacaggtgaaagccttcctgtaacaaaaaccgttggagatgaggtattctcaggtacagtgaacgaagacggataccttgaggttgtggttaccaaggaagctaaggactctgtaatcaataagatagtaacccttgtaaagcgctctcagcttaacaggtcaacaactgaaaccatggttgaaaagatctccaaatattacactccattgatgattataattgcagcctgcgttgcatttgttcctccactcgtctttggtcaggaccttatcgactggatctataaggcactttcaatcatggtaatatcatgtccttgcgcattccttatctccactccaatcggaatggtttcagctatcacatcagcaaccaagaagggtgtcctcatcaagggaagtacctatgtggaagagatgagaaacgtaaaggcagtcatatttgacaagactggaacactcactgagggaaagcttgaattaaacgacatcaacataataaacgacgaatacagcgaagaggagattgtaaggatagccgcatcccttgaaaacagctcatcccaccctattgctcaggcaatcgtaaactatgcaaatgaaaaggaaataggatttgaagagattgaagacttcagaaacgttccaggtaagggaatcataggaaatataggtggaaagcagtattatgcagctaacgaatccttgattgaaggaagccagttcaacatttcccaagaggagataaaccaatactcagcagaaggtaaaaccctgatattcattggagatgagcagtctgtcattgcaagcatcactgtaatggacagaatccgtgacaacgcttcagaagtaattaaagaccttaagagccaaggtgtcaagacattcatgctcacaggtgacaataagattgcagcaggtaaggttgcagatgagataggccttgactatgtctattctaacctccttccagaggacaagctaaacatattggataccctccgaaacaagtttggtgatgtggctatggtaggtgacggaataaacgatgctcctgcattggctagggcaaacataggaatagcaatgggtgctgcaggatctgacgttgcaatcgagactgctgatgttgctctcatgcaggatgacataagcaagcttccatacctattcagtttaagccaaaagacaatgaatataatcaagcagaacatcacccttgccattgtggtaaaggcactctttgtaatccttgcaatattaggattgattaccttgatgatgtctgtaggtataggggaccttggacttaccttggtggttatcttgaactcattcaggatagctatggttaaggatcctttgttttag

SEQ ID NO: 1332 - DNA, 384 bp, Methanobrevibacter ruminantium
  source 1..384: mol_type = genomic DNA
atgaaagattataaggagcctacaaacgacaatcataatgacgatttatgtgaagtgtttcatcctcatgaggaatcaatagagcgtgcaaagaagcatgttctctctgaagaggaatattctgatttggctgaattctttaagatctttggaaatcctacaaggcttaagattatatcccttttaagctttgaggacctatgtgtatgtgacatctgcgaatcattaggattgaaccagaatgcagtgtccaatcaattgagaatattgcgtgcacataatattgtaaagtttgaaaaggaaggaaagtcagcaaggtattcattgacagaccttcatgttgaaatgatttataagatgggcttagagcatatgactgaataa

SEQ ID NO: 1333 - DNA, 639 bp, Methanobrevibacter ruminantium
  source 1..639: mol_type = genomic DNA
atgggtaaagtgtttatcatgtcttatatttttattgatgaaagcggggatttgggaactaaaaaatcaagctccaaatactttgtgatggctggaataaaagttgaagattctcaaaaattagatagagttatcagaaaaatcaaaagagatgataaaaaaaatatcattacttctaatgaaattaaaggttccaatttacctcatgacataaaaattaaaattttaaaaaaattagatagtgttaattatcaagtttttataattatttttgaaaaaatcaataggtataaagttaatgatggttatgacaatattaaattgtatgatcttttggcttgcgaactagctaaacaaattgatataagtagttcttctaaaatctttattgataaatcaaaaaataaaaaagaagaaatagttaatttcaataaagcatttttggaaaatctgaataactttaaaaaatttcctataaaactagaacatgccaattcaatgagttataaaggtttacaaatagcagatcttatttcttgggctatttttcaaagtgttgaacacaacaataatgaatttatagatttaataaaaaataaaaaaataaaaagagtatttgaagaaaagaagaacctatag

SEQ ID NO: 1334 - DNA, 183 bp, Methanobrevibacter ruminantium
  source 1..183: mol_type = genomic DNA
atgaattcagaatttattatacttttttctcatattcttcctttgattttaggatttttcagcatcttattaatgattaatggaataatggacaagcagaaggttataactgcctttggcataattctatttttggcagctgctttcagtccgtttgtagtcttgcctatcttaggagtttaa

SEQ ID NO: 1335 - DNA, 696 bp, Methanobrevibacter ruminantium
  source 1..696: mol_type = genomic DNA
atgttagaaataattcctgtaattgatttaatgaattctgtagcggtttctggtaaaagtggaaacagagaaacttacactcctcttcaaactatatatgcgtcatcatctgatccattggaaattgcactttcacttaagagtgcaggtgcaaaggagatgtatattgcagatttggatttcattgaaagaaacggaaacaacaatatcttcaagataaaggaagttaacagtgtattgcctgtaatccttgatgtaggagtcgacaagcttgaaacatttgagtttctccttgaatttgcatataagataatagtcgctaccgaaacccttgaatcaatagaggaacttgggaagatatttgaaaagtaccctaaggagagaatcattgtaagcgttgatgtcaagaacaatgagctctatgcaaagaatatggatcttgaccttgaaggattcaaggaagtcttaagacgaatcgatcctaatgagataatattgcttgacatcagttcagtaggaacagaaggtggattcaataagcctctcttggaatcatttgaagagtttaaggacaagataatccttggtggcggaatcactccagatgaaataagtcaattggatgccttgggaatcaggaaggcattggttggaactgcattgcataagggacaaatcagattaaatcctttttaa

SEQ ID NO: 1336 - DNA, 624 bp, Methanobrevibacter ruminantium
  source 1..624: mol_type = genomic DNA
atggaaaaaagtgaaatagaacattatttacgagatatctgggttagagaatatgaaagaggagaaaagctagttgtagatgaattcaatgctgatgatatagaattattagctaaaaaagaatatatcaaaacagatgatggctttgtcaatctgactgaaaatggagaatatttgggaagatcccttgttagaaagcataggatagctgaaaaagtggttgccgacttgtttttagcagatatggatgagatggaagagttggcagaccaaatcgagcacgttatgagtgcagaggttgaagagaacatctgccgaatcttgggaaaccctgaaaactgtcctcataataacccgattcctaagggggacactactcctggcataagcaaggaatattctgttcctttggtctcctgccatagcggagagtctggagaggtatcccatatcaaaacagaggacgcccgtaaattaagaaagatcatgaatcttggtcttattccaggctctagaatctgtcttattcaaaagtttccaaattatgtcttccaattgggaaacactcaattggcagttgacaaggaattggctaacgaaatatttattaaactagatgaataa

SEQ ID NO: 1337 - DNA, 219 bp, Methanobrevibacter ruminantium
  source 1..219: mol_type = genomic DNA
atggatgaaaatgataataaaagtcagataatcaaatgtgaattctgcggattcacatttcaaaagtgtgatggcatcagctgtgattcctgccctattaattgcaaaacggttagatgtcctaattgcggttatgagattttgcctgagtccaaatcttataagttcctggaagatggtgttaaaaagataaggaataggctttttaagtcaatttaa

SEQ ID NO: 1338 - DNA, 2049 bp, Methanobrevibacter ruminantium
  source 1..2049: mol_type = genomic DNA
atgagtgaaagtattactcctaatggtggggctaaatattcaaataataaaaacaaagcccttgccagcaagaaaggcaatgattcctactataaaaatgtccttttgataggaagtcccaatgtaggcaaaagcctgacattcaataagctgactggaatgacagctatggtttccaattatcctggaaccactgtggatatcgatgagggcaatttcacatatgaaaacaagacagttcatataacagaccctccagggctttatgatctaaacacaataaccgaagaggaacgtgtagccaagctattggtattggacaaacgctttgacttgatggttcatgttgtggatgcaaagaacatagaaaagtcaatagaccttaccttgcagcttatagatgccggaaaggaagttatccttgtattgaacatgatggatgagcttgagaaaatgggtgcaactgtagatgccccgtcattgtcccatgagcttggaattccagttgtgcttactgcagctgcccaaaaccgaggattggatgacttgaagcatacaatcgtaaactatgattcaatagagaatcaaatcttaagcgagtctaagacattgttggatgtcgattatggaaggtcaattgaaatagcaatctctgagattcaaagaaatatcaaagggaattatccggtttccaaaaggtatcttgcagtttctcttcttgaaggtgatgaggacagcgaagaccttctaatggaaagtgaggattgggataatctatcccaggtcattggtgctcaaaaggcaaaattcgaccagcctgtcaagtatctgactaagttgcgtcttgcagactatgcaaaacatataaagtcaagttttacaacaatagacagcgtaaacattcaggataccgacagccttggagaaaagctaagcagaatcatgatccatccattctatggtcttatcatacttgcctgtgttttgttctttggcctttatcttattgtaggagttcttggtgctggaattcttgtggatttccttgaaaacaccatattcggccagtacataaaccctgctgtaacatctgtggtcgttcaatacattccatgggttcctatacagaacctttttgtaggggaatacggtattgtgacacttggtttgacctatgggttcggaatcattctccctatcgtgtcccttttcttcattgtattttcaatattggaggacagcggatacctgccaaggctggctcttcttgtggataacggatttaaaagaataggattaagcggaagaagcgtaattccttttgttcttgctgttggatgcggaagcatggctacaatggtgacaagaacattggagaccaaaagggagcgaaacattgcaacaatgcttatggctcttacaatcccttgctctgcacagcttggggtaatcatggccttattgtctgcaaggccaaggtcaatctggatttggcttgctgtgattgtctttaattttgtcgttataggatatcttgcaaagagattcgttccaggggcacagccaagcttctttatggaattgcctcccctcagatggcctaagctctctcacattgcaaagaagacttggacacgtcttgttatgtatattaaagaactgattccaatatttattctaataagtgtaatcatttgggctcttgacttggtcggtattttccaatggataattgcttgtgtaactccaatcgttaatgcaataggtcttccaggctcaacaagttcctcatttgtccttggattctttagaagggactttggagcagctggactaatgacaatccaaaatcaattgactggagttcaattgcttgttgcatctgttaccttgacattgttcctcccttgcgttgcacagcttatgatcatgataaaggaaagaggggtaaaacttgctggtcttatagctgttatgagcatagttctagcattcagcatgggttttattgtcaatttcatattgactagcttgaatgtggtcttatag

SEQ ID NO: 1339 - DNA, 1197 bp, Methanobrevibacter ruminantium
  source 1..1197: mol_type = genomic DNA
atgatagaaactgatgttttggtaataggtgcaggtcctgcaggctctgctgctgcaaagcatgcagccttaggaggggctgatgttattctaatcgataagaagtctgaaataggaactcctaagagatgtgccgaaggcatctatgaccatggacttaaatggctggggattgagccggaccctgcatgggctgttcaaagaataaacggaggaacccttattgctccggataaaacaagacttacccttgatgagacaattctgcctgaaaagggctatatcatagagagaaaggtctttgacaagtatatggctatggatgcagccagggctggcgctcagattatggtgaagactcaagcaaagtccattcaaaggggtgaagattccaaaggctcattttatactgttgactgtgagcagatgggagaaatcattgaagtgaaggcaagaatagtgatagctgcagacggtcctgaatcacgtgtagctaaggcatttggcgtaaattcaactacaaaaccaaagtatatgatgtctggtgtccaatatgagatggttggggtcaactgtgagcgtatggatttgatagagcttcatttaggtgcctttgcaggtggaggatatgcttgggtatttcctaagggagatgacattgcaaatgttgggataggaatatcaagcgaaagcgataggcctgcaattgactatctcaacgaattcattgaatcctatcctccattgaaggatgcaaagccggttgagcttaatgtaggaggagaccctatcggaggattgataggccagatttattctgataacttgcttgtttgcggagacgctgcaggtcaggtggatccgataacaggagggggaataatccttggaatgcttggaggcatgactgcaggccaggttgcatcaagagcaatcaaggatggcgattattccaaggaaaggttaaaggaatatgatgaattgtatgatgaatatactcaaggtgcaattcctaaattggcagttggccgtgatgtatatctttcattaagcgatgatgacttaaaccagatcattcatgcatttgaaggtcttgattataagagcatgagcccaaaggatattttaaaggtcttctttaaactgtctccaagacttgcattgaagtttaggaagttgtttaaggttgtgctctaa

SEQ ID NO: 1340 - DNA, 909 bp, Methanobrevibacter ruminantium
  source 1..909: mol_type = genomic DNA
atgtttaataagaagatggttttagccataagcttattagctgttatctttgcatctatgtgcatagtttcagcagatgactctggagagggaagctttaaggaattggctaaattagtgtccggcgataataagaccggtgttataacattgacaaaaaattttgcaaatactgacggatatgatgcagatggaataaagatcactggagataatcttgtcattagaggggaagaaggcaaggacattacaatagatgcaaaaagtgcaggaaggattttcaatgcgaacggcacaaagaatgtcacttttgaaaatattcattttgtaaacggcaattcttccgatgcaggtggtgctgttctattaggtgaagagccaagcagttcagtaaagaattgtcaatttgacaactgctattcagatgcatttggcggtgctgtagatggaaatgccataggatgcacttttgaagattgcagcgcaaactaccatggcggtgcaatattcgatggatctgctaccaactgcaccttcaatgactgtttctcaaaaagctgtggcgggagcaaatttcctatcataaggcaaccaattgccaatttcacagactgctattcctattggcaaggcggtgcattgtatgaagtggaagctataggctgcgactttaaaaactgctattcaagcgaaggaggttccatgtgtggaggctctgcatttaactgcaatttccaagactcccttgctaagaatggaaatggtggagcgaccttaaacacaaccgctaaaggctgttcattcagcggatgcagtgtaacaaatggagaaggaaatgccatgtatggaggcactgctacagattgtaaattagataaggcagatgctgttaaggttaactttaaatag

SEQ ID NO: 1341 - DNA, 441 bp, Methanobrevibacter ruminantium
  source 1..441: mol_type = genomic DNA
atggcgaatttaagttttatcaataataattttaaaatgattgtgggaatcttgtccattatcttagcgatagttgtttatttcattacacctccatatattgaattttacttgatatttgtatttttaattccggcaatagccttgattgttcctaatgatgcaattaaaaatagtagagcaataggtgctcttacttttattttagtcattattgtagcatattttgcaattagtggaatgttaggggcctatgatgttcttacaaatatgtatgtcaacggtttaattaactctactcctagtacaagtgatatcagtgcttgctctaatggctatttgatggtattgatttatgcattattcaatatattttgtggagcattgttctttaaacgaacaagtagtattgatgatgttgatgatgaagatgcattttaa

SEQ ID NO: 1342 - DNA, 1407 bp, Methanobrevibacter ruminantium
  source 1..1407: mol_type = genomic DNA
atgcaattggattttaaccatgtcttaactcggatttcagattatgaaaagcctattgtcttgaatcatgatgttgttttaacaaggtctgaagcccatcaatttaagaagggaatagaaatcaagcgtgataatatagttattgatggaaatggccattccattgatgcaaggggcaaaaaccgtattttcaatgtgctctctaaaaatgtagtcataaagaatttcacctttaagaacggattttctgaaaagtttggaggagcaatcagagttgcaggggaatgtaagctcataaattgcacttttgagaataatcgtgcaaaaaaaggaggaaatgacatttctaacggctctgaattaagcatctgccattgtaatttttcagatgctgatggttcaatcaataatttaggtacaatatatcttttaaaggatgaggaacatgagataaagcctcttatttctaataatggtgaaattaaaagaatcattccaaagcatgatgtctcttttcttataaatggtgataaggaccatataaagggcgcccttattaggataggggataaaagcggattttccaatgatgagggagcatgtgttttagaaggaatcgaagagggaaaacattcgctagaggtatctgctgagcattacatctcatttaatggaaatattgatgtttcagaaaataatgtcctttttgacattcagctagagagactgattcaaaggcatgacattaaaattttagttaagcataagggtgagcctgtcagtgatgcaattgttagcgttggcggcataaagggctctacagatgaaaatggagaatgcatctttgatgatgtagaggaaggagaaatatctgtaaaggtaaattccaatgaatatgagaatcagaagtataccatcactgtctctgataataaaacaaccttccctattaatttgggattcactcatttgataactccattccctgcaagtgatgaggatccttatatatttgccagctattctcatgatgatgcaaacagggtttttctagagctaaagcgctttcatgattgtggcttaaatatttggtatgatgagggcattgaatcaggacttggttggcaaggtgttgttgagagtaagttaaaggcttgcactctttttattgcatttatttcagctaatgctgtggaatcaattaatgtaaggcgagaaatctttttagctattaataagaagattccggttgttccaatatatcttgaaaagactgaattgcagtatggtcttgatttgcagctgtctccagtacaggcaattttgaaatatgccatgactgaagagttttatgtggaaagatgcagaagggcctttgtaatgtatggattgatggatgaggaatag

SEQ ID NO: 1343 - DNA, 759 bp, Methanobrevibacter ruminantium
  source 1..759: mol_type = genomic DNA
atggcaaaagtgacaagcatatttttctctccatcagagactacaaaaaaagttgtaaatcagatagcagagaacttcaaagaggaaaaatcaatttgcgacttattatatttcaatgataaaaaggaatttgagtccgatgatatagttattgtaggaatgcctgtatttgcaggaagacttccaaagactgcttcagaaagactatcaaagctaaccggtaataatacaaaggcaattgctgttgcaaactatggaaatgctcatgttaatgatgcattgatagagcttgttgacattcttaatgaaaacaattttgatgtgattgcagcggcttccactgtcagccatcattccatctttgatggtgttgcgttaggaaggccagatgaagatgacattgaaaagattaatgactttgcccaaaaggcaattgaaaaaatagaaaatggaggctcccttgaatcagatattccaggaaacaggccttatacagattataagcagcttccatttgttgtggcatgcgatgtggataaatgcgtattctgtcttgaatgtgtttcagtatgtcctgagaaggccattccagatgatgaccctgccgatatcgaccttgagatatgctcaagatgcactgcatgcataaacatatgtccagaggatgcaagatcatttgctggagatgctttcctatctaaaaagccactatttgaagaggcaaatgcagaaaggaaagagcctgaattttatttctaa

SEQ ID NO: 1344 - DNA, 297 bp, Methanobrevibacter ruminantium
  source 1..297: mol_type = genomic DNA
atggaagcaaaattaaaaaaattaactcaagaggatatcgacgacatatctgacttttttgcaggagtcattgataagaaaatcgcatcttctgtaaagtctcaaaaagagattcttgctatggatattgatatagaagtagcatacaatgatgaaaatgaggaactgatggtagatgtagatgttgatataactacagatgaactgtccaacttatcagatgaaaaagtcaatcaattaatcgaggactcttatgtggaacttgatgaatacattaacgacaattataggaaatga

SEQ ID NO: 1345 - DNA, 348 bp, Methanobrevibacter ruminantium
  source 1..348: mol_type = genomic DNA
atggaaattccacaaaatgtacaacatcaattaaatcaattccaacaattacaacaacaagctcaagctgttaccgttcaaaagcaaaatgtagacatccaattaagagaaacagaaacagctctcgacgaactcaagaaaactccagaagatgctgaagtctacaaatccgcaggtaacttactcattaaggttgaacgtgcaagcactttagaagatcttgaagacaaggttgaaactcttaagttaagacagcaaaccatgcaacgtcaagaagaaagagtcatgaaaaagcttgaagagatgcaagcatccattcaacaagctatgcaaggcttacagggatag

SEQ ID NO: 1346 - DNA, 135 bp, Methanobrevibacter ruminantium
  source 1..135: mol_type = genomic DNA
atggagctcactctagatggaaattcaataaaaatcaaaatagatgccgaggacgccacttcctttagggcatcaatcaattcagcaatcaaatggataaagctggctgtagagattaacgaattggtagaatag

SEQ ID NO: 1347 - DNA, 492 bp, Methanobrevibacter ruminantium
  source 1..492: mol_type = genomic DNA
atgcttatttccacatcaagaaaaccttcacagaaaacaagaaccttttgcaagaatttctcacatgcatttggctttgactatacaaacagaggcaaaagcagcttaagggatttgcttgtaaaggccaagcaactaggtcacgacggtctcgttttggtctatcaaatcaagggaaacccaagcaagctgacattctatgacctggaagaaaatgaaagattggctcttctcatatcagtaaacactaccaatgagcgtcttcacataaagccagaggaattgaagatacgctcaacagttccagaattggatattctagcagaagttctagggattgaagtaaccaaggaacctcaagactccaattatataaggatctcatatgcagattatgatgacgagagcaattttgcaattttatatttcattaacaagaaaggagaacagattgattttagaatcaatgtcaaaaagattgtagagccttaa

SEQ ID NO: 1348 - DNA, 132 bp, Methanobrevibacter ruminantium
  source 1..132: mol_type = genomic DNA
ttgtataaatgtccagaatgtggcgaagaagtcgaccataaaggatacatggaaaataaatgtcctaaatgtagatataggattttatttaagaaagttcctgaagttagaaaactcgttaaagcaaggtag

SEQ ID NO: 1349 - DNA, 270 bp, Methanobrevibacter ruminantium
  source 1..270: mol_type = genomic DNA
atggctagaacaaaaaaagtaggaataactggtagattcggtgctagatacggaagaaaagcaaaaagatctgtaaagaacattgaagaaaacatgaaaaagaaacatgtatgtcctaaatgtgacagaccttatgttaaaagagtaagcgctggaatctgggaatgtaaaaaatgtggtgtagtattcaccggaggagcttacgtacctgaaactcctatggctaaatctgcaacccgtagtattaaaagagttgttgggggagaataa

SEQ ID NO: 1350 - DNA, 792 bp, Methanobrevibacter ruminantium
  source 1..792: mol_type = genomic DNA
atggatattgtacctgaaattactagaaaaagtattacaagacttataaatgatggtaaaagagctgatggaagagcttttgatgaaagaagagatattttcattgaacctaatgtgattgataaggcagaaggttctgcaagagttaaattaggagacactcaagtcattgtaggtgtaaagccaaccattggcgaaccatttgcagacactcctaacttaggtgtcttaatgaccaactgtgagcttttacctatggctgctcctggatttgaaccaggtccaccaagccctgaatcaattgagcttgcacgtgttgtagaccgtggaatccgtgaaagcgaattggtagaccttgaaaagctatgcattgaagaaggtaagaaagtttggatgcttttcattgacttgcatgtaatcgattatgacggaaacctcttcgactgtgcaaatcttgctgtaatgtctgcattgcttaatacaaaattgcctgttgctgaatacattgatgatgaagtggtcctatccgaagatgaaacaatggaccttcctgttagggacaaattggctttatccacttttgtaaagataggcaatggattgatcttagacccttcccttgaggaagaggaaatcttggatgcaagaatcacaatcggagtaactgatgaaggaaatcatatctgttctatgcaaaaaggcggagaagaacctctaacaagagatgacattctcgatgcagtccatttagcatttgaaaccaaagatgatcttcttagttatctcgactag

SEQ ID NO: 1351 - DNA, 711 bp, Methanobrevibacter ruminantium
  source 1..711: mol_type = genomic DNA
gtgttttttattatctcagaaaatgaaaaattaagaggggacggaagagcatatgacgaacttcgtccgattaaaatagaagctggagtcttgaaaagagcagatggttcagcttatttggaagtaggtggaaataaaattttagcatctgtttatggtccaagagaatcttatattagacgtttattaaaaccaaacactggtgtaatcagagtaagatacaacatggctccattttcagtggatgatcgtaaaagaccaggtccagacagaagatcaactgaaatctctaagattgcagctgacgcacttagacctgcattgatgttggaatctttcccaagatccatggtggatgtttcaatagaagtaattgaagcagaaggaggaacccgttgcgctggaatcactgcagctgcagttgctttagcagatgctggaattccaatgaaggacattgttgtaggatgcgctgcaggtaaggtaaatgatgagattgtattggacttatctgaaaaagaggataaggaaggacaagctgacgttcctattgcaatcatgccaagaaccggtgagattaccttgcttcaagcagatggaaacttgactgaagaagaatttgaagaggctttggatttagcaattgaaggatgtatgaaaatcagcgaaatccaacatgaggctcttaagacaagatatagttcccaatag

SEQ ID NO: 1352 - DNA, 1476 bp, Methanobrevibacter ruminantium
  source 1..1476: mol_type = genomic DNA
atgggaagtatatgtatgatatatgtgaatgagaaagatttagtagttcctggagaattattggcagaggatgattattattcaggaagaggaacctttgaagatgatggaaaaatatgttccaaacttttagggttggtttctttaagaaacaagaagataagtgtaattcctctaaaaagcaaatacattccgaaaaaaggagatgttgtcatcggtaaaatcgatgatgtaagattttcaatgtggggagttgacattaactcaccttactctggaatcttgccggcatctgaagtattcggaagagagaaaaaggaattaagtagagttttcgatatcggtgacgttcttttcttaagaatcgtcgatgtcgatgaggtcaagaaggttaagttaggattgaaaggccgtggaatgggcaagtttagaggaggagtcattgtagacatcgctcctaccaaagtccctcgtttaatcggtaagaaaggttctatgattaacatgatcaaggataaaactggctgtaagattgttgtaggtcagaatggtcttgtttgggttaaaggtaatgaagacatggaacaaatcgttaagaataccattaaattaatcgaaagagaagctcatacctctggtttaaccgacagagttaaaaacaagctctgcttgcttattgatggagaacttccagaagaggaaactgaagtcatggaagaaaaggaagagattgttgaagaatcctttgaagaaggcttgaaaaagcctgaaattcaagatttcagagatgaagttgaaaaagaaattgctgaagagatggctttagaagagtctgaagaagacttggatgaagagtttgatgattctgaagaacttgatgactctgatgaagagtttgatgattctgaagatatttcagatgatgaagattttgatgactctgaagatgatttggattccgaagaagaaattgattatgcagattctgaagatgatgaagatgagctcgcaatagaagaattagaagaaaaagtagaaaccgaagagttcatggatgattccgatgaggattctgattttattgaagaggatatcatcgaattagacgaagatgcagaatcccttaatgaagaggatgatgaagaggaattcgatgtccttgaagagtctgaagcagaaatatttgatgaggcggaagtccttgatggagctgaagaaatctcagatgatgagcttgaagaagtaatcaatgaagcgatctcagaagatgaagaatctcaagatgattctatagaagatgaaagtgaagatgaagaggaaaaggaaaaagaagaaaagtctaaaaaacctaagtttttagacactttcgaatatattaacgaacagaaaaagaaaaacaaatcttcttttgatttaagtcgtgcagataattccgactctcctactttaaacatttcacaaagaagaggtatctaa

SEQ ID NO: 1353 - DNA, 705 bp, Methanobrevibacter ruminantium
  source 1..705: mol_type = genomic DNA
atggttaatatagatgatgctattattgcaagattagaatcttacggtgaaaagtttgagattttagttgatcctgatttagctgcagactttagaaatcctgataatgaaaaagaaattgatattgaagagatattagctgtagaggaaatatttaaagattccaaaaaaggtgacaaggcttcagaggaatccatgagaaaggtatttgacactacagacgttttggaagttgcagagcagatccttcataagggaaatgttcagctgactgcagagcaaagaagacagatgcaagaggataagagaaagcaagtagttgctaagatagcaagagagggaatcaaccctcaaacaggtcttcctcatccggcagtcaggatagagaatgcaatgaacgaatctaaagttaagattgatgctttcaaatcagtggatgaacaggttcaaacaactttaaaggcaattaaagttttaattccaattaaatttgaaaagataaaaatggctgtcagattgcctagcactgctgcaggcaatggctattctgcaattcgtccatttggaacaatcttgaatgaagaatggcaacaagatggttcttggattgcaattgttgaaatgcctggcggtcttcaagatgattttaatcataaaatggcttccatctcaggaggagaagctgaaactaaagtaattaaataa

SEQ ID NO: 1354 - DNA, 144 bp, Methanobrevibacter ruminantium
  source 1..144: mol_type = genomic DNA
atgtcagtaaaaaaactaatcataaaaaaggttattcttagcaaaactgctagaaaaaccgcaaagaagggaataatgtttgttgtgccttcagatttctttgataggcataggcatttaggaaaaattgttgacatgatgtag

SEQ ID NO: 1355 - DNA, 885 bp, Methanobrevibacter ruminantium
  source 1..885: mol_type = genomic DNA
atgcaacctttacaacaacagaatgcaggttatgacagagcaattactgtatttagcccagatggaaggcttttccaggtagaatatgcaagagaagctgtaaaaagaggtaccacttccttaggtcttaagtcaaaagacggcgtggtccttattgtagataaaagaaccgtcagcagattagtggaagcaaagtcaatcgaaaagatattccaaatcgacgaccacattggcgtagccacttccggattagttgctgatgcaagagctttggttgaaagagctagaatcgaatctcagattaataagatcacttacaacgaacctattcttgtagggggacttgctaagaagatctgtgacttaaaacaattatatacacaaaatgggggtgttagaccattcggttccgcactcattataggcggagttaatggcgaagaaactagattatatgaaacagatccaagcggagccttaattgaatataaggcaactgcaattggttctggagtgcaagctgctgtagatgtctttgaagaaagatatgaagaagacttaagcttggaagatgcaatcaacttaggcttagatgcactttatgaagctactgaaggcagaacaactgaagacagcgtcgaaatagctgtaattgaagttgcaacccaagcttatagaaagctttccgatgaggaagtttctggctatgtaaaagatcttcttgagagaaatgctgaagaggaagagccagaagaagaagctgaagaagaagcagtagaggaagcagtagaggaatcagaagaagcagaagacgctgctgaagaatctgaagaagaaacttctgaagaagaagcttctgaagataaagattctgctgaagaataa

SEQ ID NO: 1356 - DNA, 2244 bp, Methanobrevibacter ruminantium
  source 1..2244: mol_type = genomic DNA
atgaactttatgaaaacaaatcttaaaaaaacaacaatcatattggcactgctgatggccattttaattttatcgattggagccatctctgcaaatgatttaacatcagcagattcaaatgtagatatgaataatgatttaaacacaaatttggatagcaatgatataatcgccaattcaaacagcaattcaattgatgctgaaattgatgaagcaaactattcaaatcaaagagcagatgccaaggaaaagttaaaggaaagcaattcattaatagaaaacgaaaatactgaaggcaatacacaaatagaagatgaaaattcaagcccttcaaataaaacagatacatcaatatcaattgaaacaaacagcatagaaaggggatccgatttaacaatctatctaaaggacataaatggaactggaatagcaaatgaaaagctatcaatccaaataataaacaagacctacacaagaacaacagattcaaagggctctgccctttttaaaataaatcttgcatctggaaaatatcctatagcaatatcctacaatggcagcgaagattatgaatcatcatcagatgacttcaacataagcgtttcccctatgaaaacaaagatcaatatgctcagcaattccattgtaaacggaaggaaactaactatagaattgttggataagaacaacaatccattaaaatacaaaaagatctccattatcctaaataaaaagctatataatctcaccacaggcaaagatggaaaggttagcttaaacattaatctgaatcctggaaaatttcctatccaaataactttcagtggagatgcaaactatcatacagtatctaaaagctctgcgattgatgtatataaattaaaaagcagctttacagttccaaaaacatcaatcataaaaggaaaatacttatatgtctatttaaaagatagcgaaggcaaagcaatcccatccgcaaaggttgccttcaagatcaatggagtaagctccacaaaaacaacagacaagaacggaagaatcagccaaaagataggccttaaggtaggaaactataccgtccagctcaactataatggagacaagtcccatttgaaaaaagtccaaagctttaagattcgctcttgcaactccaaaacaaaattcactgtagctaattatacagtggtgagaggaaaatacctaagcgtctatctgaaggattcagaaaacgccaatcttgcaaataagaaagtgaccttcacatatcttaaaaaatcatatacaaagacaacagacagcaatggaaaagccagcctaaagatgacagaggcaggaacaactaccgtcaatcttcaattcaagggaacaggcccatatctaaagtcaagcgcaaatgtcaaaatcaaggtactaaaaaacacaacagcagatatcattgcaaaaaaccagacaagacacttgaacggcagttccacaataaggtattatgtaaagcttactgacaataacggaaatccaatagaaaatgaaacaatagagcttaaggtcagatgcaataacataacaacaggaagcggaaacaagattactaaaaagaccatcgtattaagctcagataacataattaacaagagcgaagacaagaagctcctaaacgagatggcaaagatcctcagggcaaaaggatataaggtaatcgtttccggaatcggacctaactatcatgtaagcgatgtaagggactattccaatgtctgcgtattcagccttgtaggaggagtcgacagcggaatgtttgttgacatgtcacacagctactataagaactaccttaaaaaatacaagaaccagttcgtattgggatgtgtagcccctccggtatatcttaatttaggtaatatgacctggcttaaaagggctcatgatgatgactacagtccgaaaagctttaaaggactttattatccaggaaagtacttcaatacagtgactaaactggattatgtctatggtgatggtgctgaagagcttgtcaataatttcttaaactatgcaaaaaaaggtaaaagcatagaccttggacagtcagtacctaagacaactacaacttataagctcactacagacaagaatggaaatgcttatgtcgatttgcaagtaggcacttataccatttcctcatctatattaggcaataattataaggttgacacccaaacaagcaaggtaaatgtgattaagtag

SEQ ID NO: 1357 - DNA, 378 bp, Methanobrevibacter ruminantium
  source 1..378: mol_type = genomic DNA
atgaagcttaaggtcctgcctcccacccttcgtaagaatcaccattatcttattctggatgtaaagtctgaagtaaaactttccaaagatgatatagttcactatatatgggacgcttgcattagatattggggagagaaccattcaagtaacttcaatctatgggtcatgagacactatcctattgaagaaactatctataataatgagcctgtattcaattataagacagtcttaagatgtcaaagatcttatgaagatgatgttcgctctgcacttgccactttaaacagatataataagaaaaagatatccataaatacgattggaatatctggaactgttaagtctggcattaataagttcattgacgaataa

SEQ ID NO: 1358 - DNA, 972 bp, Methanobrevibacter ruminantium
  source 1..972: mol_type = genomic DNA
atgaaattccatgacttgaacataagaggaacagactacaataacgatttggctctaatcaaagaggcctataagttcggatgggattatcttaatttaaattattcccaagaccattataaggaagccttatcctataaggatgatttgcttgaggaaatatctctttttgaatggaaagacagctatagaaacaaatacaacagccagtccatagagatttccatgggaatcaacattcagaatgccaattcaaatgagataagaaagattgtaaacaaatataggaacaattgctcttatatgagtgctttaggcggggacttaaaggtaaaccgtagcgtatgtgaaaaccataggatggatgtattgtcccgcccatattataaaagaagggattccggcatgaatcatgtattggctaaggaagcagcccgaaacaatgtggctatcgaattatgcttccgtgacgtattaaagaacagcctgaagtttagggctaatataatcagcagctttaaggaaataatgatgtttcataggaaatataattttcctatcattctgacaactgattccaaatcaatctatgacattcgctcaacaaaggatatagtcggcttctttaagtcaataggattttcagacaaagagatttataatggattctattactatccaagggagataattgactttaaccgccaaagaaagaacatggttattaagggagttaaagtgattgaaggagcaagtgattttactgaaattgattcaaaaactcctaaatttgaagagtctgaatgttttgatgaagcaatatctcaaaaagaagatgatttctttgattgtgatgaatctgaagatgatttctccgattatgatgaagaagatgaagtttttgttggggaatctgaagatgaatttactgatgttgagttcgaatctcttgaaaaggaggatttattatga

SEQ ID NO: 1359 - DNA, 441 bp, Methanobrevibacter ruminantium
  source 1..441: mol_type = genomic DNA
atgattcataatatcagatatcgtgtttttatttatgaaaatgaagataaggataaggttttagaagccctactcaatatacttccaacagcagagcctgaagctgaagaggcagaggggcttctcgaagagaagatgcttattctaactggagccatctccaaaaagagagaaaccaaagagttcttaaacacccttatcgaatccattggagaagatcaattaatcaagctatataatgatttggatagaaagatggatgaaaaaggcaatctcttcctaagattatccaaagagaaggcattagatgaggaatgggaaatattggatggtggagacagcatacatctaaagataaagatagctgcatatccggctaaaaaggaagttgcattaaaaaagattaaagaagtcttcccagaggatattataaatgcttag

SEQ ID NO: 1360 - DNA, 552 bp, Methanobrevibacter ruminantium
  source 1..552: mol_type = genomic DNA
atgatgtacaaatatattagagatgcatggaaaaatccagatgagtcttatgtaagggaacttatgtggcaaagagttcctaaatggagaaaacaacctgcaattaccagaatcgacaggccaaccagaatcgatcgtgcaagatctctcggttacagagctaaaaaaggtttcgtagttgtaagagtaaaagttagacgtggtggacgtagaaaaactcgtttcaaacacggtcgtagaccaaaaagaatgggtgtaaacaaaataaccatggctaaatccattcaaaggatcggagaagaacgtgttgctaagaaataccctaacatggaagtattaaactcctactgggtatggtctgacggaaaatacaaatactttgaagttatcttagtagacccacaaagtccttccattaaaaacgacccaaaaatcaactggatttgtgaaaaacagcacagaagcagagctctcagaggcttaaccagtgctggtaaaaaaggccgtggccgtagaaatggaggaaaaggcagtgaaaaaagattaaaataa

SEQ ID NO: 1361 - DNA, 420 bp, Methanobrevibacter ruminantium
  source 1..420: mol_type = genomic DNA
atgattaaatgtgataattgtggtttaaaatttgatgatgacactgaaatatgtcctaattgtggcaataaactagattctacccaatctgttcaagaaactgaagaagcttctaaaaaatgccctagctgcgggtcactcattggaattaatgagtttatttgtccaagctgtggaaataagatagaggaattaaaaatcattagaacatgtcctaattgtggtgtgaatttggatgatgatgcggtattctgtgataattgtggtgctaatttgtcttcaacttcagatcagattcaagagttcaataaatctttaattgagtctaataaatctttaatggaccaaattgctgatttgcttactaagtttgggaaatttatcgatgatttattctcttcatttaaaaaagataagtaa

SEQ ID NO: 1362 - DNA, 921 bp, Methanobrevibacter ruminantium
  source 1..921: mol_type = genomic DNA
atggttaaatgcagtaattgtggtgcagaagtgggagatgcaagtttttgcttttcctgtggtgagaaggtagatggtggaaatgtagattctaacatatgccctaaatgcggtactgaaaattcaaaaggaaccgtattttgtgttggatgtggtcagaaatttgataatgcattagttccagaatctgtagcgcgcaaacaaaaggaatgggaacttagacgtcagcaaatcattgaaagatatgatcagcttgcagatgagtttggaattaaggataaggattatttcctaaccagtgtggtaagggttaatatgttggaagagaaaactactaaacataaagtttggggttctgttggctcttatggcggaaataaaactacaattgatggtttcttcttaatagaagatgataagtttgtctttatggaaatcgataatagagactggaaaaaagtcaatgcgggaataaacaatttctactttgacaagattgtttctatgagaattacaaaaagacttggtgacatttcaagatatgaggacattactaaaagaacaagtctaaattccgctcatgccattaaaagagccattcaaaatgatatccaatctcttaaagccacaagatttaaagatcttattgtaaacaacgatagtgctgatatgtttgataggttattaatcaagcttgtagataacacttcatttgaaatcagacttcctagctttgaatttggagagaatttggtggcattgtttgaaatatctagaaacagtcctcaaactgttgtcatcgagactgattcaaaaccaagcaaagcagatcttttaaaggaatataaggaactattggattctggcgccataactgaagaagagtatgatgagcttaaaaaagaggttttatctagttaa

SEQ ID NO: 1363 - DNA, 534 bp, Methanobrevibacter ruminantium
  source 1..534: mol_type = genomic DNA
atgttagttcgtaatttagatttcttgtcaattccaaaggaattttcaaaagttgaattagatatttatgaaggtaaatctatcgttcttgtttatattgaaaacaaaggttattcactagtattaaaaaagaacaacgaaaacgattctatattcctactaaaaactgatttggctccagataatattgattctgataaagaagacttcattaatgtaataaaaatgttattggataaaatctacgaaggtgcagagattaaggaatatgaaaagcagcaccacgagcatgtgttcttacaattgatggatttattgattgaaggagaaacagttgaaacaatcactgaagaatctaagatttatgccgacattgaaaagggattcatgaagttggagcttgatatcatggataacaagatcaattccttaaacagtgcaatcggtgagatttcaggtaatttaaacaatcttggaagcaaagttgaagatagcaagatagaaaacagacttaagaaaactttctctcaataa

SEQ ID NO: 1364 - DNA, 549 bp, Methanobrevibacter ruminantium
  source 1..549: mol_type = genomic DNA
atgaaagaccctaatatggacaggattcttgaagataataggaaattaatggaagaaaataggaaattgaaagaggatttaaaagaattgaagaatgaattctatcaatttaaaaaaaattcaagacccggaaagccattcaacttagaaaataatgatgattataaaccttctggaaactattatttccataataattttaaagaagaatttgatgatgcaaacatcaaatacaattccaaggataatccagaaggaagcttccacaatgactctgcaaatatagtggatatgagcctaatctcatttttagcaaggtccaataaaagggttgaaatactaaaatcattgaatcaaggggacaaaataccatccaccataagcaaagagattgacgacagcagccaccacgtctccaaatacctctcaagcctaaaagaaaaagaattagtcgtttgcatgaatgaagaggataaaagattcagattctatagaataactgcaaagggcaaatactatttggaaattattcagaacaaccaatactga

SEQ ID NO: 1365 - DNA, 546 bp, Methanobrevibacter ruminantium
  source 1..546: mol_type = genomic DNA
atggcagatttaaaaggaaccaaaactgaagaaaacttaaaggccgctcttgctggcgaatctcaagcacgtgtaaaatatgaattctatgcctcccaagctaaaaaggatggctatgttgaaatcaaggacattttccaagagtcctctgacaatgagaaggaacatgcaaaaatctggttcaagctcttaaacggtggaaaagtacctgacaccttaactaaccttgcagatgcagcagctggagaacatgaagaatggacttcaatgtataaggaatttgctgagaccgctagagaagaaggctttgatgacattgcagcattattcgatgcagctggagcaacagaaaaggctcacgaagacagatacaatgctttaactgataagataaaagcagataaggtctttaagaaagatgaagagattgcttggaaatgtaataactgcggttatatccactatggaaaagacgctcctgaagtctgtccgttatgtgatcacccacaagcacacttcagaaaacaagacactagttatatctag

SEQ ID NO: 1366 - DNA, 978 bp, Methanobrevibacter ruminantium
  source 1..978: mol_type = genomic DNA
atgtgtacagcaagtgaatatttaacagaaaaccattattttggcagaaactttgattatgaaatctcatacaaggaaagagtttgcataactccaagaaattatgaatttaaatatagaaaaatagatgatatgaaatcccattatgcaattattggaattgctgcaggtattgacgagtatcctttatactatgatgcttgcaatgagaaaggggttgctattgcaggtcttaactttgcaggaaatgctatatatagggaaatggaagaggatatggttaatgttactccatttgaattcatcccttacctcttatctcaagcagatagtgttgaagatgtaaaagaattgcttcagaatcttaatttagtgaatatcaattattccgaaaaccttccattgtctcctcttcattggatgatttccgataaggattcatctataattgtagagcctttggaagacggcttgaaggtatatgacaatcctgtaggagttttaaccaacaatcctaaatttgatatgcagctgtttaatttaaacgattataggaacttgtcagtaaagacacctgaaaacactttctctaagaatctcaatttggatgactatagcaggggaatgggagcaatcggacttccaggtgacttgtcatcagcatccagatttgttaaggtggcattcacaaaggaaaattcattttccggcacaagcgaaagcgaaagtgtctctcaatttttccacattctaggttctgttgagcagcaaaaaggattgacatttatcaatgaccctgatttatatgaatataccatttattcatcttgctataatacaaacaagggtattttatattataaaacctatgacaatcatcagataactgctgtagatttaaatagggaagatcttgatggggatggattgataatttatcctttgattaatgaggcacagattaactttattaattaa

SEQ ID NO: 1367 - DNA, 546 bp, Methanobrevibacter ruminantium
  source 1..546: mol_type = genomic DNA
atgaaaatcttagcattaataggaagtcctagaaaacacagtaactgtgaagcaatcgttgacgaaatagcaaaaggagcagaagaaaacggccatgaagtgattaaatacattattcaagatttggatattgctccatgcagtggttgtgagctatgccgtaaaggcaaggactgtcgctatacagatgacggcactgaaatcatagaccaattggcagatggagcaagcgttatattggcaagtcctatctatttcggtcagatgtctgctcaagcaaagacaatagtggataggttctatagcattttcaacaatccaaataaaagcttctcaaaagatgcaaaggcagctattgtattgactcatgcttatcctggggattatgatgcttatcttcaattgaccattgcccagcctttccaaaacaatacagaaatggaatttattggagcaatagatgctggagatttaaagttcccaggtgatgtaaaggataagccagagatcttgagagaagcttatgagttgggtaaaaagttctag

SEQ ID NO: 1368 - DNA, 777 bp, Methanobrevibacter ruminantium
  source 1..777: mol_type = genomic DNA
atggcttcttgtaatataggaaaaaaattcatagcagagcttataggtacctttttcctagtgttcttcggtaccggagctgctgttgtaactttacttatttctgatagcgtaactccaggaaaagctggcatcggattgctcggcggtcttggagattggatagctattgcattagcattcggtttaactgtaatggcatgtatctacttgtttggaaagatctcaggtgcacacttgaaccctgcagtaacaataggactccttgcaagcaaaaacatctctgcaattgacagtatctactacattgtagcccaagtaattggagcatgtttaggaagcttattgctatatgtatgtttaggagctcaagctgtaacaattggaggattaggtgctaccgctccaggtatgggagtgggatatcttcctgctttgattgccgaatgtataggtactttcttccttatgcttgttgtaatgggcgttgctgttgatgaaaaggcagaacctggatttgcaggtatttcaatcggtatgactgtagcagctgtaatcatcgttttaggtgcattcaccggtgcttcaatcaaccctgcacgtacctttggtccttacttgatggacaccttgcttggcggaaccaatttctggggattcttcccgatttacttgattggtcctatagtaggtgcagtccttgcagcaatattatatggatacttagctaaaggcaatgatgcatgtgcattgccacaacctttctttgaagaatag

SEQ ID NO: 1369 - DNA, 1497 bp, Methanobrevibacter ruminantium
  source 1..1497: mol_type = genomic DNA
atgaaagaattatatgaaaaaatgattaatgaatcagtagctgcattgcaagcagatattgatgtaattagtgcaaatagatacaacgactttaagattgttgatgcaaaaccttatgcagatgctgtagctggaatgacctgtatagacggacaagcaaaatctgtaattgacttgcacaagaaatctgtggaaagccattacaaggtattgacttccgttgctgaaaccatcagacctgaagacgatccatttattgaacattaccaaactcctcctatacttgaaatcctatgtgaggaagacggtgaatttgcagacagtatggctacatttattcaagctattgctgacagtgaaacattgattacaagagaatccgtccgccgttacggtggattctatggtcctacctgtgtagtggactttgctttgatgccaggaagcacttccaatgtagtaaaccaaatcttgaagaccattcacattcctgtaatgcacaaacaagcaatcctctctgccaaatcttggggtatgaacacatcctatggtattggtgattcatttgctcatgcaattgaaaacggtgcaactgcagcagaagcagctgcaaaagaagttgaatcaatgcaaatgatctataaggaacctgtagaggctcaaggtaaattaatggacgatgcaggacactcttcatttgatgtaagagcatttatggaaggatacaaaaaagaaatgagacctgttgtcaaagctgctatggatgatggcgtgcattatggtaatatcgtaaccgtacctgcatactgtgtaggggacattggtcaccacatcggtcaagcaagctacaacatgtgtaaggatgacgtgactttagctattattcaagcaactgctaaagtaatggaagcttccttgaaagacaacattggcaaatttatgcatccatcacaagtcttgaacttagctaccggttcaactgcatgtgctactgagtacattcttgaattagatggatttaattccactatggttgtagacttattaaccaaaagattccacaactttgtacaacaatatcctaccagaggagcagctgcagaattgcacaactgtgactttatggacatgattcacagaggttccacttacataagcgctgcaagaaaagcaagaagcagtgcaaaaatcgaccttgtacctaaagtcaatggatttgctgttgacttaggagcaatcacccataatgaagttctcatgaacccacaaagatacacttatcctgcttgtggaattacagtaagattctcctcactcatgagacttgcagactatccatgtctccttactcctgaacctgtaactgcaaccatgatgactaacatcattgcactcaataaggaagttcctggttctcctgtaagaggatgtaaaaactgtgcttcttgcataattgatgcaaaacacgaatactgtcaatggaaagaatctgtatag

SEQ ID NO: 1370 - DNA, 627 bp, Methanobrevibacter ruminantium
  source 1..627: mol_type = genomic DNA
atgaatgaaatagttttaaatcatccattaataactcataaattggctattttaagagatgtaaacacaggtacaaaagaattcagagagcttgttacagaaatatccactcttttatgctatgaagcaaccaaagacgcaaagcttgaagaggcagaaattgaaactcctcttgctaagatgaagacaggcaagctgaatgaagacaattatgcagttgtccctatcctaagggcaggtatgggtatggttgaaggaatcatcaatgtgattccaaatgctaaagtaggtcatataggtctttataggaatgaagagacctttgaacctgttgaatattactataagatgcctgatggaatcggagataggatagctatgattattgaccctatgcttgcaacaggaggaagcgtatctgcaaccattgacaagctaaaggccgatggggtaaagcaaatcaagttcctatgcatagttgcagcccctgaaggaatcagggctcttgaagcaaatcatcctgatgttcagatatactgtgcaacagttgatgagcacttaaatcctaatgcatatatcgttccaggtcttggtgacgctggagataggatttatggtactaaataa

SEQ ID NO: 1371 - DNA, 1188 bp, Methanobrevibacter ruminantium
  source 1..1188: mol_type = genomic DNA
gtgaattcaactgttggcgaacctgtgctatctgttccagttgctttaatcacttctgggataggtacactcatttatgtaatctgtacacggaatagaagtccggtgtatctgggaagctcatttgcattcattgcacctatggttgccggatatgccatcggcggaaaatcaagtatcttctcagcattgatggttgtaggtttggtctatgttgcaattgcaattatcatcagggccaccggtaaggaatggatcaataagctattgcctcctgtaattgtaggtcctatgattatggttattgggctttgtttggcccctaccgctattcaggaaataggacttgatcaggctgtagttccaatcaataacattattgtggctcttgcagcattcctgaccactgctgtaatagcaatccgtggaaaaggagtattgaaggttattcctttcctcattggtattattgtagcatatgtcgttgcagcgttattaggtatggttgacttttcaggattcttttcagcaagcctctttgaagttccagagttctatatgccgtttataaactacagcttcaatcctacagctcttcttacaatagttccgattgctcttgtaacaatggtagagcatgttggggaccacaaggtattaggggaaatcattggacgtgacttgattcaggaccctggattgaacaagacccttcttggtgacggtcttgctaccttctttgcagcgctcctcggtgggccagctaacaccacttacggtgaaaacacttctgttgtaggtcttacaagagttgcatcaatctatgttatcggtcttactgcagtgtttgcagttatctttgcattctccggacacttgactgcacttcttgccgctatgcctaaccctgttatcggaggtgtggctattcttctttacggattcattgcagtaaatggtgtaaagctcttgattcaagaggaagttgatttcaacaataacaaaaacattgttgtagcagctaccatgttggttttaggtttaggtggagctaccttgtccgttgctcaaggtgacttatctgtgtcaatttctggtatggctcttgctgctattgctggtgtaatccttaacttgataattccagaaagaaaagaagataacaaatttgttcctgaagttaaataa

SEQ ID NO: 1372 - DNA, 480 bp, Methanobrevibacter ruminantium
  source 1..480: mol_type = genomic DNA
atggctaaattaacatttaggaacgctagcgaagaggatgtgcctttaattttagaattcattaagaaattagcagattatgaacatagattggatgaggttatcgctacagaggaagcattaaaatactggatttttgataagcaacaagcggaagtcatatttgcccttgaagatggaaaggaaataggatttgcatttttcttccttagcttttcaacatatatcgctaatgtcaacatgcaccttgaggatcttttcatagaccctgaatatcgtggaaatggttatggcaaggctcttcttcgtgagcttgctaaaatagtaaaggagagaggatatggcagattcgaatggacatgccttgactggaatcagccaagcaaggacttttataaatccattggtgcaaaacagaaggattggaatgtatttcactttacaggccaagaactagaggatttcattaatgaggattaa

SEQ ID NO: 1373 - DNA, 1725 bp, Methanobrevibacter ruminantium
  source 1..1725: mol_type = genomic DNA
gtgtatatcaaaagcttttttaatgatttgaacttgaccaagaaggatggcatatatctgctggcattgactgttttttcaattctctatacagtccacctaatcgatgtaaactatacccttaactttaaatcagacccatttgtctatttaattaacggtttagtctatgctggaatgcagggccatatagagaactattcctatggaatgttcctaacacctgtcgtatcattcctgacatcacttctctttagaatgggaatagtggacaagatagcaataatgatcgttagcggagtcataagcatccttggtgaaattggattgtacctactatttaaaaccaagttcaatgaggtctactcctttttcggctgcatcctatttgcaagcttccacatagtcctcacaatctggggcgggggaggcatagacattccagtatgcgccttcagcatcattacattcctattcatggtattggcagttgacaaaaaccctaaatactacattccaacttcaatattcctgattatatcaatattcacaaaatatgatgcattattcataatacctatattgttcttatactacctaactaaacatgacttcttcaatcttgtggatttggcattaagcgatagggatgagcttaagatagttattaagaactatataaaaagcgaagagtttaaatacattgtaatatctctgattatagctgttgtcttatttatactgttttgtgaagtgatatggtcatatggagctaatctgacattcctgacacaatctcaagagtctctaaacggattcaacagtgcaaaagcagcgagaagtcatttttactataacgataagaagttctatataagaaatctctacactttcttctatcctcaaatcagccaagagttttcattgatcattcctgcaatcatagcaatcggaacagtgttcaactttgcaaacataatcagaagaagaaaggaataccctatggtgagagattacaagacacctcactttaaatacctgttggtagggcttataataatcctaattccaatagctatcatcggatttaagtatatctcacatatggtgactaatgttgcacttctaaccatctgcgtatgccttctatcgctggcagataagttcgatatagataagaggaccttcaatctggacatatttttcctagcttggatttttgtctttgcagtcttcttcagctttatcacaataaaaggacaaagatatctgattatagcattgcctgctgtagtctattttgtcttaaggacaatagaagagatatttaataagttcaaggattcaaatatccttaagataactttaataatcattgcagcgataattattgtctattccctttcattcacattcactgacggaaactttgacactgaaagaaacaataccgcaatccaagaggtatacgactatttggttgaatatgaccctgactatcttaataagaatttaagttcagactattcatatggatcccgttttggaacctggacccttaaaaaggacgttcgttatgtcaagctaggggtgatagaccagtcagagagtgattatctgattgtaaagcatgacaatgtaagtcttgcaaattatactgagatttatagggctggaaagatcaaattatatcaaaataatatgtatgataattcctcaatatga

SEQ ID NO: 1374 - DNA, 735 bp, Methanobrevibacter ruminantium
  source 1..735: mol_type = genomic DNA
ttgtctattgttagtgcaaacgatttgaattcaattgacgattccattgaagcagataatctaaattctattgaaattgaagacattcaagttgattctgtagaatcagatgatttagaaaagtctaatattgatgaaaaagttttaagtgatggggaatcagatggcgattccggcaatgaaactgaaactctttcatcaggtgatgaaaataatgaatctgatgtctcttctaatccaaatgaaggtgtagctactaatttagaattggataacgatgctgataaggaaaatgtcaagattggcgagttggttacttggactctcgaagctaaaaattatggtccttatgatgctgaaaacactcaagtctatgacgaattgcctgaaggcttagagtatgtcagccatactgtcacaaagggagaatttaatcctgaaactggcatttggaaaatcggggacttgaaagtcggtgagaaagagtatttaaaaatcgttacaaaggcagttactacaggtgaaaaggttaataaggctaatttaacaagcgatacagatattatcgatccggatgaatgttacgaggaagaagaaattgatgtggaagatgatgatgacaatcattttgaaaaagttatacattcaaaacaattacctcgtgtaggaaatccgatatttttacttatcttgtctttattgacagttttaggtttaaatactagaaaaaaatag

SEQ ID NO: 1375 - DNA, 1455 bp, Methanobrevibacter ruminantium
  source 1..1455: mol_type = genomic DNA
atggattatgatgtaatatacattggaagcggaaatgcatcttggcaaggtgctaggttcttgagaaaagagggtctgaagattctaattatagaaaaaagcttatatggtggtacatgtgctaataggggctgtaactctaaggccttgcttgatgctccatatgaaatcaaggcatttgcagataactttgaaggctatggcaagtctggcaattttgaagtggattggcctgcccttatgaagctcaaaagaaaaagaatagcaaacatggctcctttcttggacggcaaatataaggaatatgatttggatgttgcccatggggaaggatacattgtggatgagcatacagtgagagttggtgataagacattcacaacagataagatagtaatctgtactggcttaaagccaatcattcctgacattaagggaaaggagtatcttcatgacagcactgactttttagacattgaagagcttcctaaacatgcaatcattattggaggaggctttgttggaatggagtttgcatcaatccttgctgaggcagggcttgaagcggatgtgatcatcagaggaaacatggccttgaaattcttccatcagccttatgttcaaaatgtaatcgagatcctaaaggaaaagaacattcgattccacttcaatgagactgtaaatgaagtcattaaggatgattctgtggtcattgaaaatccagaggagagagttaatatcttcgaaaacgctcagaatactgatgatgatttaagggacccagatgcaaaggtggacaataaggcttatgaaaatgcattcactgtcaactgtgatagcggacttagcttaaccggcgactatgttattgcagctatgggaagaacagccaatgtggatacaataggccttgagaatgttggcttggattatacaaaagccggaataaaggtaaataactatttgcagactgctgtacctaatatctatgcatgcggagatattgcagatactggaattgcaaagcttgtgactgttgcaatccatcagtccaaatatcttggaaaggcattgttaggggatgctgaggaaatagtctatcctgttgttccggcagttgcatacacaatccctagaatagcaacagtaggtgttccagcctatattgcagaacaaagcgatgaatatgatgtccataggataagatatggaaagtcatattcccttgagcttaaaaatgacacaagatcagaggcaaaggtcattgtagataaggatttaaatatagttggtgctgaaatatatgctgcagatgctgaaaacgtggcaaatatgtttacttttataatcaatcaaaagattactcttgaagagcttgataatatgatttatgcattcccttcaagcagttctgtttgtttgtataaattgcataatattcattataagttctag

SEQ ID NO: 1376 - DNA, 1194 bp, Methanobrevibacter ruminantium
  source 1..1194: mol_type = genomic DNA
atgaaaatattggtagtgcaggaatcagactggcttaagagaaaccctcatcagcagcaccatctaatggatcgcatggtgctacgtggacatgaagtaaaagttatcgattatccaatcgattggcctaaagaagactcaaaaggacttatctttcatagggaagtccacgaaaatgtctctaaggtaaagccagaggcagacatagaggttatacgtccttccttcataaaggagccagggcttaactatgcctccctatacttcacacataaaaaggaaatcaaaaagcagatagatgagttcaagccagatatcatcatgagcctagggcttctaaatgcatacacaggttcaaagcttgctaagcagcatggcattccattcgtatactaccttattgatgtgctatatgcacttattccagagaaggcatttcagtcattcggcaagaaggtaaacatgaaagcgatagagaactcagaccttgtaatcactatcaatcaaaagcttaaagaactggcaatggaactaggttcaaaaccagaaactaccattttgattgatgctggaattgatttaaatgactttgaccctcagcttgatgattccaacataagaaatatgtataatataagtgaagatgacacagtcctattctttatgggttggatctatgaatttgcaggaatgaaggagcttgcaatggagcttggaaagaataaggaaaaatatcctcatatgaagattctaattgtaggggacggcgatgcctatgataggatggtggagataaaggaggagtatgatcttggtgaccaattgattctcactggaaagcagccttatgagaggatacctgaatttttagcctctgcagatttctgtcttcttccggcttatattgatgaggaaatcatgcaggatatcgttccaatcaagctttatgagtatttagctatggaaaaggttgttatagcaagtgagcttccgggcatttccaaggagtttggatatggaaatggaatagagtatgttcaaaaggcagaggaggttctcgagacagctcaaaggatacttgatgagggaagatatgaggagatttctaaaaaaggaagggaatatgtaaagtcaaacgattgggaagccattaccgataagtttgagaatgctcttgaggagcttattaaataa

SEQ ID NO: 1377 - DNA, 540 bp, Methanobrevibacter ruminantium
  source 1..540: mol_type = genomic DNA
atgagaatttgcgtttatggtgctggaagcactcaaataaaatcaaaatatacagatgaagcatataagttaggggaggaaatagctaaaagaggccatgatcttgtattcggaggaggctctacaggaattatgggagctgtatcaaaaggagccatagacaatcatggaaaagtcttgggaatagcccctgaatggatggaagagtttgaaggaatctgcaaggattgtgatgagttcatctatacagaatcaatggatgagagaaagaagctctttttggaaaattcagatgcattcattatagcccctggaggaataggaacccttgatgagttttatgaagtaatcgtgctaaagaagctaaataggcatgataagaagattgtgatatttaatatgtttaattattatgatcatatgcttgagatgattgattttatgatagaagaaggagtcattagggctggaagagataagaagacttttaaaatagctgattcaattgaaaaggtctttaaaatcttggaaagagaatga

SEQ ID NO: 1378 - DNA, 492 bp, Methanobrevibacter ruminantium
  source 1..492: mol_type = genomic DNA
atgtcacatccacatgttgagtcaataaacaatatgaacgcctcttctttaattggcattatggaagagtctaaaattacttatgtacgtgaaaatctggatattcatttgcatgctagtcagataaaactgttaaagcaggttagaaaacatgaaaagcctcatcataaacgcattagagttaaacgttatgagcaagcggaaaaatcagacttattcaatttgcatttggatttgtatttgaataattataagaagcttgctaagaaaggattgattgaaatcgatgaagatcctgaaaacggtcttccttatgactgcgctttaactgaaaaaggaaaagaagttttagatgatatcgataggcttgagaaggattgggaaaaagttgtccacattgatgataatgatttggaagctttaaagagaatagctcttgattcctttgaaatctcttatcagcataagaaaaagcaaaactttattttttaa

SEQ ID NO: 1379 - DNA, 321 bp, Methanobrevibacter ruminantium
  source 1..321: mol_type = genomic DNA
atgggcgaaaaggttttttatggaaaagggattcgcagaatcaaggaagaagaccctcaattatatgattctattgaaaacttggataagaatatttggaatgccaattcattggattataggactcaaaagttgattgcaatagcaatttcagctacaaatcctgaaagttcttcattcctaaagcaattatccaaggctaaaaaagagcttgatatcagtcgtgatgaagttatggatgttttaaaggtagttcttctgacatctgggatgatgccctttaataaggctttagaagtggtcaataagttatatgactaa

SEQ ID NO: 1380 - DNA, 336 bp, Methanobrevibacter ruminantium
  source 1..336: mol_type = genomic DNA
atgagagtgagtattatgaaagaagaagtattctacggaaaaggcatggaaagagtaaaaaaagaagatgaaggtttatatcaagctattgtaggattaaacgaagctgtatggaatggaaaagtcttggattataagactcaaaaattgattgcaattggaatagccgcatccaatgcagatagccgtgcaactgaaaggcagattatgagcgctaaaaaggaattgggagtcactcgtgatgaagttgtagatgtattgaaggttgttttattgacttctggcatgcagccattcaacaaagccttgcagattgcaaataaggtatttgaataa

SEQ ID NO: 1381 - DNA, 756 bp, Methanobrevibacter ruminantium
  source 1..756: mol_type = genomic DNA
atgaattccaagggaaaatatcttgttttatttcttattttaatattatcatttagcataatctctgcttcatttgcttatactggaactggattttctcatgacattccattttccaaatactcaagccagtcaaacagtgatatcctaaataaatacaataatacagattgccatagcgaaatcaaaggaatatgtacttatgtggcagatggggacaccatcgatgttgaaggtgttgggagagttcgttttgtaggtgtcaatactccagaacgtggcgtcacagcatatatctgctccaagcgttttgttcaaaagttctgtctgaataaggaagtcagcctggatgtagatgactctaagagaaacgatagatatggaagaacattggcggtggtcattgtagatggcaagaacctgaatgaaatgcttttaaaggaaggccttgctgagatcatgtacattcctccaagtgagttctatccatatgactggtcttcagactccactacaagctcatcctatacgtcaggcagcagctcttcaaatagcggagggtcctattcatcaagcagttttacaagcggttctacagtctctgctccttatgttggaagtgcaaacagtcataagttccattattccacttgcaaatggggaaagaagatctctgataagaatagggtgactttcaatagcaggtctgatgcgataagtcagggttatgctccttgtaaggcatgtcaaccttga

SEQ ID NO: 1382 - DNA, 414 bp, Methanobrevibacter ruminantium
  source 1..414: mol_type = genomic DNA
atgaagatgcctgaaaagatagacaatatgatgtttgcaccttgcggaatgaattgcaagctttgcataaagcacatatccaagtcaaacccatgccctggatgcctgattgacagtccaaacaagacaaagaatgccttaaaatgcaagataaaaaaatgtctggagacgaagagggtaaaatactgtggcagatgcagtgaatttccatgcaagcttatgaaaaagcaggacaagaactataaaaaacgctacaattactcaacattggataatgcaaaaagaatcacttacactggaataaataggataatgcttgaagacaagttaaattgggaatgtccgtcatgcggaggcataataagcattcaagagagagtttgcagcgattgtggattgaataaggaagattaa

SEQ ID NO: 1383 - DNA, 513 bp, Methanobrevibacter ruminantium
  source 1..513: mol_type = genomic DNA
atggcagctataatatgtccaagatgtggaaaaatgaatgatggaagcttagatttctgcatctattgtggaacttactttgatgattataatgaagaagacaacaatgacaatctcttttttataagatcaatgaccaatgatgggagacctggcaagaaacaagtggtcagattaaatgaaatgccagataatctccaaaaacctaaacataggcttgccatacttttaggatacctgtttgcaatattaggcggacttataggatttgtctttgcaatttatctaattacaagaaaagataagaatgccagaaggcatggactaatccaattggttattctattaatagaatatgctttaataggtgttttaatcttaaatggacaattggatataaatatggttttagatcctttcaatatgactcgcatgaataatataactcaattatataattccagccaaatgaatgttagcgggtctaatatctcaagtttatttggcttttaa

SEQ ID NO: 1384 - DNA, 1842 bp, Methanobrevibacter ruminantium
  source 1..1842: mol_type = genomic DNA
atgaagaaaaatttaagcttaaaaaatattttaattttatcattaatcttcctttttgtattaagcataggatcttcatttgcaacagaagatttaaatacaacaggagataacaatctaatagatgataatgccatggcagacacattatctgatgaaaaagagataagctatcaaaagccattaatgtctgatgaaaactctaattcaaataatggatccgatgaggaaaaggttataagttccaataatagtaaatcagagagttttcttatcatacgtcctaacgaatcttctattacagtattaggaggtaattttcaagatttgcaagatgcaattgattatgcttcagataattatacaatatatctaatttgtaatatgttgggtgaaggaaaaccgattattgttaataagagtgtagtcattgaaggaaatggccatactttagacgctaactattcatctagaattttctgcattttgtctgataatgtagtattaaaaaatttagaacttattcatggctatcaaagagcttatgattcttataagttaaggccatatgatagtaaaaactttgataatgcccctgctttaactcaggagttctttgattatagtgtccctcctcttaattcaactgatgatattgaatatggttggggtcctgctattaaatggcttggaaacaatgggacattgattgactctgcaattttaaataataagattgattatgctaatgatattggggaaggtaaagccgtatcctggcttggaactggcggaagaataattaatacatttatggtgtctaatgagtatcatcatttttttgttccttggggaattgttggctatcagcaaaagtctgaaggaaaggttttagatacttctcctcatggggtttattatggcaatattgaaggaaatgtgtattttcttgatgtggccttaaatgttttgcctaatttggatgttaaaaatgtcacttcatattatggtgaaggcaaaaagatttcatttaacttgaatcatggcaatgcgtccttcgtcaatgaaagtcttgaactcagcatcctttcaaagaaatataactatacatttaatgttttctctgatgaaaatggaaattttgagtttaacttgcctaaaaacttaagcgttggaagctacaatcttatagtgggattcaatgatggcaaaaacaatatcagttcaaataccactgtaaagattaataaagctactgtaagcgtttcagcaccggatttcaaggcccaatattactccggcgccaaatacactcttaagcttatcaatgccaagaccaaaaagcctataagtggcatgaaagtaaacttgaatgtctataacggcgagaaagtcaagacttatacagtcaaaaccaataataaaggaatagccacctttgataagttcacactcccaagcgtaatatatgacgctggaaaacataaggtgaccatttctgttgataagagttatgacttaagcaagaaagagttcactgtccagatttccaaagcaaagacagacattaagctttcaaaaacaagcttcaaatataagaaatcagacaatcttaaaatatccatcaaaaaccagattaaaaaaacagccatttcaggcttaaaacttaaggtaaaggtttacacaggcaaaaaatacaagacctacactttaaagacagataagaatggaatggttaagataaataccaaaatcctttcaaaaggaagtcataagattcaaataacatcagaggataaaagatatctggtatcaaagaccacttctataaaagtggcatag

SEQ ID NO: 1385 - DNA, 2958 bp, Methanobrevibacter ruminantium
  source 1..2958: mol_type = genomic DNA
atgaaaaggaatatttattttattattttattagttacactatttttaatcagtatgagtgttgttagtgcagcaaatgatgctgatgtctcttatattgatgatgaaatagtttctgatgaatatttagaactttctgattctgaaatgggcatttcggatatagattatgatgatattgaatccgatatgcttgaaaatgaaatcaaggagaatggattgtcagataataatgatgttcttaaaagtaatttacctgaaaatgaatttaaggaatcaaattataatgagtattatgaggatataatgaattctaattcccaaaagtatggggaattcattaatttcttgattaacaataaatcatttgaatttagagaaaattccttaagtgaagacggttattttctttatgcaactaagaactatactcttcggttatgggatggtgtaaattacactattttaaaagatgattattattttgcttcaaccgctgaaaaatcaggctattttgtaaatgagagtttttacgatgatataatatattaccatgaatataactattatctggatgaagaattcttaggatggctgatgtggaacgctaactataaaaaagttttcgtgtcaggttcaatagaagataaagttgatatctcctcagtagtcaatcctgaaaagggaggatctcctaaaagtggcaatctaccaagttcttatgatttaagggattatggatttgtaactccagtgaaagatcagggaaatactgctaattgttgggcttttgccacaatggctgctttagagtcacatctcttaaaaactgaaaatacatcatataccctttcccctcaatgggatttctctgaaaataatttgaagaatgtgatgagttcccttggacgaaacggtacagataagttagtaaatagtggggggaatatgttaatgtctttagcatatcttattcgttggagtggccctataaatgaatcagatgatccatataattctaactatactaacattagtgaggatgtttatccattaaagcatgttcaaggagtaaaattcattcctaatcgtcaaaattatttggataatgattatataaaagaatcagtcctagaaaatggggcagtttatattagtatgtattgggattctttttttgaaaagaatgatgcatattatttttataatggaagtggttataattttaattcaaattatatgcatgctgtaactattgttggttgggatgataattatcctaaaaataattttttaatacaatctgaaggtatgggtaatggagcatttataattaaaaatagttggggcacaaatgcggggaataatggttattattatgtttcctattatgatcaaatgttaggttttgataatacatatgccggctttgcttttacaaatgttgaaaatgtgacaaattatgattataattataactacaatcctttaggctttacaaatgtttttcctgttaacagcactagtgcgaaatttgctaaccaatgggctgcattaaaaagcggaacattaaaatcttttggtctatatgttgtaagtccatctatttgtacagctaatttgattgttaatggaatttctattggaaacactacaagttatttatctagtgcaggttttcatactattctatttaatcaagcagcatatgttaatgtaggtcaaacatttagggttgaaattactttacaacatatcgggtcttcacatacttatattcctcttgaggaaagaattgaaaattattccaatgttgtttccggatacaatcaatcatttttatggttaagaaaaaatggtgtagatcaatgggtggatttaaagactgaagtggataatgccaatatctgtttgcatgtttatactgaatgtattgaaggattgcttgaaactcatgttcgtagtaacaatctggttacttattttaataccagcagtttaaatgcaacccttgttgacggatcaggaaatcctatagcaaataaactaatatactttaaactattaaatgtgacatataacagaactacagatagtaatggtaaagtaagcttgccaatacatttaaatccgggatcatataaatttttaataagtttcctaggggatagcatttaccataaatccaatcgtcttgtcaatgtaaaagtaaataagatgcatacaaacattaatcaaaatgtcagtacggttcatcaaggagaatatttaggtttaatattaaaagatagcaatggaaaagcattatccggacaaaaagttgcattctgtctcctcagtgtcacttacaacagaactacagatagcgctggaaaagcaaagcttttaataagattaaatccaagaaaatacacattcactctaaaattcttcggaacagcaggttactatgcatgcaacaaaactttcaatctaacagttctcagtgccaaatcaggacaatcttatgaaatgggcatagatgattatgatggaaagaacattgatgagaacattataattaataatgaaacttttgaaagttcggatgtagtgaataatgacataatgtatatgtataatgacactcaatattataatataattaatgaagataaaggttattataataatcattcaaatgatatcaattttgaactattggataatgatcaaaactatatatactctgatttaaatcttttagaactattgaataatgatcaaaacgatatatgctttgatttaaatcttttagaatatattgattttgataaaacagattattataacgataatctttataatctcgaacattattatatgaaagattcattaaccgaaaatgaagatttatacatttgtgaaaataagctaaatattcatgatttaaatcaaataaagataggaggtatttaa

SEQ ID NO: 1386 - DNA, 996 bp, Methanobrevibacter ruminantium
  source 1..996: mol_type = genomic DNA
atgtccaaatataacgaatatcaagataaaactattttagtaactggtggagcaggctgtgtaggcagcaacttaactagaaaattagcagagcttggtgcagagaaagtgatcattttagataatatgtcctctgcatatgaatggaatgtgccaaccaacgaaaacgttgagcttattcaaggggacatccttgatgatgaggagttaaagcgcgtatttaagatgaagccggactatgtattccatttggcagctcacttcgctaatcaaaacagtgtggacaatccggaaaccgacttgatggttaacggcataggcattctaaaggtgcttcaatatgcacagctcactggtgttgaaagatttgtatactcatcctctggctgtggagtatatgggcttgactctaagatgccttttgaagagcatgacatatccatttccttgcacaccccatatcaggttactaagcttcttggtgaattatataccaattatttccataacctatatgacatgcctattgtaaatgcaaggttctttaatgtattcggcccaggggaagttccaggaaaatacagaaatgtaattcctaatttcttctattggtccatgaccaaacaggcattgcctattacaggagacggaaccgaaacaagggactggacctttgttggagatatcgtcaacggccttttgtcaatgggagttgaagaggaagcgataggtgaagcgataaacctaggttcaggtaaggatcacagagtaattgacatggcaaacaaggtcaaccaactcactggaaatgaagagggcatcgcctatgttgcaagacgtaactgggatgctaagaccaagcttttatcttcaattgataaggcaaaggacattcttggttataagcctaccgtatcctttgatgatggtttagaaagagtttacggttggtttacagacaactgggaagacattgaaagagatgctgaattttaa

SEQ ID NO: 1387 - DNA, 774 bp, Methanobrevibacter ruminantium
  source 1..774: mol_type = genomic DNA
atggagatagaacatacacacgaacttatcaaagatgtttttggaatgaatatgaaagaggcaaggcttttagacgatctcttaaagactaacgacctatccgagatattggaattaggctttgcacatggagtgtcctcctgttactttgcatccacacttaaggatatgggaaaaggtcacttgacaaccatagacaatactacagctaaaacccgtaatcctaacatagaggaattattaaaaaagacagggcttgaagaatatgtgacctattattttgaagcggtttcatacaattggagattgatgaagctgattgaggaaaataacggacctatatttgacttttgctatattgacggcgcccacgattggaacaatgacggatttgcattccttttagtggataagctattaaagcctggaggaattataatatttgatgattataactggagcttttcacgaagcccctctatgagccagtctccaagagttcttgccatgtcaaaggaagaacaggaaacccctcaaattaaaaaggtatatgatatgctagttaagacccatcctaattatcataatttcaagatcttaaatgacaatagctgggcattggctcaaaagaaggaagaagaggacctttttgaaaaccaagtaaataagctcgaatctgaaaacaggaaattgagaaaaaagcaaaaggagattatgtcttcaaacagttggaagatgacaaagccattaagacagcttagaaataaaaaataa

SEQ ID NO: 1388 - DNA, 636 bp, Methanobrevibacter ruminantium
  source 1..636: mol_type = genomic DNA
atgaaagctaaagagatgatggataagaaatttgtttatgtatcaaaagacgatacaatagaagctgtttctataaaaatggaagaatctaaaagattcactgcccctgttttagataaggacatgaaattggaaggatggattacttcattcaacattacaaaaggcttgcgcgaaggcaagaaactgatttcagaggtaatggatcctgttgagaacatattggccattaaggaagatgaggctgcaaagaatgcggttattgaaatctcaaagcataagctaatcagcgttcctatcattgatgatgaaaataaggtcattggagtatgcagatctgtagatgtggttgattcaatgtcttccctttatgacattaaggttagcaagatttatgaagctatggaaaaagagcttaaaggggttacttgggatgaattgatggaggcttctgctaaaatcagtacaagaaccacaggggtaaagatcactgctgaagaatatgagaagaatattcagaatgccactttcggtgaagcgatttgggcaactggtggacttgaaaagttctttgcaggtcttatttcagttggagaaattgtaattgcacgtaaagtaggccgtgcaagacgctag

SEQ ID NO: 1389 - DNA, 828 bp, Methanobrevibacter ruminantium
  source 1..828: mol_type = genomic DNA
atggaaattaaactaaaaaagcagattgaaaccttagagagggaaataactcttaaatctgtagatttagatgaagatattgaagattttaatgtggatattcatagctatgaagataatgacaagctcattaccatttcacctcgctgtgtcagatgcaatctttgtgtagaggaatgtcccattaatgtaatcagttcttccacttggcttaaaagggctaagattggcgaaggctgtgtgcaatgtgaaatctgcgctcagacttgtcctgtttcatgcatttatgtatgggatggggaaactgtaattaaagaggatgattctgtagaatacaccttaaaagagcttaaggttccccatagaaatcttaaaatggaagacatttccataaatcgtgaagtctgcattggctgtggctcttgcctgaagtattgtcctactaatgcaatatcccttagaagcaaggagtttattgaagcccatggagaggaatgccctgaagttggagccattgactctgaacatggtcatatgtattcatatattgataaggaccgctgctgcggttgcggatcttgtgcaaacttatgcattcagggagcaatcactcttaagagagatttaggtcctgtggttatttacagccaccttgatgtaaatcaggacatctgtgtggcctgtgagctatgtgaggataactgtcccgtcggcgccataaaggtggttgatggtgagatagttcttaataatgacaaatgcataagatgtaaggaatgcagttcaaggtgtcctgtaggtgctttgaatttggtttcagataattag

SEQ ID NO: 1390 - DNA, 1029 bp, Methanobrevibacter ruminantium
  source 1..1029: mol_type = genomic DNA
atggatgaaaaggatttaaaatcttcaaataatgtgactgctgaggatttaggcgttgatgagatagtctatgatgcaatcaatgtagatgtcatcggctttggcgcattgaatgtggataagctttaccgtgttggccatattgcagagattgatgaagaaagcttcatcaaaggagaagagcaatctccaggtggttctgcagccaatacaataatcggcctatctaagcttggatgctccacatcttatatcggaaagatagcagatgatgaggaaggagacctattggaatataaccttatggtcaataatgtctatctgacaaatcttatctatgccgatagtggcaattcaggcaaagtacttggatttgtctcagatgagggagatagggcattatatgtcgaccctggagtaaacgatgacataactattgatgagattaatccattgaatgtaaatgcctgcaagatacttcattacacctcctttgtaggggattcctttaatgctcaaaaggaattgctcaatgtcttaggtgatgatattgtattaagctttgatcctggaatgctatatgttaaaaagggagtcttagaacttaaggaaattcttgaaagaactaatattcttctcattaatgaaaatgaactgaaaatcctctttgaagatcattataaggaaaaattatctgtctctaaggatttgacctttagggacttggcagttttcatccgtgatgatggcattgatacagttgttgtaaaaaggggagaaaatggagtctatgcaataaataaagatgatgatgaggttaaggcacctgcattcaagtgtgaggcagttgatacaactgctgctggagattcctttaatgcaggcttcctgtattcatatcttaagggctatgatttggctaaatcatgtctgattgctaattgggtggcttctaggtctgttcaggcaattggaatatctggattgcctaatctggaagagctggaagagttcatatcttccttatga

SEQ ID NO: 1391 - DNA, 891 bp, Methanobrevibacter ruminantium
  source 1..891: mol_type = genomic DNA
atggtaaattatgataaggttgaagataccttctttgaatcatttgatggaatgtatataagagcattgattacagcagaagacgaattgactgtaaaggaagcagcatatgatgctacagctactccaagtgcagttattggcagggttgaagcaggtgtagagtcctttgtaagtggagataagactccagacggaaggcctggagccattgttcagttctggcttaccgatgacttggctaagtttgaaaaggaactgtcctataggattcgccaggacattcttgtaaagccatttacaagggtattcagcataactgaaaatccggtaggttcaattcctatgatggaaagcgtaggccattgcggtgacggctatgaatgggaaatcgaggagtatggaagaaagatgatcaatgttcctattgcagttcccgattttcaaatcgagtcagagcttgcttatgcagaaggaatcatgggaggaaacttctggtatatgtgttccactaaggaagctgtattgaaggcaggaagaataataatagacaccattatggaagttgatggggtctgcactccatttggaatatgctctgcagccagcaagcctgaaacaaacttcccagagattggtccaagcactaatcatccttattgtccttctttaagggaaagacttggcaaggagtcaaaggttccagaaggagtaaactatattccagagattgttattaatgcagtaagtcaggaagctatgaacttggctattaagaaggctgttgatgccattattgacataggtggtgttgaaaggatttccgctggaaactttgagggccagttaggagagcataagaccaatttgcttgatatcttaaaggaatga

SEQ ID NO: 1392 - DNA, 1107 bp, Methanobrevibacter ruminantium
  source 1..1107: mol_type = genomic DNA
atggtaaaaaaggtttttatcacagattgtgaaggtccattgactttaaatgacaacgcctatgaactagctgctgaatttattgaagatggagataagctattcaagatcatcagtcgctttgacgactacctagttgatgaggttcatcttgaaaactatcatgcaggggacactctcaagcttatcgttccattctataagttagcagggcttacaaacgaaaagatgattgaattttcaagaaataatatctatattgttgatggctctaaggacacccttaaattagcaaatgagcttatggattcttatatagttagtacaagttatggccaatatattgaagctctatgcaattatatgaactttccatttgaaaacacatatcacacacaactagatatagatggggctactaattttaaccaatctgataaaaaatcatcaacaattggagtcaagtctccattgtttattgaagagcttaagaaagtggaggaatttagaaagataattcttgagcatggtgatgaaaatgaggatgacttcaatgtattgtatgacattttctttaatgagtttccaaagcttgaaataaacaagtatatccaaagtgttaagactgttggaggaaagggcaagcagattgcagttgaggatatagtggagagattatctcttgaggaaggttccataatctatatgggtgacagcataaccgatgtagagcctttgcagtatgcaagggacaatggtggtttatctgttagttttaacggtaacgagtatcctttgaatgtggcagagatagctgttatttcagacaatacaattgtaagctcaattcttattgatcttcattccagatttgataaggattatgtaattgattttgtgaaagcatatgctgaaaaaggtccagatgatgcattcaaggattttgaagttgattattcacttgttgaagagtttgaaaagatattttataataggcaggcccctataattgatataattacagatgagaatagggattatctgcttggattaagcaagaagatgagaaatggcattcggggtaaggatattggcggattaggataa

SEQ ID NO: 1393 - DNA, 114 bp, Methanobrevibacter ruminantium
  source 1..114: mol_type = genomic DNA
atgattcataaaaaatattatatgaaaaatgaattttatctgttaattaaagagattaatcaaaatatgatgtttatttattcaaaagagtattatccaaagacaggaagatag

SEQ ID NO: 1394 - DNA, 1452 bp, Methanobrevibacter ruminantium
  source 1..1452: mol_type = genomic DNA
atggtaactgtcaaccctataccaagaccattgcgtgatgttcatatagaatatgagattgataatgaaaagtgcataaattgcagtgataaaccttgcttaggcgtttgcccgattgatgcagtctatcaggatgaaaacaccaaattaatcaagttagatgagcactgctttggctgtgtattatgtagcaatgcatgcccttatgatgcaattcacataaagaagaccttatctgaacctatccgtgaaaatgttccaaacattaataaaaagctttgcagagcctgtggagcatgcgttaacgcatgcaagtctggagctatccatctcaagtccactggaggagaggagatgcacagtgaaatagatgagaataagtgtatccgctgcggatattgtttcagggcttgcccaactgatgcaatcaagtatggagagattcttccaaagacagttaaggaaggtaagactctctgcattgaccatgaccaatgcataggctgcatgacctgtacaaggatatgcccttccaagggagctataaatgtcggaaagaccaataagctgccgttcattgaccctgcctactgtgcaagatgtgaagaatgtatgcatgcctgccctacatatgcaatagactatgttgaaagggaggaggcatttgagtcattcaataaaatcaagacattggagatagcatctgagatattggatagggatataaataagatatccaaaggcataaccaatattgacaatgttttggtgaagctccttgatgacatctctaaggattatcatttcgatgactttgactatgaaaactcaatggacattcgagacgttccaaggggaatggagttttcagatgttgagatattcacatgcacaaactgcagatccattgtagttaatgttacagaatacctgaacgagcgtttgaatgcccagttgaataaggatttggatgttgtaaaggtattggaccttgtggaattcttcccgccttcattaggaattgaagtggtggaggaaaactgcataagctgcggattatgtatggatgtatgtccaaccaagtcaataagccttgacggacctaatccaattaagatagatacagacaattcatgcgtatactgcggattatgtgccgaggcctgtaattttgaggcaatcaagcttgccgaagagttctttacaaacagaaaccatgagatattctttattaaaagagaccttaggggaagaagaaacggaactgtagagataaatcattccgcttgccaattatgtgaggtctgcattaagaactgtccggttgatgcaatgtcagttgaagatgatatgataactgtaaatcatgatgaatgtatttcctgcagaaactgtgagggaatctgtccggtaaatgcagctagagtctctacaatatggcagttcttatag

SEQ ID NO: 1395 - DNA, 1035 bp, Methanobrevibacter ruminantium
  source 1..1035: mol_type = genomic DNA
atgtcctcaattatttggtatatttatgaatttgcaagaaagacttggatagatggcttctttgatgcaaaatccaaagaggacatagcccataagccagacagattcagagattttcctaatgtaatcaaggaaaactgcattggctgcggatcatgcacagcatcctgtccatctccaaatgcaatcaaattaatcagggattcagatacagaagacgcctttggcctaatctatcctgtaatcaataaggcatcctgcataagatgcgggttctgcgctgaagtatgcccatccactccaaagaccttggaatgcggagagaatcactttatccgtgaagagttcaatatcattccatctaagagaaaatacattgtagacgattacctatgcataagatgtcataagtgcatggacgcctgtgaagtgggagcaatcgaagagtttgatgatagggtttctgtaaatcagtccaaatgcatttcctgcggcaaatgcctagaggcatgtcctgttaaaggtgctatgagaggagtatttgtaaataacctggaagagcaaaagaaaatcatcaaccttgctgtaactactttagaggattatatagaatcaaagcaggatgatttgattcaattaggcactgacaagctatttttagatgaattaccttttaaacctatttttgataagtcactgaatatcctaaatgataaggaagtggttcacgaggttttagaggatgcaatcaacagattgaaaatcagaatcataacctgggacagtgagaactgtaaaaagtgtcaaatgtgcattccagactgtcctaccggagcaatctcctttgattatgacaaggacaccatagtgagggataaggaaaagtgcttaaggtgcagcatctgctatcagacctgtccgtttggagtaatcaagtatttcttagctaagtttaatctagataaaaacgataatgatgaagaggttattcacatctctgtaaaagcttctcaattagcggaaaggagggcttaa

SEQ ID NO: 1396 - DNA, 1128 bp, Methanobrevibacter ruminantium
  source 1..1128: mol_type = genomic DNA
atgatattaccaattggaccaattcatccaggcttaaaggaacctttaaggcttaagcttcaaactcaaggtgaaaaggttataaaagctgagattgattatggttatgttcataggggtattgaaaagattatggaaggaaagacttggcagaaatgtatttacttatctgaaagaatctgtggtatctgctcatatgaacacacacaaacatttgcagagactttagaaggaatctctggtgtacaagctcctcttagggcacaatatttacgtgtaatcacaaacgagatagacagaatccagtctcacctgcttgcaaattcaacattcttcaagacccttgaccatgagacattgttcatgcatgtacttgccttaagggaatatgcaatggactctcttgaactattaactggaaacagggtcaatctaggctggaatgttgttggaggggttagaatggatgccgatgagcgtcattttaacgctatccttgaaaacatgaagaaaatcgaagatggattcgacagacacgttgcattgtttgaagaggctcctatagttgccttaagggcaaaaggagtcggagtcatgactaaggaagaggccataaaaggccatgcagtaggtcctatcggaagggcttcaggcatcaagcatgacttaagagaggaacattatacttataaagatcattttgacttcaagcctatttggagaaaggagggagacaattatgcccgtactttaaataggctttatgaagtggagcaatccattgacttggtaaggcaggccattgaaaacatgccaaaaggagatataagaactcctgtagacatcccttcaggatatggggaatggagaaatgaggcccctcgtggagaggtaagatatatggctgaaaccaatggcgatttaatcaagaggatttcaattagaaccccaagtattatgaatattgattcatgtgcaagatatatgcttaaggacgttgctacagttgctgatgctgtttcaacctatgcatcatctgatccttgcattgcctgtactgaaagggtggctataactgatattgattctggcaaatataccactaaagacttttttgaggtgaaatag

SEQ ID NO: 1397 - DNA, 462 bp, Methanobrevibacter ruminantium
  source 1..462: mol_type = genomic DNA
atgcttaagaaacttaaagatattgtgagaaaaagttcaattcatgtctgtatagtaaactgcggaggatgcaatggctgtgatgtagagttagttgcacttttgtccccaagatacgaccttgaacagtatggaatctatgttcacaataatcctcgtgaagctgatgttcttttagtgactggtgcagttacagaacaatggagagacaatttaagaaggatctatgcaaaggctcctgaacctaagattgtggttgcagttggaaactgtcctcagtccggagatgtcttcgcacaggaagggggaagagttcttgctccggtttcagacttcattccagtggatgcagccattcctggatgtcctccaagaccaagtgaaattctagaggcagtcttgacagttgctcctggagctattgcagctaaaggaagagctcaagatgcaagaaaagattag

SEQ ID NO: 1398 - DNA, 384 bp, Methanobrevibacter ruminantium
  source 1..384: mol_type = genomic DNA
atgaatagtgaagaaaaatacgaaatgatgaaattaagagttcttcatagttttaaatgggaaaaggatcttaccattccattatctgaagaatttggaatttccaaagaggaatttgaagaaattcttatgaatcgttttgacatgagtgatttggaaaatatgcatgctacatttgaaatagcaaatagagaaaagataaaaagacagatgcatcttgatttaagactctattggctaagcgatgttgctaaattaatatctgaagaggatgcagatagaatttgccatcaattgacaaaggatgttattcagcatggcaaaaaatacgaagatgccttagatgaaggcagagctcaaatagttgaattattaagagaataa

SEQ ID NO: 1399 - DNA, 333 bp, Methanobrevibacter ruminantium
  source 1..333: mol_type = genomic DNA
atggaagaattatattatatgatttatattatagtttttatagtaggatcaattcttggcctattattaagctataagaagcatatggaaccttttataatatctgaaattgatgttttaaccttagttttagctatagtcggatggtttttattattaaaccatggcttgattggatttgttagttctgtaattcttctcaccatagcattcttctgcattggtcttgcaataggaagaaggccaggatatggtagaaaggaaactgcaatcggaattttggttgcagtaattgtctggattttaacatctggagtcatatttaaattttag

SEQ ID NO: 1400 - DNA, 156 bp, Methanobrevibacter ruminantium
  source 1..156: mol_type = genomic DNA
atgaatgatgaaaaaggaatgagagtattaactttcattagttgctttaggagtctttattgttgcaggtttagcagcatacttccaaagcattctagcatttcctatggctataataggtttaatattcgttccatttatattgatgcaaaatag

SEQ ID NO: 1401 - DNA, 861 bp, Methanobrevibacter ruminantium
  source 1..861: mol_type = genomic DNA
atgaatctaatggctcagattttaatcaatgtagtaatagctttccttgcaggtagtcttttattaggtttccatagaaaagtcatggcgagagtccaattaaggccaggacctcctattattcaatatctattgcattcattgaaatttttctttaaggaaacaagcttccctaaaactgcttcaatgccattttatgtgggaattacagtaatcctagcaggtatttgggttaccggagtaattgttggtccggtttgcaagggttccttaatgataatattcggtatctatgcaatccataagattgtagagcataatgcaggatcctcatcaggttccccttacggtaagctaagctgtgtaagggctgtattctcagcggcaggagaattgcctctctttgcagtaattgctgttgtcttccttctaactggaaccatggatattggtggaataatacaatatcaagcagcaaacggtcctttggcatttaaaatccctcttgcagcaatcatgttctttacattgatagttacaaaatccccttattctccttttgcaataacaaaaggaaaggaaatcattacaggatttgaaaccgagcatttcggtatgcttagaggatatataatgttttcagagtcaatcgcttggtatatcttgctatggctcttcttgacaatattctttgcaccgataggagtggtgggataccttataggaatgattttgatatgtgtgattacaggatttatcaatgctacaactcctatgttaaatccaaaccattctgtaatggctcaaatatccattgcagttatttgcgttgttggttcaattatcatgattattatttaa

SEQ ID NO: 1402 - DNA, 216 bp, Methanobrevibacter ruminantium
  source 1..216: mol_type = genomic DNA
atgaaaaaaatggaaatggctagttatattatcttaattgcatctgtattagctatactttatgcattaatatttaatccagctgattggatagtctatgctatagctattgtatgcataccatttttagttctttcatttggtctattaaccatgtctaaaccaataaaagaagaagaggaggaaagaagagaagaaccatttacaggttattaa

SEQ ID NO: 1403 - DNA, 669 bp, Methanobrevibacter ruminantium
  source 1..669: mol_type = genomic DNA
atgcttatagagaacttaggtggagactttttaggaacaatccctcttggagatattgttctatacttaaacccgctccatatattcctgtttgttactatacttctatttacagctctaatagcaatcagtcgtactgaaacacaagttgaagctatgtttggctcacttgatgagaataaggttgcagtgggactgaaggagtttaagcatagaagattcttagcgataatatgtggtatagcaacagcgggagctatgattacaggggacctttttaacttcaccctatttatggccttgattggtattgtcaatattggtatcgtttcagctgtaaagcaagtggaagtcttaaattcagcttatcagtatggattgattgccatgatgtgtggattgccattgtttggtggagcagctataatattggcagctacaggtaccttaagcttgtttgagcttgcaagcattccagcaaatcctatgatgatatttggagcacttgttatgctaattggagtctgcggtgaaagcggtatagctccattctttgcaagcaaggcagagatgtttagaactccaggatctccattcattttgattattcacttaagttcattgttccttatagttagatttattgaaatcctattgactatattgtaa

SEQ ID NO: 1404 - DNA, 678 bp, Methanobrevibacter ruminantium
  source 1..678: mol_type = genomic DNA
atggtagcaagcgtaatccctcaagttgttccggctttctatagctcaatgtataccacagccttatatggtggtttgattgtagcttttattggcttgattggagtggcaatggaaaagagagacattcagattcttattctaacagatatagttggattggctatgcttatcgtcgtagctgcagttggaactgacttgtctgaagcattgatccttccaggtctggtagttgaattggcagagatcatggcaatttcagagatattgatatctcgtgagatgagaaaggctgataaagatacctcatttagcccaatgcctttagatattgatatggagattatgacaactgctcctaacttcattgcattgcttctaatcggatacggcatattcctgtctggttttaccggcggtgcagtagctggcggaggtatcgtcatttatgtacttagtagaaaggttagaggattgccgatatttgttcttgatggcgtaggagcaatatcaggtatttcctggtgtttatggataatcggtttcatattcttcttcatccttccgcaatactggcttttaagcctattccttgcagctttaggacttttattaaaggttgcttcaaagatcggattgattggaatacttatgagagaggaatatggaagaaaataa

SEQ ID NO: 1405 - DNA, 600 bp, Methanobrevibacter ruminantium
  source 1..600: mol_type = genomic DNA
atgcctaaaattgcaaaattatggaataagctagcagatccaaagaacattcctaggctgtttgctgtaattttaggtctgcttctcattgccggattcctaatccctatgggattgaatacagatcaaatctacactcgtccggcacctcaaagtcagatggatgcaggacttcctcttgcgccatacgataggggaggagaggttttagagtctccaggcataacagaagcccaatatcctgaaaatgcagagaatcttggctggataaactcatatatgactccaatagcagagatgctcaagggaatatccccatactttggaacaagtatctgttcatctccaggtggtcttattgatgaaatcctttattatacaagaggtttcgatacaatccttgaatcctccattctcatgatggcattcataatcgcttcatggcttgcaatcaactttacaatggataggacaaaggatgaaagggatattgctgaagatgtaaaaagagccattgccagttctgacagactagccaatgaggttgaagaaagcaatagaaaggctcgtgaaaaacaagccaaaaaggagtttaggtga

SEQ ID NO: 1406 - DNA, 261 bp, Methanobrevibacter ruminantium
  source 1..261: mol_type = genomic DNA
atgtttaatctggctatttgggtttatttaggtttggcattagctatttttggaagcctcgcaactgtatggggtcctggagtaaaggatccagttattagaacaataaacacagaagttgcatccgtaggagtttcattaattttactttgttataattctacattggctcttttgacattgattgcaactacaatcattgttaccttaatcttgtttagagctatttctcgcttagaagagataggggctgatgtataa

SEQ ID NO: 1407 - DNA, 342 bp, Methanobrevibacter ruminantium
  source 1..342: mol_type = genomic DNA
atgttggaatttataaatatagaaacaatatcaatggccttaatgattataggtgccattggagttgttcttcttaaaaaaccattggataaaattattatggtttcagttctggaagcaggtctgtttttagctatcgttagctttaaataccttgatgtggccttcctaactgcagttctcgatccattatccatcattgtattcttacttgctttaattaaaatcaataaagtgcgcaagtctaaattagaggactattccactttagacaagcttaatataagcactgaaaatctagaagaaaaatcattagataaaaactctgaaggaggcaaataa

SEQ ID NO: 1408 - DNA, 279 bp, Methanobrevibacter ruminantium
  source 1..279: mol_type = genomic DNA
atgtatatagaaatcataggagttattacaattttaatggctttaagagcagtaataactaaaaacagagcagaaaagttactttacataaatgtaataggtttctgtgtatctgctatcattgcattatatattaaaactacatttggctttgtattagctgcagctttcttcatttcctctacaatcggttcaaatgcaattgcttatagcttaaaggatttggaagatgagataagctatgataaggatatggaagaaagggatgaagagaattaa

SEQ ID NO: 1409 - DNA, 501 bp, Methanobrevibacter ruminantium
  source 1..501: mol_type = genomic DNA
atggatatgatcattggaataatattagctgcagttatctcttggattaattttgtagttgttgacacattcctaggcttgcctgaggctccaggagttaagggtgcagagactgttggctattcaatcaaggaaaggaaaggagatttggctggaggtttcttccaaggaaacattttatgttctccagatgcttcagcaggaaccttgatagcagcaataggagtctatgctttaggaattcaaggagggcttattgcagcattgcttgtctatattggaaacaggctatgtgcagatccaggatatgccggaacctgcggagcattgaccatgacactattgatattcattttctcatttgttggaatcgaagttgagatgttcatttgcggaatggtgattgcaatatttacaattcaaggaattcatcatcctacaagttccagattgcttggaaagattgctaagtcctttggcaggtatactaaatatgaataa

SEQ ID NO: 1410 - DNA, 327 bp, Methanobrevibacter ruminantium
  source 1..327: mol_type = genomic DNA
atgattagtataggtgctaatggatttcaattgttgataaattatatagtggctatagtagttgcagtcattatcgcttttgccttaagattgccacttcttcccgaaaggccaatcaggttctcttggactactagcgcactgtttccaacccctatttttgctataggaatattggcaatattttattcattaaatgtttattggatttatgacggtctcatcttaagcgtgattgtcggattagcttccgctctctttgtaaagtatggatttgactacatattcccaaagcctcctcaaatcgaagacggggggaatgtctaa

SEQ ID NO: 1411 - DNA, 936 bp, Methanobrevibacter ruminantium
  source 1..936: mol_type = genomic DNA
atgaaggataaaaacgttgtagtaacaggagggcttggatttataggatcccacattgtagatgctcttatagatgacaataaagtcacaataatcgacaatctatcaagcggtaagatggaaaacctaaacaatccgaatcacgagaacttgacaatcatcaaagaggacttgatggacgcagacttagaaaagatattaaaggataaggactatgtcttccaccttgcagcacttgcaagcgttccaggaagcgtagcagagcctttaagatacaatcaaaacaatattgacgctagcttaaagctatttatagcctgcaaaaacaacaatatcaaaaaagtgatcttctcatcttcctctgcagtctatggggaaaatccaaacatgcctcttaaagagagcgaaaacttccttccttgctccccttatgcagcccaaaaggcaagctgcgaactatatttaaagtcattccatgaatcctacggattggattatgtagcattaaggtatttcaatgtcttcggtcctagacaagatgaaaactcaccttatgctgctgtaattcctaaattcatatctgcaatccttaacggagaaagtccagttatttatggtgacggcgagcaaagcagagactttatttatgttaaggaaatagctaaagcaaatatcctctcagcagaatcagactacaatggagtcatcaatgttgccctcggcaagtcaatgacaatcaacaggctatttgaaataatcagcgacgttctagaatcagacattgatgtaaaataccttgatgaacgtccaggagacattaagcattcccttgcagacattagcaatttggataagattagtttcaagccagatgaggacaagtttgaagaacaattgagggaaactgtaaaatggtttataagccagatggaataa

SEQ ID NO: 1412 - DNA, 1494 bp, Methanobrevibacter ruminantium
  source 1..1494: mol_type = genomic DNA
atgaaaatagaagtactggatacaacacttagagacggagagcaaacccctggaatatctctaaacactattaaaaagttaagaatagccacaaaactagatgagataggagtcaattcaatagaagcaggatctgcaataacctccgaaggggaaagggaagcaataaaggcaatcacctcccaaggactgaatgctgaaatcgtaagtttttcaagaaccctaataaaggatgtagattattgcttagaatgtgatgtggatgcagtcaacattgttgttccaacttctgacttgcaccttcaatacaaactaaaaaagacccaagatgaaatgcttgaagatgcagtgaaggtaacagaatacgctaaagaccatggagtcaaagtggagcttgcagctgaagactcaacaagaacagacatccaatacctaagaaaaatatttaaggcaacaatcgatgccggagcagacagaatctgcccatgcgacactttaggaatcctaacaccacttaagtcctttaacttctataagcaatttacagacttgggagttccagtaagcgcacattgccataatgactttggccttgcagttgcaaacaccttatccgctatcgatgggggagccagcagattccatgcaaccataaacggacttggggagagggctggaaacgccgcccttgaagaggttgtagtctcactatacacattatataaagacgaaagcaatgaaagaaaatacgaaacagacattaagatagatcagatttacagcacttccaaattggtttcaagattaagcaatgcatatcttgctccaaataaaccgattgtaggtgaaaatgcgtttgcacatgaatctggaatccatgcagacggagtcattaaaaacagcgcaacatatgaacctatcatgccagagcttgtaggacacagaagaaaatttgtaattggaaagcatgtgggaacaaaaggcttaaacaaccgactggaagagcttggccttgaagtaaacaagaagcaattaaatgatattttctataaggtaaaggaccttggagacaagggaaagaccgtaacagacacagatttggaagcgatagcagagcatgtcctaaacatagagcaggaaaagaaaatcaatcttgatgagctgaccatcgtatcaggtaacaagatcagaccaacagcctcaataaagttgaacattgaaaatgaagaggtaatagaggctgatgtaggtataggtcctgtagatgctgcaataaatgctgtgaataagggaattaaaagctttgcagacattcagcttgaagagtaccatgtagatgcagttacaggaggtacagatgcactcattgaagtaatcatcaagctcagcagcggagataagatcatatcagcaagagcaacagagccagatattattaatgcaagtgtagaggcttatatagatggtgttaataggttattggagaataaataa

SEQ ID NO: 1413 - DNA, 525 bp, Methanobrevibacter ruminantium
  source 1..525: mol_type = genomic DNA
atgaaatacaataaagaattagctaatttagacaatgtagaaatattaggctttaaaggaactatagaaagcattccaaaaacattggaagagatagacaatatcagaaatagctgttgtgatgttggaaccatccaacttatgaatgcagatgcaatagctgggcctaaacaccttgaacatggaacaatccatgcaatgaatgcatttgaaaggggagacaatctagctaatgatttaggaatagagatcttacttagaacatctgcccaaaggcaaatatccaaggcctttaagatacttggactgaaggaaggggaaatgaacatagccgttgtaatgatagattgtccagattactttatcgatgaattatctaatatatttataagagatgatagcgttttagaagccgacgaatcaaaattaatgaagatatatgatattcctgaaaaagaattaaagaccatacatcttagcgacatattaattgataaaacaagcaaattaatcattgcccaataa

SEQ ID NO: 1414 - DNA, 1443 bp, Methanobrevibacter ruminantium
  source 1..1443: mol_type = genomic DNA
ttgttcgctatagtaagcctatctgcagtcagcgcaagcgatgatttttcaagttcccttgctgatgactctgactctgatattcttgctattgacgatattgcacaaaaggacagttctcataaactgatggatgaagaggacattagtgttgaatttgaaattgatgatggggatgatgatactagctatgattcctactatgacgattctccaggtgatgactggtcaaactatgaggattacgaccctgaattaattagtgaagatgctatattaactaaaatagaagtcttgaatgtccctagccattatggtgatgacaacatttcatttagattaatcgatttgaatacaggccttccaatacctgatgttaatttaggccttcaggattcctatgattatgatgtctattcattcttcacagatgaggatggtgttgtagtatatcctatccctgttaaagttggagatttctctattgtcataggattttatgaggatatgatggttgttaatgaattggatgacatggtatgtaactttacaaaattaaatgtctcaattccaactgttccagcttcaataaagattacaaaaacaggcacttattataatgatacagtattaaaggtttctttggtcagttctgttaaggaagtcttatcaaatcaaaaaatcaatctcacattttcaaatggtaagaaagccacagtgaagactaattccaaaggaattgcaaactatgcccttaaatttgcacctggaaactattcagttacagcagctttggtttccgatggcattgttgaagccaataagtccagcttgaaaaacatcaagatcattaaggctccaggcacattaagccctactgcattgtcaaccacttatgcttctggaaagtatttccaaatcaaattgacaaattccaagacaaaaaaagccattggtggagttaagcttaacttgaaggtatatactggtaaaaagtataagacagttacagtaacaaccggatcaaatggaattgccaaattttccgcttccaccttatctgtaggaactcataaggtaattgtaaccgtaaaggatacaaaatatgtctctgcaagttcaaaaacaagttccattaagatttctaaagcaagcagggcgatttctgctccgaaagtcacagccaaatataagagcagctcaactttcaaggtaaccgtaaagaataaggcatctaaaaaaattcttagcggagttcaagttagcttaaaggtttatactggcaagaagtttaagacatacaatgtaaagacaaacagcaaaggagttgctagctttaataccaaatccctgactaaggcaaaccataaggttattgtgaatattaaggcaagtgcaaattataatgcagctagcgctactagctatattaatataaaataa

SEQ ID NO: 1415 - DNA, 1503 bp, Methanobrevibacter ruminantium
  source 1..1503: mol_type = genomic DNA
ttggaagagaatccaattgattttaaggataattcaatcaattctaaagccttaaaggatagcgattacgagcatgcctctgatgagttgtctcaagacttatacaatagaatcataaatgcaaaggaaaatgaaataatattaatcgagcctggaacctataagatacacaaggtccatcttacaaaaaacataactctgcaaggaactggcgacccaagagaagtgattatagacggtgagcaattaggaagtgtctttttcataaatgatataaatgtcacagctcaattttacaatttaactataataaatgggttatcagataattttggcggtggaatttgtattgaaaccggaaatacatatgttgataattgtatcttcataaataacactgctttgaatataaccaatggtggagctatctccaattatggaaatgaaaccaataggagttatttatttataaacaactcattatttattggaaaccatgcagatcatgatggaggtgccgttacaacatgctatgcaatttccgatatctataattctgtattcattaataattcagctgtaagggatggcggagcaatccgtgtaagcgtttatggctatgggaatgtccaggactgcatattcattggaaatcatgcagatgaatgggcaggtgcctattatagctgggctggaaattcaagcattgacagatgcatatttctaaacaacactgcaggaacaaatggcggtgctgtaatggtttccggaagccttaatcttaccaattccttaatcgtaaataacaccggaggcgaaacaggaggttccttctatattcagcagcctatgtttgatgcaaagacggtcataaatgtaaataacaacattattacaaataattcatctcctttaggaaaggaaatctttgtaaaatggaacgctacccaattattattccctaatttcaacaataacgattggggagacgaggaccctacaggccctgatgtggttgaccctaataatgtttcagataggataatccctgagcgaactaaaagaattacagttctttatgacaagttaaactggggtttattagatagatatactgatgttttagatgattattatggaaaatctagttcatccgactctaaagcaaattcagatacaaaaactaatagcagcggtttaaaatttgatactgagaacaagacaaatgacgattctaaagaagagcaaggtagtatattgaataattcaaatggatttgccttgttaaatcataataactcctcttcttccaattcaacagctggtggaggtttagagaaaaaagacaattcaacatttgtctctccaaaggattatcaaaagatggtggagctatttgaagacaatcctagtgcgtccaaatcaactgacattagatattttgcagttctagcatttatattgcttgtatttttagtgggtcttgctagaaagaggaaataa

SEQ ID NO: 1416 - DNA, 1014 bp, Methanobrevibacter ruminantium
  source 1..1014: mol_type = genomic DNA
atgaatcttaaatttaaaaaaccatcaagagaaagtcaaatggccatgtctaaagtggctattggtgaagataatattgattatcacaatatggccgaggaaaagctatccaatgccactaatcatcaatatgctaaattggtaaatagtggaaatgcagctattttaacagccatgaattctattgatggagcaattttaatacccgatcaaggagcctggaatggctttaagcagattgctaattttttaaataaggatttgataacagtcactacaaatcaatgcattattgatttggattatctgcaagaatccattaatcaaaatgacgacaatattgatttggatgatgaaaacaataagtctgccctatttttaacaagctttgcagcttatactgcagagcaggacataaaggaaattgcaaagttccttcacaaatacaatattctccttgcagaagatgcctcaggagccatttgtgatatgaaaggagatttggccaatggaaaatactcagacattatcattggatcaacaggctctccaaaaataatcaatgtcgaagatggtggatttattacaacaaatgataattctctcctagaaaagtcaagacttattttaaaaacttcaaaatgctcaaatatcacagcctgtggaatatctcatgaaatagaatatgcaaaggacaatttgaataaaacaattgatttcaccttaaatcttaaggaaaaattaaatgatagcactgattttgaagtatttcactcaaataaaagaggaatcaatcttattctaaagacaaacgaccctaaatcattatcatataagctaagacaggagtttgctctagacagccatggaatgattactaaatgtcctaattacaatagattgaaggaaaaggctgtagctattgagataaaaaatcttgatatttcctgcttaaatgagcataattctaatcaaatattcaacactattaaaaaatacgaagattttgcttaa

SEQ ID NO: 1417 - DNA, 1194 bp, Methanobrevibacter ruminantium
  source 1..1194: mol_type = genomic DNA
atgagaacatcaaaagctactaaaaatgcatatctggctaaattaactgaaaagatacagatgcagtcagttaatgtaggtcgcgaccttgacggaagcactcctccctcagtgttcatagggcgctggagctatcctaaggtatatgccggacctatgatggtagcccaaactggagatacagctattatggactctccagagagttggattggtcagaataaaacccaagaggatattattggctataggatgaatttagttagaggaaaacagctaatcagcattaaggatttggaaaatccttttgttgaaaagcttcaggacatttcccttgctgcaaagtcaattgacagcgaagcaacctttgggtcccggccaagcggtgcaatgttcaatgaggaaagcatgcctcatggccctagcgctgttatcgagaagtttgatatagatgcagttaaatgggacaggcaactggaaaaaagcttttatgacactgaccttaaggcaagggatgcggtgatgaatctccacaataaggatgttccattctctgccatgcaaaaggcattctctgtaggggcatttggtataaagaaaaacaggagacttgtacctacccgatggtcaatcacagcctgtgacagcaccattgcagatagccttttaaaggaagtgaggcattataatataatggactcatatagggtctatgagttttcaagccttaagaattattatgcaatcatcttaaccccaactgagtggcagtatgaatggtttgaggcattcattaagattcttggaaaggaagagatgatcttttcagattatgagacaaacactgataagagagagtatagctgtgttggaggatgctattacacagctaagatggctgtgctggataagctggccaagcttaagcttcagtcaggtgttatcattcttagggaagcatattcaggttatgtccctcttggagtgttcaatgtgagggaaaacattaaatatgcaatgaatggcgattataaggagtttgaatccttgaaggactctttagcttattgctcaacaaagcttaagatacctataagcaagtatgtaaagcagagcaatctcttaaatgagcttttgcattcacagcagactacattggatgcattctttaagaaatctccagatttgcaatag

SEQ ID NO: 1418 - DNA, 927 bp, Methanobrevibacter ruminantium
  source 1..927: mol_type = genomic DNA
atgttagaaccaaaagaatttatttctgatgcgattgcaaagatcaaagaggaaattggtgatgaaaaaaccattatcgctttatctggcggtgtagacagttcagtttgttctgtgcttacacaagaggctattggcgataacttaactgctgtctttgtaaatcatggattgcttagagaaggtgaagcagaacaggtttgcagtgttttcgaagaaaggttaaacttcaaatatatagatgcttccgatgagttcttaagcgaacttgcaggtgtagaagatcctgaagagaaaaggaaaatcatcggcagagtctttattgaagtattcgaaagagaagcacaagctgttgacgctaaatacttagttcaaggtaccattgctcctgactggattgaaactgaaggggaaatcaagacccaccacaacatggcattgccaagcggaatggtcttaaaggtagttgaacctgtcagagacttatataaagatgaagtaaggcttgtaggtactgaattaggtcttccagacagcattgtacaaagacaaccattcccaggtcctggtcttggtgtaagggttgtaggagaccttaccagagaaaacctggctgtctgcagagcagctgatgcaatcgtcagggaagaggttgaaaaggcaggcttggataaggaattatggcaatactttgctgtgcttaccgacactaaggttaccggtgtaaaaggagacgaaagagactttggctatcttgttatcattaggttgatcagttccattgatgcaatgactgcaaccgttcctgaaatgccttgggaagttattagaaccatctcaaaaagaatcacttctgaagtttctgaagtcactcatgttgccttatccattagtgataaaccaccaagcactattgaattctgttaa

SEQ ID NO: 1419 - DNA, 240 bp, Methanobrevibacter ruminantium
  source 1..240: mol_type = genomic DNA
atgtttgataatgcagatgacttcaaaaagaaagcactcgacaacaaagacgaattaaaaagagaatacatcaacattcctataggagaagacgaacaaagtttcagaatctctggaattggtgaaaaagctatcaaaattgaaaaatacgtaaaatatgatgacatggtagatgctgttgaatctggcaaggaagaaggtttagaagcagttatcatgaagtttgtagaagaatactaa

SEQ ID NO: 1420 - DNA, 567 bp, Methanobrevibacter ruminantium
  source 1..567: mol_type = genomic DNA
atgaaaattttagttattaataataaagggcagtacaatcacaggattcagagaactttacagaacttaaagattccatctgagcttgtaaaaaataaattatccatttcagagattgaagaaaaggagcctataggattgattctagggggaggaccttcaatcgatggtgtaggtaatgcagcagagtatataaaacattttgacattcctattttaggaatatgtttaggccatcagttaatagctaaaacttttggtggagaagttgccacttcagacactgaaagctatgctcaagtaaaaattaatattaatgaagaaaatccactttttaaaggtctcacatcacctatggatgtatggagttcacataaggatgaagttcattctcttccggaggactttgatatcattgcagagtcttctctttgcgatattgaagcaatgaagcataaagaaaaagagatttatggaattcagttccatcctgaggttcatcacactccaaaaggtgagtatatctttaaaaacttttatgaaatttgtcaaaattataatgagtaa

SEQ ID NO: 1421 - DNA, 147 bp, Methanobrevibacter ruminantium
  source 1..147: mol_type = genomic DNA
atggaaatcgatgaattaattacttacttaatcattattgcagttgttgcgattttaataaaaatattttcatggctcttgcctatctttgtaatattggctgtagcctatgtaatttatttatatattactgaaaacaatgcataa

SEQ ID NO: 1422 - DNA, 1446 bp, Methanobrevibacter ruminantium
  source 1..1446: mol_type = genomic DNA
atgaaaagaagatataaagttttatttctattggccatcttaactataataagcattaatgccatttcagctagcgaaattggcttagatgacaataatgcaatagatgagaatgatggatttaaaattaagcaagacataatgtctgaaaagataatctctgataatgaggatgcagattcaaataatgcaaatgatgtgaatacagactcatccgatgaagtaaatgaggataatgtaatagaacaaaatacagacactgatacagttgatgaggatgaagaagatccaatcattccagtagacactagattattcaatccagattctgttataaaaggaaacgatttaaacattgttctaaaagacatcgacaacaatcctcttgccaatcagacaatcaaatttaacataaatgacaaacagtaccaaagaactacggataaaactggaactgccaaattaaagattaacttaagcccaaagactcacactttctttatagagtatgacggatgcgatgaatactatccgaccaatttggtatttgacttaaaagtgataaagccagttcaaacaaaattaagcgtaaagtcaacaattgtgtataaaaacaataaattaatggtttatttaaaaaccagcgacaataaggcacttgcaaaccagaaaataaaaattggattgccgaaaaaaacatacacaagaacaactgacaagaacgggcttgcaagcttgaatataaatttaaatccaaaaacatacagcataaaccttagctatgacggcaaaggcaaatacctcccaacaagcaagaaaataaagattcatgtctttgaaaacgaattgcttggatccacatactatggaaaggtggaattgcttaagggaattggaaactcatcatcaaaggttaaaatagcttatgtggttggacttcatgttttggaacatcagatacacgatgaagtttacaatatcatgaagcagaagacttcaatgcattattcatataatgtctataagattaccttgacaaagaaatccggaaactacaatacagacaggatgagagggcaaatacttgccaaaaactatattgtgcctcatgttaacaagcaaaagtataatttggtcgttgacgttcattccacaactggagtctattataaaaaatcctacttcatacatgttcctcaaaacaggcataagccctccttaaacttggcgaataaagcaattaaaataataaacactcttgataagcaatcaaagattgtatattggtctccagactcacagacaagtccgccatatcttactttgcctatcatgaaagctggaactcctacatttgtctttgagaccttgacctcagagccagtctccagatcaaagtatagagcaaatattttaattaatgctgtggataagttatttggttaa

SEQ ID NO: 1423 - DNA, 948 bp, Methanobrevibacter ruminantium
  source 1..948: mol_type = genomic DNA
atgatttttatggaaaattatgatattataattgttggggcagggcctgcaggcctaactgctggcatgtatgccggtaggcagaattcaaaaaccctaataatcgataggggatttgctggaggcttaggtcttgaagtgcctttgatgcagaattatccaggttttgatttgatttctggaatggagctcattcaaaagatgaaggcacaaactgagaattattgtgaaataaaggaaaatgaaaccattcaatctatagaaaaaactgaagatggtttcctgcttaaaaccagaacttctccattattgatgtctgaagaaagtgatgaaataagggagtttaaagcaaaggcaatcattttagcaactggtgcctctcacagacacttgaatgttccaggggaagctgaatttttaggtcgtggagtggcctattgcgctacctgtgatggaatgttttttatagataggactgtattgatggttggcggaggaaacagtgcagctcaagaggcactttatctaaaaaaccttggatgcaatgtaaagctcgttcacagacgtgatcagttgagatgtgagcatcatcttcaaaaagctcttgaagaaaaggaaatagaggttatctggaatgcaactgtagaggaaatcaaaggagatatggtcgtagaatcagtaagacttaatagaaatggccaagaggaagattataagacagatggcgtctttattgcaatcggtgatgatccttccaatgagattgctaaggaattaggaatcgaccttgatgaggatggctatatcataaccgataagaggcaggcaacaagtgtggagcatgtttattccgcaggcgatataactggtggagtgaaacagtgggttgtagcttgtggagaaggtgctgtagctgctatatctgcttataatgatttgaatttgtaa

SEQ ID NO: 1424 - DNA, 1848 bp, Methanobrevibacter ruminantium
  source 1..1848: mol_type = genomic DNA
atgatgggtttagagattcaccagcaattgaatacaaaacacaagcttttctgtccatgttctaccgaacttaccgatgatgaatttgatgacggtatcatcagaaacctaaggcctacccaaagtgaattaggccaaatcgacagagctgctcttcaagagtctctaagacacatgacatttaagtacgaatcatttaacaatcacacctgtcttgttgagatggatgatgagcctccacatgcattaaacagggaagctcttgacatatgtatcacaatcgcttcacttttaaatatgaaaatggtggatgagttccatacgatgagaaagcaggttattgacggcagtaacactggaggattccaaagaacaggtcttgcagcaactgacggataccttgacactccatacggcagagtggctatagagtcattaggccttgaagaggatgcagcaagaagaatcgactcagatgatgagtttacccaatttaggcttgacagattgggaattccacttgcagaaatcactacagacccttccatgcaccatccggaacagattaaggaagttgcatatatgatcggacaggtcttaagaagcacaaatgttaaaagaggccttggaactatcagacaggatgttaacatcagtatcacaagaggtgcaagggttgaaatcaagggtgttcaggacttggaccttatgcctgagattgttgaaagagaggttcaaaggcaattggcacttgcagacattaaggatgagcttattgcaaggaatgctagcgttgatgatacaatctacgaccttgatgaggtctttaaggacacctcatctaagatattgtcaaaggccaactgcataaaaggtataattcttagaggctttgacggcctcattggaaaagaggtccagcctggaaggagattcggaacagagctctctagctatgctaaaaagatgggtgtttcaggtcttttccatacagatgaattgcctgcttatggaatcaaggcagatgaagtggatgctatgaaagagttccttaaaatcggccctcaagatgcaatcatcattgtagcccacgatgaggatatcgctataaatgccttaaatgaggtaatcagaagggcagagatggcatttgacggcgttgtagaggagacaagaaaggcattggatgatggaaacacagaatatatgaggccgcttccaactgcaaacaggatgtatcttgaaacagacattccattgttccagattactgatgatatggttgagccaattaaaaacaaccttccagagcttccagatgctaaaaaagaaagaataaaagcagagtataagctcagtgaagatttagctagccaaatagtcagaagacttttaggagacacttttgagtcattattggctagggttaaagtggatccaaccactgttgcttcagtccttgtatcagaccttagggatttaaagagggaaagatataatgttgatgtattgactgaagacaaacttgtagaagtgttctcccttttagaggcaaataaaatttctaaagatgctttaaaggacctgcttgtggaagtctgtaaaaatccagatgaaaatgttgaaaagatagctgaagatgctaaccttacccttttaagtgaggaagaggttagagcgataattcatgagatagctcaaaataatgaatccatgattaaagagcgtaatatgggtgctatgggtcctttaatgggcatgagcatgaaacagctaaaaggaaaagcagatggtagtttggttaataagatagttagagaagagattcagaatattttaaatggttaa

SEQ ID NO: 1425 - DNA, 1308 bp, Methanobrevibacter ruminantium
  source 1..1308: mol_type = genomic DNA
atgacttataaagaaatttctaaagagtttttggataaggcaaatgttaccattggtgatgttatcaaggtgacaaaggaagatatttcctatgaaggaatattgcttgacagatccgaagacgcaaaggacgcttatattgtaattaaacttgatagcggttacaatgttggagtaaacattgaatctgcaactattgaacttattgaaaagggagaccaacctaaaataggatttgaaggagatacaattgaaaaagacccaaacaaacagaacatatcaatcatctccactggaggtacagtctcttcaatcattgactataagacaggtgcggtacaccctaaattcacagcagaggaccttcttagagcaaaccctgagcttttagaccttgcaaactatgatgtgaaggcattatacaacatattatctgaaaacatgaagcctgaatactgggttaaggcagcagaatcaattgctgacgatataagcagtggggctgacggaattgtaattgcacatggaacagacactatgcattacacttcagctgcattgagctttatgatcaagactcctgttcctatagttgttacaggtgctcaaagaagttcagacagaccttcaacagatgcattcctcaacatctacaactcatgtggcgctgcattatcagacattgcagaggttacagtgcttatgcataactcattggatgacggagactgcgcacttcataagggtacaaaggtaaggaagatgcacacaagcagaagagacaccttcagaagcattgatagtgaaccaatagctcttttaagggatggaaaggtaaaatcagtcaatctcccatatgtcaaacgtggggaaaatgaattggaattgaatacagacattgaaagcaaggttgcacttatcaagtctttccctgggataagctctgatataattgactatcatatcgataagggatacaaaggattgctcattgaaggaacaggacttggacatgttccagattatatggttgattcattgcaaagggcaaatgacgaaggcattcctgttgtaatgacctcacaatgtctatatggtacaatcaatatgaacgtttacagtacaggaagactattgcaggatgctggtgttatttccggtgtggatatgactccagaatgcgcttatgttaaattggcttgggctcttggtcaaagcgatagtttagatgaagttaaaaagattattcaaaccaatattgctggagaattgaatgaaagttcttcacttaagtatttcttgaactag

SEQ ID NO: 1426 - DNA, 840 bp, Methanobrevibacter ruminantium
  source 1..840: mol_type = genomic DNA
atggaattaactagctacttaagtcaaataatcatttcagtgataatatttatcatcctatgcctcctagcaaatcaagtgaaaaaaataatagaaaagcattacggaatacatttaaatcctaatgattttcttcctattgaagagattaaatcattaatgcagctttattttttgctcataatactgcttatttacatatgcatcatgaacttcttttttaacaattttggaataagcggggaattgatctttatcaattcattaatagacattatcttatcagtatttctagtgacaatatattatgacggctctacaagaggcaagataattagcatattccttttgcctattgtatccatatcctatatcctctttggaggatcattaattagatattgggatttcatccgcatccctatactgctctatctggttgtgattttctataacaagtttatagattatacagaaagaaataaccttggaaaaacaattctaatcctattaagcattatctatacaggaattctcttaacaatagtcttagaaaaacaaaatcctatagatgcagtggcaatggttacaaatgcaattacaagcaatggatatgccgctttaggagacagcgaaggaggagtcttgactagcgtattcctagcttggggaggatatattatttcaggagtcgctacagccacattagctgcagatatcattcatagaaactctagaaagaaatttaggaatatggaaactaagatagacaatcttgagaataagattgataatctggaacggataattgttgaatctcaaaaggagaatgaagaataa

SEQ ID NO: 1427 - DNA, 429 bp, Methanobrevibacter ruminantium
  source 1..429: mol_type = genomic DNA
atggcagacaagtttagcaaagagaagaggagttatatcatgtcaaggattagaggcaaggacaccaagcctgagatccttgttagaagctacctgttctctaaagggcttcgctttagaaagaatgacaagcgatatcctggcagtccagatgttgttctgcctaaatacaatactgttgtctttgttcatggctgcttctggcatctccatgagggatgcaagcatgctaagattccaaagtcaaatgttgagtactgggaaaagaagctttatggaaacagggatcgtgataagcgcaataagaaggagcttgaagatatggggtggaatgtgattacagtttgggaatgcaatctgaaaaaggataagcgtgaaaagactctttttgagctctacaatcagataatctctgaggatgaggactga

SEQ ID NO: 1428 - DNA, 615 bp, Methanobrevibacter ruminantium
  source 1..615: mol_type = genomic DNA
gtggtggcagccttatgcacagaggcacttggaaaggacagggttatcggagtccttatgcctaatggagtgcaatcagacattgactatgcaaagcttcttgtaagtcatttagacataaagcattacataataaatataagggatgctgtagatggtgtattaagtcaaatgaccaaatctggcattgaaatatccgaacagacaagaatcaaccttcctccaaggattagaatgtccaccttatatgccataagccagtctaacaacggaagggtggcaaacaactgcaatctttcagaagattgggtgggatatgccacaagatatggggatggtgccggtgacttcagcccactttcaaacctgacagtaagtgaagttaaggaaattggaagaagccttaatttaccgagtgagatagtggataaggtaccgattgatggactctctgaccaatctgatgaagagaagcttggatttacttatgatgtgttggataagtatatacgaactggcgaaattgaggacaaaactacaaaagaaagaatcgattacctccatgatttgaataagttcaagttggagcttatgccaagctttgaatataagtga

SEQ ID NO: 1429 - DNA, 1494 bp, Methanobrevibacter ruminantium
  source 1..1494: mol_type = genomic DNA
atgactgatattaaggtagataaaaacgtagaaaaggcaaaatctagccaagtagaagaaagagttattaaaaagccagaatccttatatgattccttcccaagaaagggaaatgacatttacaatacccactactgcgcaggatgcggtcacggtattttacacaagctaattgcagaagtcatggatgagctcaatatacaagatagatgcgtcatgatttctcctgtaggatgttcagtattcggatactactatttcaactgcggaaatgtgcagactgctcacggtagagctccagcagttgctacaggcatatctagagctgaagacaatgcaattgtaatgagctatcagggagatggagacttagcatccatcggtcttaatgaaacattgcaggcagctaaccgtggagaaaagattgctgttttctttgtaaacaatacagtttacggaatgacagggggccaaatggcacctaccacacttgtgggagagagaacagtgacttgccaaaacggaagggaccctcattatgcaggatatccattacatatgtgtgagcttgtagacaatcttaaggcacctgtatttattgaaagggtgtctcttgcaaaccctaagcttattagaaaggcaaagatagctattaaaaaagcccttatgattcaaaaggaaggaaaaggatactcatttgttgaagtattgtctccatgcccaaccaatataagaagggatgtaaaaggagttgaagacttcctaatcaatgagatgggtaaagagtttccagtaaagagattcagagacctatctaaggaaagggctcctgttgaaaggaatgtgagtgacttctctattgaatcattggataaggcatttggcgtagacagaacaaaagaaatcgctgaagttgaagatgactttgaagactgcaaggtaaagatagtcggtttcggaggccaaggagtcttaagcacaggtcttacccttgctcaagctgcatgcagtgagggaaaagaagtgtcttggtatccaagctacggtccggagcaaaggggaggaacttccaactgttctgtaacaatctcagcaaagactatcggatctcctgttgtagaggaatgtgacgttctaattgcaatgaacaagccatcccttgaaaagtattcaatcgatgtaaaagagggcggaaccattctttatgattcaagagcaggaaactacacaaatgacaatcttgatgttaaggataacgtaaagattatttccattccagcaagagagatagcaactgaaataggcaatgccaaggctatgaacactgccattttaggtgctcttatggagcttggaaaggacagccctatactatctcaagatgcctttgccgaaggtattaaggaaacctttgcagctaagccaaagcttattgatataaatctaaaggtattggatgcaggggctaaatggttgagagaaaacattaattaa

SEQ ID NO: 1430 - DNA, 1167 bp, Methanobrevibacter ruminantium
  source 1..1167: mol_type = genomic DNA
atgtctaatcaaatagttaaaggaaacactgctgtaatcatcggtgcattgtatgctggctgtgattgcttcttcggttatccgatcacccctgcaagcgaaatcctccacgaggcttccaaatactttccaatgcttggaagaaaattcgtccaggctgaaagtgaagaggcatctgtcaatatgatatatggcggagcttccacaggtcacagggtaatgagcgcttcatcaggtcctggaataagccttatgcaagaaggattcacctatttagctggtgctgagcttcctgcagttatcgttgacgttatgagagcaggtcctggtcttggaaacatcggccctgaacaaggggactacaaccagatagtcaaaggtggaggccatggaaactacaaaaacattgtccttgcaccaaacagcgtacaggaaatgtgtgacttgacaatgaaggcatttgagctttcaaacaaatacagaaaccctgtagttgtccttgctgacgctgttcttggacagatggcagagccattgaaattcccagaggaagctgttgaacctgtaattgacaattcctggtctgtaaggggaagcaaggaaaccatgaataaccttgtaacttcaatctttttagacttcaatcaactagaggactttaatttccaaattcaggaaaagtatgaaaaaatcagagagaatgaagttgtctatgaagagtatatgcttgatgatgcagaatatgtaatcgtttcctatggtacaagcagcagattatccagaactgctgttgacattgcaagagaaaagggaattaagttgggattacttagaccaatcacattattcccattcccagaaaaaagaatcaaggaattagcagatgaaggtgtccaattcatctctgttgaaatgagtaacggtcaattaagagaagatattaaggcagctgcaaattacgacgaggtccatttggtaaacagaatgggcggaaacgttatagagcttaaggacattctaaatgaaatataccaaatggtaggaagcgatgaacgccataaggttgacagtgaagacaaggaatttgacaaatcctacctctcagataaggactataaggaagaattggataatgacaactatcacaatcacaggatggtagattag

SEQ ID NO: 1431 - DNA, 255 bp, Methanobrevibacter ruminantium
  source 1..255: mol_type = genomic DNA
atgaaagtaaatcaaatcaaaccataccctatcattagcaaaaacaactgtaaggcatgcttaagatgcataactgcatgtaaggaaggctgccttaagttaagtgaagagattaatgatagcggatatcaatatgcagaatatacaggagaaggctgtatcggttgcggggactgttattacacctgcccggaaccattagccattgaagttcatattcctaaaagattaagaaaatcagcaggtgatgcctaa

SEQ ID NO: 1432 - DNA, 1665 bp, Methanobrevibacter ruminantium
  source 1..1665: mol_type = genomic DNA
atgacatctttaataggaaactttgtaaacagagttgattttaaatcctataaggatttttacgataattttgaatttaatgtaccaaaggacttcaactttggttttgatgtagtggatgagtatgcaagaatagatccggataaaaaagcattaatctggtgtgacgattatgaaaaaagggtttttacctttttagatatgaagaaattatccaatcagactgcaaacttctttaagtctcaaggaatcaataagggagatgcagtgcttcttacacttaaaaacagatatgaattctggatctgtatggttgcacttcataagataggtgctatagctatcccaactactcatatggtaaagcttcatgatatagtctaccgtgttgaaagcgcaagcataaagatggtggttacagttgaagaggaccaattgcttcctgattttgagcagtgcgaaaaagaattggacatagagcttaagaaagtcttagtgaatagctttagggatggctggtttaattttgataatgaaatcgctaaaatgagcgaggagtttgaaaggccaactggagatgaggcaacccatgaggatgagacattccttatctatttctcaagcggaaccactggaaaccctaaaatggttgcacatgctcatacctatgcaatcggacacctcataactgcaaaatactggcataatgtcgttgaagacggtgtccaccatacctctgccgatacaggttggggaaaggctgtttggggtaacctttatggacaatggattgcaggcgctgcaatatttatctatgactatgtaaggttcaatggtttggatttaatggaaaagatcattgaaaacaaggtaaataccttctgtgcacctccgacaatctataggttcctcattaaggaggacttgtcccaatttgacttttcagacattcaatatgcaactaccgctggagagccattgcctccagaggtatttaaaagatttaaagagttcactggccttgaaatcaaggaaggattcggtcagacagagaccactctctcccttgcaaccttcatttggatggaatccaaaacaggttgtgtaggcaagccttcaccggcattcaagataggccttttagatgaggaaggaaatcctgtggatattggttctgaaggagaaatatcatttgatgtatctggaggaagacctgtaggtctgtttaaggagtattatagaaaccaagaaaagaccgatgaagcttggtacaatggatattaccactgtggagacactgcatatgtggatgaagacggatattacacctttgttggtagaaatgatgacattatcaagtcttcaggttatcgtatcggaccatatgaagtggaaaatgcagtaatttcccgcccttcagtcttggaatgcgccataaccggtgttgatgatgaattaagaggccagattgttaaggcaacaatcgttcttgcaaaaggatacaagccaagtgaagagcttaaaaaagaaatccaagatcatgtaaagcatgagaccgctccttataaatatccaagaatggtagaatttgtcgaagagcttcctaaaaccataagcggtaaaattcaaagaaaaataatcagaactaggaaatcaatttattaa

SEQ ID NO: 1433 - DNA, 561 bp, Methanobrevibacter ruminantium
  source 1..561: mol_type = genomic DNA
gtgattgaaatgagtgacgtaaacaaagatatcggtatgagaattagagaattaagagaattatccgatattacaacagaagatatggctaatgaacttgatgtagatgaagaaacttatatttcctatgaggacggtattattgacattccagctagtttcttataccaaattgcacatatttttaaagttgatttagctttgattcttactggtgaagaaactcgcatgacttattttgatgtaacaagagcagataagggttttgctgttgacagaaggaaagaatataagtatgaaaacttatgcaagaaattcgttcataaaaaagctgaaatgtttattgtaactgttgatcctaaagaagatgctatgccttccttaaattcacatgccggacaggaattcaactatatccttgaaggaactgtgaagattttcattaaggacaatgaaattattttaaacgaaggagattctattttcttcgatgcaacttgtgaacatgctatggttgctttaaatgatgaaaccgctaaatttttagctgttattatgtaa

SEQ ID NO: 1434 - DNA, 369 bp, Methanobrevibacter ruminantium
  source 1..369: mol_type = genomic DNA
atggtaaatagagaagactgtgttatctttaaacaggaatacggtaatgaattattagtaaaccaacaatatgttaaaatcagagctaaggaagaaggattcatgtcttttaaccttagagtccctaaagaagatatggaaggtattgaaaacttctttaaagggtttaaaatcccagaaccaattcttatagacattgcatgtacaggcaatattcattgttactttaaaggaatttcaccaatcataaataagccggagtattcctttatttccgttagcgttcaggaattgaaaaaggaaattgttgaagaggaacaagagattggcatccctgcacatgaatgtgttggctgtgggcttcactaa

SEQ ID NO: 1435 - DNA, 1098 bp, Methanobrevibacter ruminantium
  source 1..1098: mol_type = genomic DNA
atgtcatttttaacattaatattaaaaaatccttttaggagcaaaagccgagccatacttgcaatcatagggattggaatcggtatagccacaatcatcgcattgggagcaattaccgacggaatgattgcaagtgcagatgacacactgcatgccggaggatgtgattttacagtaagcggaaagatagagagcacatcatcacaaatggctacattcggtacaagcaccattgatgaggattatatagataagatagccaatgtaacgggtgtaaaagatgctataggaatgtatatgaccgtccttatgacaacaaattccccatattttgctgttgtaggattggatccagaagactatcaggtttccgacttgacaattacagaaggacggatgtataaaaacgacactaacgagatagtgattggaaagattgcatctgaaaatgaagagaagggagttggagacacaatcacacttgatgacaagaaattcaagattgtgggaatctatgagtcaggtaacacccttcaggaccaaggaggatttacagccattaaaaactcccaaaaactctcaaaggatgaaggcaagatcagttccatctatatcaaggtaaatgatggagaggatgttgataaggtcagagatagaatcaccgacaaatatggagacaatctgacaacaataagctcattatccgacttggaaatgactaagaacatgatagacatgttgaacggagcaagcttagccatatccctcttggcaatcataattggagctgtcggaatcataaacactatgcttacaagtgtatttgaaaggacaagggagcttggtgtcttaaaggcagttggatggtctgacgaaaagattctattaatgattgtaggtgaatcaatagtcattacaattgttgccggcataatcgggtccattgtaggagtcattggagtggaactccttgcagcgtctaagataatgcagcttctaaaccctgtatattcagttgacatatttgtaaaggcatttgcaattgcactctttgttggaataataggaggaatctatcctgcattaaaaagccactaa

SEQ ID NO: 1436 - DNA, 717 bp, Methanobrevibacter ruminantium
  source 1..717: mol_type = genomic DNA
atggcaaatataatagagattaaaaaccttgtgaaatcttatgaaaatggtaacatcaaggctttaaatggcatagacttgacaatagaggaaggagagtttgtatcaataatcggaccttcagggtctggaaaatccacattattaaatatgctaggggctttagacatagcagatagcggaagcataaatgtggcaggctatgacttgacagtcaacaagaatctaaacaagttcaggggagagaagataggatttatcttccagcttcacaatctcattccaaacatcagtgttgttgaaaatattgagattcctatgtactctcaaggaaaatcatctaaagaaatgagaaaaaaggctcttgagctattggatatggttgacttaaaggacaaggccaatatgaaaccaaataagttatctggtggagaacgtcaaagggtggctattgcaaggtctttggcaaatgacccttcaatcattttagcagatgaacctacagggtctcttgattctaaaacaagcacaaagatactcgaacaaattcataagttgcataaggagaagaatattactttaatcattgttactcatgacatgactgtggctaagttagcagatagggtaattgaagtgcttgacggtaaaatacttaatgctgaagaaagtactctcttggataataagatagagataaaagttaatttgttttaa

SEQ ID NO: 1437 - DNA, 1380 bp, Methanobrevibacter ruminantium
  source 1..1380: mol_type = genomic DNA
atgcaaaccaataaaaacatcgaatcaatcataggagaccctaaaaaggccataaatagattgacctatcccacaatcctttccatgcttttaatgtttgcaaataacttaatagacagcatgtgggttagcggactgggagctgaacctcttgcagctctaggattcatgtctccattgtatctggtgattattggctttggaagtggagttggagcaggcgcaaattcacttatatcccgtttgattggtgctaagcgttatgatgagtctaacaatgctgcaatccatagtattataatagctcttatcgtttcaatcatcatttccattattggaatgttcttcttagatgacttgcttgttctttttggagcggggtctgttttggattatgcaatggactatggtatgataatctttctatcaagcatcataatactatttccagccattgtttcaagtcttttcagggcagaaggggacattagaagggccacagtgcctttagtggttaatgcaatcctaaacattatctttgatcctattttcatttatatttttaattggggagtcaaaggggctgctatcgctacagtattgtccacacttgtcaatctgcttatgatgctatattggtatctggtaaagagggatacattcataaaattgagtttggagtactttcatagcaaaatggaaatttataaggagattctttttgtaagcatccctgcaagcttggaagagcttatctattctattgtagctatctgctttaattatctaatcatgattactgcaggaaccatggaagttgctgttttcactgtggtgtggcgatttgtgtcaatcgcttttcttccatgcatttccattggaatctctacaataacagttgcaggcatagcttacggggctagaaactatgagaattttaagacaacaatcaattattcgactttcctaagctttacaattacattgataatatgcataatattctttgtatttgcctatccgatttctgaaacctttaatttcatatctggggatgctgaaatgattagtagaactgctgaggtccttaggataatggttttctataatattgtaattccatttggaggaactgcagtttatgtctatcaagctattggctctggctttaagtcattggccataacaattttaagggaattgatcttaagtgtattccttgcttatctatttggcattgtattaaaaatgggcatatttggtgtctatttaggtgcgatagtaggaatggctataggttgctttattggttttacatgtataaaaatctatcaaggtaagtttaaaaaagaatgcgagagtcttaatcagcccgtttaa

SEQ ID NO: 1438 - DNA, 1035 bp, Methanobrevibacter ruminantium
  source 1..1035: mol_type = genomic DNA
atggatttattattaatcttatcacaagaacatgataaactgccattggctgaattaagagctgtcttggaaacagaagaaatagaaactgaacttgaaatggtatgccctggcttggttttattaaaagagcttgaggaagatgtttttgatgattattatagattgcttgttagaagattaggatatactcatgaagtccatcaattgattaagacagtagactgctctgatttggaatctgaagttaaatcaatcgattggtctgagtttattgatgagaactttgctgttagggtaaaaaggttcaatagtgaaatagacactgtagacactgagagaaaaataggaggatatatcttaacaagtactgacaatatctctgtaaacctatcaaatccaaaatcttttattagggttgtagcttataagaacactatctatttatgttatggcaaatatcaattgaataaaaagtattttgaagagatgaaacctcataagaggccatttttccatccaggatgtatgagtcctaaattagctagatgcatggtaaatctctcaagagtcaaggaaggagatttggtcttagatccattctgtggaactgggggaatccttatagaagcaggtctcataggagcaaaggttgttggctgtgacattgactggagaatgaaaaatggaactgcaactaaccttgaatatgctggaataaccgattataaaactcatgtggtggatattcgtgaaatggaaatgtatgaagaggctgatgcagttgtaaccgacccaccatatggaatttctacaaccacttgtggagaaggtgcttctggaatatttaaagaatttttagaatccattgaacacagcatgaaagaggatgcacttttagtgatggctagtcctgattcattagacatagattccctatttaaggatgtaggctttgttttattggaaaggtatgcgattaaaatgcatagaagcctgactcgtatcatttctgtgatagctaaaattgattaa

SEQ ID NO: 1439 - DNA, 1299 bp, Methanobrevibacter ruminantium
  source 1..1299: mol_type = genomic DNA
atgagttttgattatgatgtagcaattgttggtgcaggacctataggctctagtttagcttatgaacttgctcaaaacggtttaaaagtttgcttaatagataaaaagaaacgtataggtttgcctttgcaatgtgcaggaattgtaaataaaagaatttcttcattatgtgatattccaaaagaattaatattaaatgaagctaaaggtgctttcatacattctaaaaatcattcattaactgtttctaaaaaggaatctcaagcctatgttttagatagggttgcatttgatcagtacttatttaatcgagcaagggagcatctggacacttatctatcttcaaaggtagtggatattgatacagagcttgggattgtccaattcaaattcgattgtgagattaaaacaatccgctccaagattattgtaggtgcagacggtccattatcactttcagctaaaaaggtcaattctaagttaaattattttaatgcaagccaatatcttgttaaggttgataagattgatgaaatgtcctttgtagatttatatgcttggggagatctctttccgggatttatctgggcaattccagtttatagtaatatttataggattggattgtttagcgaagatgactataaaagccaatccaagatgctggatgactatctggaaaatgaatttagatatgatgaatatgaagttttagagaaatataagggtaaaatacctatttatgataaaagtaataaattatttaagaataggcttattttaataggggatgctgcttctcaagtcaaaccaaccacaggaggcggaattctaattggattagagtctgttcaatttgcaaaagatgctattttaaatgctttaaatactttagactttgataaaattgattttgatttagttggtggttctgattcaaatgaggatgattctgatttaaatgatgctaattataaagaagaattaaataatttcttagatgaattgtctaagattttagaaaactatcagaatgattttgaaaatagattttcaaaagagtttgaaattcaatttaaagtccaaaaatcattatctaccttatctaatgatgatttggattatgtattaactaaattaaaagaaaaagatgctgataaattaatatctgaatatggagatatggacaatcaatccaagttagttaaggaattcttaaaaagaggcttgattttttcattggctcctaagattcataaaaaggaattggctaagatttggttgttaaataaagattaa

SEQ ID NO: 1440 - DNA, 1911 bp, Methanobrevibacter ruminantium
  source 1..1911: mol_type = genomic DNA
atgtttggtaaagataaaaaagagaactctaatgaaaaagtgttgtatgaagggcaaccaaatttgatagtttattcaaagagcatattcattgcagtgattttacttggatttctatttttcctctattcaactggaattcaatatattggaaacatgcaagtctatatgatagaatcaaccaaattgccattgactcgctattttgcaattgcagtctttgttataataatggttgtaatcctatatatcataataaaattcctttcttggacttcaataaagtatacaattactgaaagcagagttatcgttgaaaagggcattatatttaataagaagaattacatgccttttaacactattcaggatgtaagtcgttctcaaagcattttaggaaaagcattctcagtaggcacaattaccttatacagtgcctatgacggcaaggacatgtcattaaaggatgtctcaaaccctaaaaagattgaagatttaatttttgagaatatgaggacaactcatctaaggtcacataacttatatgacgattcctatggcaatccatataataacagttataataaccataacaaccattggggatatgacaattatggtgattcctatcaaaatagggactttaagccaataaggcctaactctgatgaaaaggttcattataatcgtatggaagatcttgatgaccttgaattggttgatgtaaaggagagaaaacgaaatcttagagaaataaggcgaaaagctaagaattccagaggaaataattataataatcagccgattgatggtccgagtaacaattataatagaaattccaattatgaccctaactataacaggaactctaattataagcagaatcctaattataataatcgcaacaactatgatgattttggctatgatgattatgaatctggctataatcaaagatccaaaagagcccctcaaggcaataggggctattcaaaaaggaatgcaaatcaatacagagacgattcaagagcaaatcatcaacatagagaaacaattagagaatcctatcaaagaaatccaaataagtattttgcacaaaattatgagaaattccatcaagataatctagaagctcaaaataggggtggagaaagttttaatgaaatgaaccctcttgattctaatgattattatggtatggatgacgattttatctccgatgaggaatttgatagcactataaataaggctatggaaaatattggagacaatattaaatttaagcccaacaatcactctagagtagtcaattctcatgaagattttgattccagagtagttaactctcatgaagactttgattctagaatgaatgattcttatgatgattttgcttctggctctagacataatactgattatgctaattctaatcagaataggcattataattctaattatcctgatgataggcaatttaggtctaatcagtcttatgaaggtgattatagacaatctagatctaatcagccttatgaaggtgattatagacaatcaagacctaatcggtcctatgatgatggttatggtcattctggatctaatccaaactataataactcttatgatcaatccaattatggctatgatgattatagacaatcaaacaatcctccaagattaaataaacagtcttcaagtgataattatcataaatccaataatagaaacaggtcatctaattatagaaatagaagctataacaatcaggaaaattataactcctataatgatatggaagataattctaataattatgaagagtcagataaaaagggcaagaaaaagaaaaagaataaagattccaatgacttgcttgaaaagcattcaaggaaatttagaaggtcttaa

SEQ ID NO: 1441 - DNA, 297 bp, Methanobrevibacter ruminantium
  source 1..297: mol_type = genomic DNA
atgatatttgttttagcaaaagcaatacctaaagatgaagaagcttgtgaaaaaattgtagaatttgcacaagacttgattgaaaattcaagaaaagaagatggaaacatcgactataacttatattccaacacttgtgatggaaccttgttgtttgttgaacaatgggaatccaaagaaatattaggagctcatttacaaactgaacatttcctcacctttggaaaaaatatagcagatttagttgcagctgaacttgacattgctgtttacgaagcggaagcaactgatctttaa

SEQ ID NO: 1442 - DNA, 684 bp, Methanobrevibacter ruminantium
  source 1..684: mol_type = genomic DNA
atgaaagtagcggttattggtggaactggtccacaaggtttaggaattgcaaaaagattcgctattgaaggtgttgaagttattgtaggctctcgtaaggaagaaaaagctttaacaatagtggaagaaacaattgaagaacttaaagattatgatttaaatattgtaggtatggctaatgaagatgcagcaaaagaaggagatattttaattttaactgtaccattagcagcacaaaaacctactcttgaaggaattaaggaattttgtactgataaaattgtattggatgcaaccgtccctcttgaaacagctattggtggcaaaccattccgtttcattgacttaatggaaggttcagcagcagaaagaactgcaaaaatattggatggaacaggtgcaaaggtaatctgtgcattctgtaacattagtaattctcatttatccaatattccaaatgaaatcgattgtgactgtttaattgcaggagatgataaagaagcaaaagaaatcgctaccgaacttattaataaacttcctggagttaaagcaatcgacactggaattttagaaaaatcaagaattattgaaaagatcactccattattaatcggattaaacattaagtatagatcccattatggtggtctcagaattactggaattcctcaatttgaagattaa

SEQ ID NO: 1443 - DNA, 1077 bp, Methanobrevibacter ruminantium
  source 1..1077: mol_type = genomic DNA
atggcaacttttaaaggatttgcaatgaaaagactcaatgaaatcggttgggtagaaaaagaagtacctgaatgtggacctatggacgctattattaaaccaacttgtgtatctccatgtacttccgatattcacacagtatgggaaggtgcaatcggtgacagaagagacatgatcttaggtcacgaagctgttggtgaagtagttgaagtaggtagcatggtcaaaaaattcaaacctggcgaccgtgtaattgttccagctatcacccctgactgggacgatgaagcagctcaaagaggattcccttcacaaacaaccgaacctctcggtggttggaagttctccaacttcaaagacggggtattcggtgaaagattccacgtaaacatggctgacgcaaacttaaccttcatccctgacggattatccgacgaaggtgcatgtatgttaaccgacatgtggtccactggtatgatgggatccgaaaacgctaacattccattaggtggaactgtacttgttattggtattggtgcagtaggtctttctgctattgctggtgctaaatgtttaggtgcaggtagattattcgctgcaggtacccgtcctatttctgtcgaagttgctaaaaaatacggtgcaaccgacataatcaactacaaaaacggacctatcgatgaacaagtaagagaacttaccgatggtgcaggtgtagactctgtagttattgcaggtggtaacttagaaaacacatgggctgaagcaattaaatctgcaaaagcaggaggaactgtatccaatgtaaactacttaagtggtgctgacaatgtattaatcccacgtgtagaatggggttgcggtatgtcaaacatcaacattacaaacggattatgtcctggtggagcagtaagaatggaaagacttgctgatcttgcattatgcggcagacaagaccctgaattattagttacccacaaattcaaaggtcttgaaaaaatcgaagatgcattgctcttgatgaaagacaaacctaaagacttaattaaacctgttgtaatgttagacatcgactaa

SEQ ID NO: 1444 - DNA, 825 bp, Methanobrevibacter ruminantium
  source 1..825: mol_type = genomic DNA
atgattattagtgaagaactttttgaaggaatttgcgatttggacgattttaacctattgaaatttgttatcagctctgagctacgattgaaaatattgtttagcctatatgaatccagcaaatcaattaaggagctggagtctgagattaatagaaaatccggcaatatttccagaggtttaaatgaattaaaatcctgtaaattaattacaaagcttccaaataaattgtttgccatatcatctactggatttttggttgcaaagaatctggaaaatctaatggataatatgggatctattgagtctaatggagaattttgggaaaatcattccatcaaatcaattcctaacaaatttctaaaggaattatccatctttaataactctacattagttaaatcaaccattacagattttgccaagcctattaatctatacttggaaaacattaaaaagtctacatatatctgcatgatattgcctgtattttctaaaatcttcaatgatgccgttaatgacgctataatcgaacatgatggctatttggatttggtgactacaaagaacatttatgatttgtcaattaaatcagactctgacaataagattaagtccttggtgagagataagaagatcaagttttatattgtggatgaccttccaaatatcttctttacagtttcagatcagtttgcttcattataccttttctttgatgatgttgtatttgacaattctgaaatgcttttattggaagacgatttaaatttaaatgatgcctatagattctataggttctttaagaatgaaattttaaaataa

SEQ ID NO: 1445 - DNA, 861 bp, Methanobrevibacter ruminantium
  source 1..861: mol_type = genomic DNA
ttgacaaatcgatttgaagaagaaaattttcttgaacttcaagaggatataaagtttcttattaactctgaaattcgtttaaaaattttaggctgcttgtataattcctctgcttcaataaaacagatagaagcaattacaaattatagttacagttcaattcttgacaatatcaataagctggagcaaaaaaagtttatttatagcatagaggataaattttatttatataataaaacaaggctgaaattaaacagcattctctattttaacaaatcagccacatttttaagagagaattctgatttcttaaatcagtctcttatagatattaactctgaagctataaaggatttatctgctcttgaaggctctagactaattgaatctaataatattgatttatttaaatctactgaaatctttcaacgttctttaatgggatttaaatttttaaaaggtatcttcccttatttccatccacgacatgatgatattattagctattggatagacaatgattgcactgttgaattaatacttcctgatgaggtttcagaggctgtaaagaatttcattattgattatgttccaaaaagccctggaattaagaatagatttgtcaaattaaaacctaacgaccataacattcaattggcttttacagtgtctgataagtgttttgttttggctttatatactaaatctggccagtttaatcaaaatgcagtgctggtttcaactaatcctgaagctatcacctttggattaaagctttttgaggaatatgaagaattatgcggagattatgtttcactagagaatcttatttatcctaatggaagggaggatgattattag

SEQ ID NO: 1446 - DNA, 1275 bp, Methanobrevibacter ruminantium
  source 1..1275: mol_type = genomic DNA
atggatgattctccaaatgaagttcctgaattaaatcgcccaactaaaatagataatatagaagagcctaaaacagttgacgagcttcaaaaggaacttgatttacttaaagctgaaaaccaaaaaaccaaacgcaatcttatgtggaaggttaggaaacttgaaaaagacaagattctaactgaaaatgaaaaaatacgtttggaaagagagttaaaatcattaagaggtgaagttgaaagattcagatcaccgcctcttgttatcgcaactatcactgaaatcattgacgattccagaatgactgtaaaaagcagtaccggacctagtttcctaatcaattattctaaattccttgatgaagacctattgaagccaggttcaagggttgcacttaatcaacagacctttggcgttgtggaagttttgccttccgaaaaggatgcaaatgtatctggtatggaaattgaagccaaacctgatgttacctatgatatgatcggtggtttggatgaacagattatagaagttaaggaaactgttgaattacctttaaaacatccagaattattcgaaaaggttggtatcgacccaccgaaaggtatcttattatacggaccacctggaaccggtaagaccttgcttgctaaggcagtagctaatgagacaaacgcaactttcattaaggttgtcgcttctgaattcgttaagaagtacattggtgaaggggcaagaatggttagggaagtgtttgagcttgcaaaggaaaaggctccaagtatcatcttcattgacgagcttgatgcagttgcagcacaaaggcttaaaagttccacaagtggtgatagggaagttcaaagaactcttatgcagcttttggctgaattggacggttttgaatcacgtggagatattggaatcattggtgcaaccaacaggccggatatcttagaccctgctttgcttagacctggaagatttgacagattcattgaagttccagctccaaatgaagatggaagacgtgaaatccttaagatccatactaaaaagatgaatatagatcctgaagttagaatgagtgagttggttgagcttaccgaaggattatctggtgcagatttaaaggctatctgtacagaggcaggtatgtttgctatccgtgaggaaagagaccatatcattaaggcagactttgaggatgctatcaataagattatgggtaaaaacaagacaggtaccttagatgataatggcggagtaatgtttggatag

SEQ ID NO: 1447 - DNA, 504 bp, Methanobrevibacter ruminantium
  source 1..504: mol_type = genomic DNA
atgaactgtgaaatttgtggtaaagaaatcgaaggaaaacctttaagaactaaaattgatggttcagttttattagtttgtaacgattgtgcaaaattcggtagggtccaaagggacactccccttgagagaaaatttgtaactcgtgataagaaaggtagaaaagaagcaaatgctaaaactaggcctaaaaagacttatactaggaatgaagaacctatggatgagcttgtagaggattttaaccttgttgttaggcaagctcgtgaagctaaaggttggaaaagagaagagttagctgccaaaatctatgaaaaggcttctgtaatcaacagaatcgaatcagggaagattttacctgatttaaaattggcacgtaaacttgaaaagaccttaaacattaagctaattgaaaaatatgatgatatggatttagaagcctataagagttcttctgctggtcctaatactttaggaagtattgttaaaattaaaaggaaataa

SEQ ID NO: 1448 - DNA, 423 bp, Methanobrevibacter ruminantium
  source 1..423: mol_type = genomic DNA
atggctttgatattaattagaggagaaaacaacgcaaagatattaaatgcaattgccgatgtagaaaggcatgcaaatctgactttagaaacaaaaccgaaaaaagtggatcctaaatttgcagacaaactagttgaaaatgttttaaaatcacctttaagaactaaatctaaggttgcaaccgcttttcgtgtaaaggaagacactactatagctattcttcaagttaaaaagatacatccacctgcacatattgttgtggtaagcaatacctatgatggctatagggaattaagcaaaatcataaatgaaggcaaggtctttaaaggatattattccaataaatcaagttctggaacccgaatgaaagattataaattaactaagacctcgactaatgagggtttaaatatttatatgtaa

SEQ ID NO: 1449 - DNA, 1227 bp, Methanobrevibacter ruminantium
  source 1..1227: mol_type = genomic DNA
atgctcttttcagtaattgctactgtatctgctacttgtaacgtaatcgttattactgatcctagtggagaagatcctaacggtgctgcagcaggaagtatgtcctttgcaaataacatgttccagtcttcattcatcatgtctaaagatgatggatacgccatgctttcagggggtgaaggtaatggtacagaaaggaactatgcgattattgcagcgcttgcagctatgcagcatggagccactccagcatctgctgccgctttggcaagtggatttaagggtatccgtcttgttattggaggcccttcaatgggtgcagctatcggtggagactataacgcttatcttgttgttgtcgacgatgccggaaccattaaggtcacccaccacacaggaggagttgttcaattgcctcaaggttccaaaggagctatcattcacttgagaaacagtgcaggtaaccctatgtatggtactgcagaaagagtccgaagagagactgcagttaatataggaaaaatgattagggatggttatcctgccacttatattgtcggtaaggccatgaaagaggttgccgaggattcaggtgaaaaatacggtgggggtgcagtaaaccttgtttccagtatcagtacgggagacatgtttgtgccggatcaggtaaacaccaccggttatccgatggatgagaactattccaaatcctgtgaaaaatgtggatgggctacaggttttccagatgctgagcgatataacgtttgcccatactgtggcagtgaactgacagtgaactctgctacagatgttctaattgactcaatcacagtttctaaagattctgtttctgtttccgtttatggaagtgatagattaggactctcagacattacaagagaggtcgtcaaggcgtcagttaagaaatatggttataatgcttcaaccattgcaggttcacttaacaaaggtattaacaatggtttaatcgttggtgttgactatgtagagccaagcgacttaaacgttaagccggatgttcgtgctgtaggtgtttattataatccattgcctaatggcagaagttcacctgcttggaacttgcctatcaattcaatggttctaactattttaggtaccattcaaacggctattggttttgttctgattatgttggtaatctttaggacacggctgttaaaatcctttaaagatcgtgtttcataa

SEQ ID NO: 1450 - DNA, 498 bp, Methanobrevibacter ruminantium
  source 1..498: mol_type = genomic DNA
atgtttattaaaattagaagagacactttaataatattattattggcttttattttaattctatgcggtagattaattatctatgtagcttatgcatcctctgctcaagtcgaagaaggcgtacctattgcaggtattatcgttaagggaaacgacatagttcctattgacaatataagatataatgttgaaaattcaggtttaagagaaggcagttatattgatggagacatccttaagacctctatacgggagctgcctgtgactgaagccgaggcaaatgcagagaagtttgtaaaaaggtcaacaattccaggtaccactatcgctccaattgcaggagctgacgttaatgtaaacaagcaaactggtatcgtaaccgttactgttattgaagatttctcaactattaatattacaggaaacagtaccacatctactgatttcacagaaaacgaaccatcaaaaagtgtttataattatagcttagcaggttag

SEQ ID NO: 1451 - DNA, 1125 bp, Methanobrevibacter ruminantium
  source 1..1125: mol_type = genomic DNA
atgattatacctactttaggttgcccttccaactgttcatattgttggggctctgaggacaatgcagaattaatggatatcgatgtaattaagcaaattgttgaatggctagctgattttagggatgagccggttcacttcaccttccatggaggagaacctttacttgcaggctatgatttttataaggaagctcttcctcttttaaatgatgcagagacccatgaaactgaaggtttttcattgcaaagtaatttatggcttttagatgaggaaatggttgaattattctctaaatataatatagcaataagcacaagcattgacggccctaaggagatcaatgactatcaaaggggcgaaggctactatgacaagacaatgaaatcagttaagttagctacagaccataacattcaaattaattttgtatgtaccttcacatcctactctaaagatttttcagatgagatatatgatttctttaaggcaaatggattgaatttaaaaatccatgctgcacttccatcccttcgtggaaataatgcagatccatgggctcttcctcaggatgagcatggaaaattgcttattgattggctggataaatatctctatgacttggataagtttgtaattatggatttggaccatatcgctaaaagcagcttaagaagggttggaaccctatgtacatttaatgattgcatgggaactacattggctgttggccatgatggttcaatctatccttgctatcgttttgtcggaatggatgagtatataatgggcaatgtttatgacaagccatctatggagactttagagcaatctgaagcttgggaaaagcttatggaatttaagaatttcgtagatgaggactgtgcagactgtaaattcattaaattctgcagaggaggatgtccgtataatggaatagtggctacacaatctccaagggcggtggaccctcaatgtgaagcttataagatgatctttggtgaagtctcaagaagagcaaatgaagactttaagaaaaatgcaatggcggcatttggtggtgccccaagggttagaaaagaaggagatcctttttcaataatggatttgatgactaaaatgtaa

SEQ ID NO: 1452 - DNA, 219 bp, Methanobrevibacter ruminantium
  source 1..219: mol_type = genomic DNA
atgaaatttgaagatttaatggcaaaatgtccaaaatgcggttctcaagataaaactgctgttagaagatttattgacaatcatcatgctcatgctgaattaaaagagtttaaatgtgataactgcggttttgtttatgaaactggaaaagattatgaggataatgaagacgaaacaattaaaaaaggcttaatcaaagaattaaataaaacaatgtaa

SEQ ID NO: 1453 - DNA, 1047 bp, Methanobrevibacter ruminantium
  source 1..1047: mol_type = genomic DNA
atggattattccattaaaagtggcatatttggccttgttgtagcagatgcattaggagttccttatgaatttaaagacaagcattactgtgatatgaatcctatgactgatatgattggtcatggaacctataatcaggaagctggaacatggtctgatgacagctctatcgctttagctacattagatggattaactgactatgaatttggcgaagatgatgttgaaggcatgaggattaagaattttgccgaaatcattgattatgattcaattgcccataaattcgcagattggctaattaataagaaatacactcctcatggagatgtatttgatgttggaaacacaacaagccatgcaatctattccttttatgcaggtaaggtcgatgcattgcatgcaagtggcgcaggtaaaaaggatgctggaaacggatctttaatgagaatattgcctgtctcattccttatttacttcttatcattgaaatatgactttgatgaggaaggtgaaatggaagcaatccataatctgtcttcaattactcataggactttaagatgtcagatggcttgtggaatctatataaaaatcgctattgaactcttaaagaattattttgactctgaagatgattcaaacttgttggaattagttaataatggtataaattcagcaaaagaatattatgaaactaaagaggagtttgctcatgaattaagtatttatgaggacgtattctcccttgagattcaagattttgatagggatgatataaaaggttccggatatgttgtagaagctcttaaggcagcattatggtgtcttttaaataatgatgattataaggacacagctttggcagctgttaatttaggtcatgatactgatacaactgcagctattgctggtggattggctggaatttattatggatatgacaatatcccatctaattggttagataagatagcaaaatctgattatattggagaattgtgcaataatctttctgattatctttttgagattttggaggattaa

SEQ ID NO: 1454 - DNA, 780 bp, Methanobrevibacter ruminantium
  source 1..780: mol_type = genomic DNA
atgtcgttagaaattctaaaaaaaggcacaagtgaaaactttttgctaaagcagatcattaggaaaaattttacaagcaaatataaggattctgttttaggcatactttggagttttttcaatcctttaatcacaatggccctattgacagcgattttttcatcagtctttgcaagaaacattgaaaatttccctgtttacttcttaacaggccgttgcgttattgattttttcaatagcggaactaaaatagctatgacctcacttaaaaagaacagcggtattttaaataagatatttgttccaagatatgtatttgcattgggaggaatcttttctgaattcattaactttttaatgagtatgatagtgcttattgtgattatgattgtaactagggcgcctttccatttatatgctattttttcagtcattccaatagccatcctattcatactgattttaggagttggactgacactttccatactctgtaccaaatttacagacattgaatatttatataagatatttaccagcttattagtatatgcttgtgcgatattttatccaatagacattgttccacaacctatcagacagtatatggaattaaatccgatttatggtattatagctcaattcagagagtttgtcatgtatggaagattcccatcaacaaagttgatgctgataacctttttaacttcaatagtaatctttataattggagtaatcatatttaagaaataccaaaacagaattacattagagttataa

SEQ ID NO: 1455 - DNA, 1230 bp, Methanobrevibacter ruminantium
  source 1..1230: mol_type = genomic DNA
atggataataagaatgaaaatagcaataagatcaaaacccaattaataccatctattcataatactgtatctctccaagcacacctcactacaaaagatggagagcctattgtaggagaggaagtcgtatacaaattatattccatagacaaaagttttcttacccaatattctcgtataacaaatgaagaaggcttagttcaccttacattaaacataaagcataaggtctatattgaaatctgctatgagggcagtgaaaaatacgaatcaaacaatgtaatgacctttaggacaaagccttcagatgatgagaaaaacgttaaaacaaaacatccccttcaagttcaaagagaagaaaagttggaacaaaagaaaattgaagagaaaaagaaaaatctattggatttccaacaaaaacaaaaagatttggaaagtgtggatgaggacaacatagccatagagctaaagaatgtcaatttaagttttacaatcggatccgataagatagacaacttaaaggaatatgtaatccgtaccatcaaaagaacaaaagaaaagaaaacaatattcaaggctacagatgatgtgtcctttaagatatataaaggggaaaaggtcggcttaatcggctttaatggagctggaaaaagcacattgcttaagatcatatcaggtgtctacactccagatgacggagaggttatagtcaatggaaaaatagcgcctttattatccttaggggcaggatttgataagaattatacaggaagagaaaacattttcctgaatggagcgattttaggatacaatgaagagttcttaaactcaaaatacgatgaaatccttgaattttcagagcttggacaattcatcaaccttccagttaaaaactactcctctggaatgctttcaaaattaggattttcaatagccaccatagtggaaccggacattctaattcttgatgaggtattgggagtgggagacgttaatttcaaacgaaaaagtagagaaaaacttaattcattgattgaatccaatattaccgttttgcttgtttcacatacaatcagtgagataagaaatatctgtgaaaaggccatctggcttgaaaacggtaaaatcagagaaattggagaagtcaatgacatttgtgataagtatttggaagaagctaaaaaggtaagcgatgataagactaaaaaattaaagcctaaacggttttaa

SEQ ID NO: 1456 - DNA, 681 bp, Methanobrevibacter ruminantium
  source 1..681: mol_type = genomic DNA
atggcaagcatagtggctattatacctgcatacaatgaagaggaagctttggctgatgtgatagcaaagacttcaaagtatgtggatagagttattattgttaatgatggcagtgctgataggactgcagatgtggctattgaagccggtgcagagctaatcaatcatccgactaatttaggaaaaggagaggcattaaaatcaggttttgaggctattactgatgattcaatcattgtcacaatcgatggggacggccagcataatcctgatgagattccaattattcttaagcctatcattgaagatggagttgaccttgtaaatggcagcagatatttgtatggtcatgaggagaacactcctgcctataggagagttggacaaagggttttagacattgccactaatatctctgcaggaatcaaggttacagactctcaaagtggttttagagcattctctccaaaggctaggaattgctttaggtttaaagacactggttttggtatagagagtgaaatgctagtggatgcagcagaagccggtttaaaaatagttgaagtccctataactgttcgatatgatgttgatggctctactaaagatccggtaacccatggtgttggtgtattgcttaaaataatgaaagataaagccgttaggacttttaaaaaatag

SEQ ID NO: 1457 - DNA, 972 bp, Methanobrevibacter ruminantium
  source 1..972: mol_type = genomic DNA
atggaaactcaaaggattatggtaactggcggaagtggatttataggaacaaaccttgtaaatgaacttagatctagaggacatgaagtattgtctgttgaccttttgcatcatgaggatgaggctgatttgtattcagactcttacagtgattatgtaaggggagacattcgtaactatcgtcaaatggaacgcatcttcgatgacaatgacaaatttgactatgtttacaatttggcagcagaatacggcagatggaacggtgaaggatattatgaaaacctttgggaaaccaatgtaatcggtttgaagaatatgatccgtcttcaagagaaattaggatttagaatgatttcattctcctctgctgaagtttatggtgactatgaaggaataatgagtgaagatgtaatggaaaacaggccaataaaggacacttatcaaatgaatgactatgcaatctccaaatgggctggagagcttatgtgcatgaactctgcaaccatgtttggaactgaaactgtaagggttcgtcctgttaactgttatggtcctcatgaagcttactctccttataaaggattcattccaatctttatttataaggcacttcatggattgccttattcagttcataagggacataaaagaattattgattatgtggaagacactgcaaatacctttgcaaatattgtagataatttcattccaggtgaagtctataatgttggaagcaaacaggaatgggaaatgaccattgaagagtattctgaccttgtgcttgaagctgtaggtatagatgattccttagtgacctacactcctgctgaagactttactacaaaagttaagaccattgacttttctaaggctattcgtgatttaaaacacgatcctaaagtctctcctaaggaaggaattaaaagaacagtcgaatggatgaaatggtattacagaattgaagattag

SEQ ID NO: 1458 - DNA, 543 bp, Methanobrevibacter ruminantium
  source 1..543: mol_type = genomic DNA
atgactaataaaagtcctgaagaagagatagaagaattaaaggctcagctttctaaatatagaaaggaaaaccgtattcttaaagagagatgtgcctcctatgaagataggattgaacattttgctatagagcgaaaagagctgtctagagccatcacccaattcgaatcattggaattggagcttcgacaatatgatttggaggagctgattcaaaacacccgcaagttaaatcatagaatcgatattcttcgaagatatcttcaaacagagcgagaggacaatgagaaattaaatgaattgattaataagctaacaaaggaattggatgatgcaaattatgaaatatctcgattgactactgaatttcataagcttagggttcgcaaaaatcaaagaacctattttttagaaaatcgtttggatattgcatataccaaattggctcaattgaaatacaccttaaatgaatttgaggaacttggattctgggataggcttagaggcaaaaaacctgaaagttatgatgatattgacatttga

SEQ ID NO: 1459 - DNA, 846 bp, Methanobrevibacter ruminantium
  source 1..846: mol_type = genomic DNA
atgaaagcagtcattcctgcagcagggcttggaacaagattccttcctgctactaaagctcaaccaaaagagatgttgccggtttatgacaagccgaccattcaatatgtaatagaagagtctgtaaattccggtgtagatgatattctaatcgtaactggtaagggtaaaagatcaattgaagaccattttgacaggtccttcgaattggaacaccatttgaaaaccaaaggaaaagaagatttcctaaaggaaattgaatatatttcagatttggcagatattcattttataagacagaaaaagcaaaaaggtcttggagatgctatatattgtgctaaaaagcatgtcggcaatgatccttttgttgtcatgttaggggataccattacaaaggatacagttccgtgcacaaagcaattgattgacatctatgaaaagtatgaaaaatctgttatcgcccttgaagaggttccggatgaaaaggttgaaagatatggtataataggcggtgaagagatagaggattcaatctataagattgataagttagtggaaaagccacctcttagagtagcaccaagtaatttggctattatgggaagatatgtccttacacctgacatttttgattgcattgaaaatgtggagcctggatacggtggagaaatccaattgactgatgccttaagcaagcttgatgagatttatggccaggtatttaagggagagtcatatgatattggaaaccgtattgattggctaaagacttccttaaggtttgcattggaagatgacagtgcaagagatgatatattggaattcattaaagaagagattatttaa

SEQ ID NO: 1460 - DNA, 414 bp, Methanobrevibacter ruminantium
  source 1..414: mol_type = genomic DNA
atgaattttaaaattaaggcaaagggacataagaacgttttatccctacataaatccacttttgaaataaccaaagacaaggatctctccttatctggggattgcattattggtttggacattgataagtgcatgttggactttcctaaggaatttaaggaaaaattagcaaatgatgagactatagtgactgtgaaattaaaaagcccaaatgcttatgatgagatagtgggatatggccatcatgacttgactttagaccatccgacagatattgtatgcagaaaaagtgattttatatgctcaagaactttaatgattaaatctgataaggcagctattgatttaaatagagatttaatcgaggatttggctaatggtgaatcattagatgtggaaatcattttaagctaa

SEQ ID NO: 1461 - DNA, 939 bp, Methanobrevibacter ruminantium
  source 1..939: mol_type = genomic DNA
atgataataaatactggtttaagaacagacatccctggattttttagcaaatggttctataatagaattgaagaggaatatgtctacgtcagaaacccatactacaaaagccaagtatttcattacaagcttaatcctgaactggttgactgtataatattctgcactaaaaatccaaagcctatgctatcaaatctagacaagatatctgaatttaatcaattctggtttgttacaataactccctacaaaaaggaaatagaacctaatgttccatcagtaaacaaagtcataaaaagttttaaggaactttctagtcaaactggaaaagaaagcgtatccttaagatatgaccctattttaataaacgataaatacactttagattatcatattgaggcatttgaaaaaattgcaagctccctatcagaccatacaagcgaaataataatcagcttcattgacctatatgaaaagaccaaaagaaacttcccacaagcaagagaagtttctaaagaagaaagactaattataggcaaagagttttcaaatatagcaagagaaaacaatcttatcttaaagacatgcgttgaaggaaaggaattagataaatttggaatagattcttcaggatgcatgactaaagaagttatagaaagagcgatacataataagctcgatgtaagagttaaaaaatcaagaaacagaccatgtgactgtcttttaaacaatgatattggagaatacaacacttgcaatcatggttgtctctattgctatgcaaattcaaacaagcaattggttaagcgaaactttaaaagacacgacccagattctcctatattgattggaaatataagagaagaggatgaaattaaagaaatcaatcaggaaagttttttaattcatgaagatacagttcagacaaaattattttaa

SEQ ID NO: 1462 - DNA, 459 bp, Methanobrevibacter ruminantium
  source 1..459: mol_type = genomic DNA
atgaaaggaacatattgtttaataatatctatgaaaaaatcggataaaatcaaaataggcaatctatatccagaagcttataaattcaagaaaggatattatgtctacatcggctctgcaatgaattcacttatctcacgcctaaatagacacttatctgatgataaaaagatgcattggcatatagattatctcctaacaagcgaatatagcgaaattcgagagatactttttacagactctgaaaaaagaatcgaatgtgatctagcaaacgaaatagctgaagacggattggaaattgaaggatttggctgttctgattgcaattgcaattcccatttaatattcttcaatagaaaaagagatgctttaagaagggttaaggacgcttatgaatcattaggtattgaatattatgatttaaaatattttagaaccatagataataaaaaggattag

SEQ ID NO: 1463 - DNA, 2883 bp, Methanobrevibacter ruminantium
  source 1..2883: mol_type = genomic DNA
atgaaaataatatttaaacgttgtttagttttaatttctttaatttttattttaattttaactttaggacttgtatcagcttcaaataatattaatcaaattaatgatatgaattgtagtgtatatgaagattatagtgaaaatattatcacagcagatctaaattcaaattctaatgagcttaattcagattttgcttatggtgattcagattctgaagaaatcttagatgaaccctctcaaaagcttaaaacaggttctgataattctgattttaaagacatacaaaatttaatcgataatgctaaggaaaatgatgtaattgagcttagcggaacctatacaggtgattctctaattgtagtaaacaaatcattaacattaaagtcttcttcaagtgcaacacttgatggagaatttctaaatgaattaatggctataaatgctccaaatgttatattggacaacatcaactttataaatgcaaattacactggtcttagtgtaaataacaattatgtaaccattcaaaattgtaattttgacggctgtatcaatggagagttaggatgtgccttaataatccatgggaataatgtaaatgtattaaactctaattttacaaataatgttgcaaataagtccagctgtcatcatacggatggggcagcaatttatcttattggaaacgattgccaaatcgataattgcagttttataaataattggggttataattttgaaacatcctcatcaggaggagccatttggataaagggaaataatattgtaattaacaattcatatttctttaataattcagctaccgctgaagttggatggacattccatggagaggagataacctatttggcagatggatatggcggagcagcctttttagttggaaaaaatgtaaaaataatcaattccctttttgatagtagcctttcccatgcacaagggggagcattgtattataagtctgcatatgattgttcaataatcaattcaacctttttaaattcattttctgttggagagggaggcgtaatctatttaggtcagaatattgatgggctaatgatagattcttgtaattttataaacaacactgcagacggattggatggagttttagtcaaatacaccgatttaggcagtgttttatatgcttcaaagttcgctgaaaatgtagtgatcactaattcaagtcttttaaacaataaaggaacctctgcagtctactttttaggaaataacttaaatatttcaaattcaatcatagaaaataataatctatcaactgcagtaatttatatgaatggaagtatgaatgacaatttctggtctaagaactttgattctgcagatgagtttaagaatgattgcttcattattcgagataatgagtctcaagttcctgatacttggtttaacttagtttgtgatggcttggatagtttaaaggcgaagggtgtatatgattataatatgtcctttgtcttaaaggatgcttctttagataatcatgcctcaaaaatttcattaacaaataatcttcctaattatcatattaacttaaaaaacagtgcaaagaataagattaatccaaatgaacttgtgattgttgacaatcaggcagacttcacttatgattatattgagtctgctaaggattccattgatgtttatgatgattataataacttgatcttatcaaagaaggttttatctggaataacttatattaatgatagtggaaatgatacaaaagaccttcaggatgcaattgatagtgccagttctggttctttaatctcattatccaataagacttatgttcttgatacaatattaataaataaggatattcacatatctggagaagaaaatacaactgtcatgctttcaaatagttcagattatatatttaaaatctctaattgttctgctgcaaactattctgattatggcatagccatttcaaacattaattttattttagataatggagatattgttgccttagctgaagctgtaaatgggtctggctcattatctattgatgttgcttcaataaagataacagacaactcatttacatctcgtgaaggtgtagtgagggaatcaattactattcttgagcttgatagccaaagggctgtcttagcacctacaagaaatatttctatttctaataattccttggaaattggaatgaatccatttgattttaatgtaaagtctgtcataaatggctctgatgttagagtggatgtagggggcaatttagccagcaaaaaagccagtcagatcatttgtaaagatatggtcactaaagccattgcaagcaatgtagattcccgctctggagaatactttaatgtaagcttaaaggatagccaaggcaaaccattgcaaaataagtttgttcagataggttttaatggtgctgtttataatagaaccactaatgaaagcggagaacttagattacagataaatcttgcttataaaggagtttatacatttgccatatcctatttgggtgatgatgagtgcaacggttcatttgaagttgctaagataactgtaaatcctcaaagtcctattttaatggccaataatgcaaaatataaggtatcatctactaaaaccctttctgctagttttaaatcaatgaaaggaagtcctatttctggcaagacaatcaaattcactgtagatggcaagacttatagtggaaagactaattctaatggtattgctagtgtgaaagttagtttaaataagaagggaacttataaattcactgccaagtttgcaggagataatacttttgcagcggtgactaagtctgctaaggtggttattagttaa

SEQ ID NO: 1464 - DNA, 804 bp, Methanobrevibacter ruminantium
  source 1..804: mol_type = genomic DNA
atgaaaagacagaaaaaaatagctatctatggaaaaggtggtataggtaaaagtactacagtagctaatattgcagcagcttacagtgaagacaataagaaagtcatggttattggctgcgatcccaagtcagatacaacaagaacattatgcggtaagagaatacctaccatagttcataccttaaaggacaataagaagccagagcttgacgatttggttttcgaaggatttaataaaatcaaatgtgttgaaagcggagggccagagccgggggtaggctgtgcaggtcgtggtgtcattgttgctatgaaacgtttggagaacttaaatgcctttgaagaggaatttgatgtaatcttatatgatgttcttggagatgtggtctgcggaggattttcagttcctctaagggaggattatgctgatgaggtctttatagtatcctctggagagtatatgtcattatatgctgcaaataatatatcaagaggaattaaaaaactaaaaggaaatcttggaggcattatctgtaactgcaaaggtatagacaatgaggaagagattgttaattcttttgcaaaggagattggcactcaagtgattggagtgattggcagaagcaatctcattcaaaggagcgagttggatgcaaagactgtagttgagtatgctcctgaatcaatagagtctgatgcttatagaaagcttgcaaaggacatttttgataatgataattattcaactccacagccgatggaagatgaagacttcgagaatttctttaaatcatttattgattaa

SEQ ID NO: 1465 - DNA, 1260 bp, Methanobrevibacter ruminantium
  source 1..1260: mol_type = genomic DNA
atggtagagttattggctccagcaggaaattttatttcattaagcagtgcattaaagaatggtgctgatgcagtttatattggtcttgaagaccttaatatgagagttaatgcaagcaatttctctttagaggatattaaaaaggccagtgaaatgacaaaggaatatggggctaaattatacgtatgcacaaatacaataatgaaagataaggacattgaaatgctaaaagatcaattgccatatattaaggaatatggagctgacggtatcatattgtcagatatttcactgattgaattggcttctcaaaatggccttgaagcccacgttagcgttcaggaaaataccactaatttttatgcccttaagacccttgaaagattaggtgcaaaaagagccatcctatctcgagaattatccttagatgaaataaaggaaatcactagaaaactaaaggagtcagattccactattgaaactgaggtttttattcatggtgcaatgtgcatggcgatttcagggcgctgctttttaagctatggcctttatggcagaagcgccaattgcggagattgtctccagccttgcagaaaggaatggaaattaagctttgaggaaaatgaagatgatgatgtaatcaatttctcagactgtgatgacgaatccttcataatatcccaatcatatgacgattcctataggacaaatttcttctctccaaaggatatggcattgattgaacatattccggagcttattgaagcgggaatcgattcatttaagatagaagggagagcaagatctcctgattatgttgccgctgcagtttccgtttataggcaggccattgatttgtattatgatgacccagataattggcaatttaatcctgaatggatggaagagcttatgaaagtcttcaatagaggctatgacacaggattttattttgacactccttatgagatcagcgaaaacaatcaatccaagttcattaaaagggatattggaaaggttgttaattattataataagattagggttgcagagcttaagatatgggatgatctggctcttggtgaagagataatgattcagggacctactacaggttcaatcacacatgtgatagagtctatgcaaattgatggaaaaagtatagaaaaggcagaaaaaggttccaatgtggccattgccattgatgaaaaattaagggaaagcgattttgtttataagttagttcctcgcgaggagtaa

SEQ ID NO: 1466 - DNA, 1443 bp, Methanobrevibacter ruminantium
  source 1..1443: mol_type = genomic DNA
ttgaaagataaatgtggtatagttgggattcactccaaagactcctctaaggatgtttctcacttaatttattatggtttatatgctttacagcataggggacaagaatctgcaggaatagctacttataatattaattatggcttgaatttccattgtggaatgggattggtaactgatgtttttaataactccctaatcaatagcctaagcggaaatgtaggtattggtcatgttagatattccactacaggccaatcaaaaatagagaattcacagccatttttcacagaattggatgatggatttatcgctatggctcacaatggagacattgtaaactcaggttctttaagagacgaattaactaaaaaaggataccaattcaagtcaggcactgattctgaggttgtctgttatttaattaaagaggcatatgaaaaagataaggatattctcaatgttattgatgctgtttcccaaaagctaattggttcttattccttagttattttaatcaatgatgaattatatgttttaagagatcctatggcaatgaaacctttgattttaggccaaaccaatgatcattttgttgtagcatctgaatctgttgcatttgatgtcatagatgctgaaatcatccgtgacatggcgcctggggaattgctatactttaagaataatgagattaattcctatatcttgccatctgcaaaaggttccagaagagcccattgtatgtttgaatatgtttacttcgctcgtccagacagtgtcatagatgatagaagcgtttataatacaaggcttagaatcggtgaagcattgtttaaggaaaaccctattgatgcagatttagttttacctgttcctgactcctctattcctgctgctatcggctattcaagagcttcagggattccatatggtgagggattaattaaaaacagatatgttggaagaacattcattatgcctactcaagaagagcgtgaaattgctgttaggctcaaattgaatcctttaaaacatgaattggttggaaaacgtgttgttgtaatagatgacagtattgtaagaggaacaacttccgaatctttagttagaatccttaaggctgctggagctaaggaagttcatatgctaatcggttgccctccggtaatcgctccatgttactatggggttgctttggcaactaaagatgaattgattgcagctaatttggaaattgaagaaatcagaaagcagttaggtgctgatacattaggttatataagcattgaatctcttatcgaagccattggcatagatggggacagcttatgtttaggttgtattactgaagactatcctactgaaatacctgaggatttagaggctgaatcctattatgattactatcaagacctaaaggatgctgttgaagaagatgaatag

SEQ ID NO: 1467 - DNA, 1413 bp, Methanobrevibacter ruminantium
  source 1..1413: mol_type = genomic DNA
atgaataatgattttgaatctgatgaatttaattctaatgacaataacaataatgattttgaatctaaattggtagatattcgaattgttttaactgatttaaattatattgaagcgatttctaaagcagtaagtaactttgatttatctaattttaatgtaaacatttcatctatcattccaagctcagatattgaaattgcaaaaaacactatcattggtgctgatttggttttaatcgccacaagttctgattttgaaggaaaagaattatactcaaactttaaaagggctttaaagacggattataattttgttgaatatttgaaattgccttctttagatgaattggaggattacgattatgattatgacgaggacaatacctttgaagatgagatagccaattccataattcgtgcaggattatacagcatttctaacttgtcatcaatcaataaatctaaaaaagcttattataatgttaaaaaggattttgatgatagccgtttaagatttgaaaagattacaaaggaaaatgatatattattgaatgaatcaaagcaaattagagagaaaaacgaaaagcttcgtgaagaggtaaaaatacttcagaaagatttagataacattaaatcagattattcagatttaaaatcaagatttgaaagcattcactctaaaaactctttggaagtcttctctttaatggaattatggcaagatctctttaatgaaacttttacagaggagatttataggtttattctaattagcacagacaatttccgccctaagaatcttatgattggacaaggtgcaatttgtgctgaatcaaaggaagatgcaatggattggttaaagattattaaaacagcttttattctctcagacacaaataagcaagagttgaattttaataatttcaatagcaattttaaatttgaagacttggattccaatatttcaagcagtcagaatttggattccaatatttctaacaccagatatgatttggattctaatgattctaatcttttttctagtttagattctaatatttttaatgcgcataattcagattcttcagatgaatttatttataatgaaagatttgaaggaaataataattcccaagaggaatttagacaattagattttgatgatgctttcgatttaaatgacaatgaaggtcaagaatcatttaatcaaaatgatttagataattcctataattctaaagatgacccttcagatgagataaatgttttcaatctaaagtctcttaaaggatttagagaggaatctgatgaagatgaatccgatgaaaatggggattactcttatgatgaggatgatgatttagatgaggctgatgacttgtttaatccattctcaaatatttgggattaa

SEQ ID NO: 1468 - DNA, 975 bp, Methanobrevibacter ruminantium
  source 1..975: mol_type = genomic DNA
atgattttaattactggtggagcaggctatattggctcccatattaataaattattaaataaatccggttatgagactattgttttagacaatttgtctaaaggacacaaaaaagctgttaaatggggcagtcttgtaaatgcagatttaagtgacagtgataaattaagagagatctttcaaaataatgatatagaggcagtaatgcactttgctgctttttcatctgttgcagaatctgtagaagagcctgaaaagtattttaaaaataattttgaaaatacagctaatcttttaaggattatgaaggagtttagagtaagaaaattcatattctcctcaactgcagctttatatggtattccaaaggagattcctataagcgaatcagctgaattaaagccaatcaatccctatggagagtctaaattaatggttgaaaacctattaaaggacgaatctgactttggaggattgaaatatgtctcgctacgttatttcaatgcagcaggtgcagatttggattgtgagattggcgaagatcataatccagagtctcatttgattcctttggtcttggatgcagcaattggaagaagaaacagcatttccatttttggtgatgactatgacactccagacggaacatgcataagggattatattcatgttcaagacttggctgatgctcatttaaaggcattgcaatacttagaagagccttttaatgacagcaatatatttaaccttggaaacggcaatggattttctgtaaaggaagtcattgacacttgtaaaaaggttacaggaatagactttgaagtgaaggtggaagggcgcagacctggagacccagatatcttaattgcagattccaaaaaagcagaagaagtcttaaaatggaaaccagagtatccagatttggaagacattgttgaatctgcttggaattggcataagaaacttcacggataa

SEQ ID NO: 1469 - DNA, 1191 bp, Methanobrevibacter ruminantium
  source 1..1191: mol_type = genomic DNA
atgattaaaactgatgtattggttattggtgctggacctgctggttcttcagctgctagatttgcagctaaaggcggcgtagatgttattcttatggataagaaatccgaaataggcgctcctaaaagatgtgctgaaggtgtatccaaaaagacttttgataagttagaccttgaaatggatcctcattgggttacccaagaaattgcaggggtcagattagtcgctcctgacggaactgatgtatggcttgatgaagatgttattgacttgcctgaagcaggatatatcctagagagaaaagtctttgataagcatatggctatggaagcaggaagagaaggagctcaaattaaaatcaaaacccaagctaaaggcttgaaaagagaagaagatggaagcttcactgtaacttgcgaatccatgggtgaaacctttgacattaatgctaaaataattatcggtgcagacggtcctgaaagccatgttgcaagatgggctggcttgaaggcatacaccaaacctaaacacatggaagctggagttcagtttgaaatgtgtaacgcaaaaatggaaaagagcaatgttcttgaattctactttggaagcgtagctcctggaggatacttctggcttttccctaaaggagatgacattgtaaatgcaggacttgctatcattccagatatggctggagataaatccgcttacgaatacttagttgatgctgtaaacaactgttatgctactaaagacgctcagcctgttgaattgaatgtagggggagaccctgtaggcgggcttgttaaggaaatgtacggcgacaatatcatgctttgtggagatgcagcaagccaagtaaacccattgactggtggaggaatcaccaatggtatgatgggcggaagatttgctggtgaagtggctgctgaagctattaaagcaggggactgctctaaagacttccttaaaaagtatgaagatttagttaaagaagaaatgggtcatgaaatgcaaaaatacactaaagtctgtgattacttatggactttagatgatgatgacttaaacagcatcgctcatgctttccaagatatggaatttactaaaataagtacaactgagcttgttaaggctgttattaaggttcaaccaaaagcagctttgaagttaggtaagttgttcttataa

SEQ ID NO: 1470 - DNA, 165 bp, Methanobrevibacter ruminantium
  source 1..165: mol_type = genomic DNA
atgattgtaaaagactggtgttcatactgtggctgctgtgcaggagtatgtgcaagaaactgcatagaagttaaagaaactgctttagtcatctctgatgactgtaatgattgtggaatttgtgtaaaagcttgtcctttagcggcattggaattagaagaatag

SEQ ID NO: 1471 - DNA, 606 bp, Methanobrevibacter ruminantium
  source 1..606: mol_type = genomic DNA
atgcctagttttttaaatatacgtggaaataatcatgaccctaaagaccctcaattaattagagacggtattaaattgggagtaaactataaaagattctctaaagagccagtattaggtaaaaatatcttgcttagatcaaatactgttatctataatgatgttatcataggggatgactttaaaactggacataatgttgttgtaagggaccataccaccattggtgatgatgtgttgataggtacaaacactgtcattgaaggtggatgtaagatcggaagtaatgtaagcatccaatccaatgtatacattccacgaaacagtataattgaagataatgtatttgtaggtccttgtgcctgttttaccaatgacagatatcctgttagagttgaatatgatttgaaaggccctcagcttagaaaaggatgttctgttggtggaaatacaacattcttatctaatattgaagttggagaaggagctattgtagctgcaggtgcagttgtaacacgtagtgtgcctccttattatttggctataggtactcctgctaagattaagccgttgccaacttctttaagagttccgaatatgatttaa

SEQ ID NO: 1472 - DNA, 312 bp, Methanobrevibacter ruminantium
  source 1..312: mol_type = genomic DNA
atgacaaaacatgtatgtcctcgttgtggttcaactaatgttgagtggattattccacaaaactggtctaaatgggaatgcagggactgttcatacacaggacctattatagacgcagatgatgatttaattgctgaaattaaagcagattgggaagaaaataaagaaaaatacatagaagaagagtatgctcgtgctgaacagatggcctcaggtgaagatgaacgtcttgatgaagagatggaaattgcagaagaggacgagctttcagacgaggaattggataaaaaactggaagaattggatttatga

SEQ ID NO: 1473 - DNA, 1161 bp, Methanobrevibacter ruminantium
  source 1..1161: mol_type = genomic DNA
atggtttatgatgttagtgctcttttaagtcatattaatcgaataaggcgtgagataggtcatgaagaggttaatatagaaatcaaagaggttttatataatattgaaactaatgagatgtggataatcaccaatgaccgtccggataagtctgcagttattggaaaaggaggatgggttgttggaagacttagagaagagcttcaaataaatagcattcatgtggaaagctattcagactttttgacaaaggaatataggatgggactgtccttaaataagctaaaaagctttgtcacaacagaagatttaagcgatgatgttaagctttcattatacaatctaatcgatttattaactatcaaatcggataatttgtattcatttgactttaagtcctattttgatgatttggaaaatggcccttattcgtatttcgaagcagagaaacctgttgcaattgtagccttatctggagggacagatagtagcttttcattgatacttgcaaaaaaattaggatttaatcctatagctgttactgtagatcctggaactatcgtgcttccaaatcaattcaaatataatattgacaagttaacaagcaagctggatgtaaagcatgaatatattccagtggcttatgatgatataattgaagattcacttgcagggagattccatccttgcggaaggtgttcaaaaagaatagaggaaactttatttaaatatgctgtagataatgatattcctatggttatatttggagatatgctgtcaactggcagtcaatgcataactgagcagttttatggtgaaaactctgaagattcagtttctcaagatttagaagattcagtttcttcagatttagaagattcattcaatactgaattagaagattccatcaatcataaacttattagacttaatctaccggctgcactagctgtttccaaattggagaataaagctctaacaagccattatgaattaaataaatttaagggattcggatgccctttattgtatgaggttcataagaagtttccacatatgaagaagtattccattcaaagaatcctaagggaaactcgttcaagtgctttagagcctggtgaagctttagatttaatttggagtttttataaaactgattag

SEQ ID NO: 1474 - DNA, 1419 bp, Methanobrevibacter ruminantium
  source 1..1419: mol_type = genomic DNA
ttgaaaattagaactggaagacttgaaaaggaaatgactgatgaagctgcggtatacacatcttcattggaatttgacagatttatctttgatgcagacattcgctgcaattacgctcatacatccatgcttaaagctcaaggaatcattgatagcgaaatagctgataagattcttgatgcattggataagcttagtgaagagggctttgatgcccttgaatttgaccattccgttgaagacgttcatatggctgttgaaaactatgttacaaagcttgtaggtcctgaagctggctttatgcacactgcaaaaagcagaaacgatcaggtggctacagacataaggcttcttttaagggatagaatcagcgaaatacaaattgcaatacttgaattcattgaaggaatactggagcttgcaaaggaacataaggaaactgtaatgatcggatacacccatttgcagcatgctcagccaattacattggcccatcaccttatggcgcatgctcaggccttaaaaagggactaccaaagattggatgacacctataaaagggtcaatctaaatcctctcggctcagctgcaatggcaaccacaagttttccaatagacagagaacttacaacaaggctcttaggctttgatgattatcttgaaaactccatggatggtgtatcatcaagagaccatattgcagaggccgttttcgaccttactgcactgtgcacaaccctatcaaagatatgtgaagagcttgtcctttggagcacatatgagtttggaatagtctcaatggctgatgaatactcatcaacttcctcaatcatgcctcaaaagaaaaatccggacgttgctgaagttgcaagatccaaatgtgcaatagtaaacggagagcttatgacaatcctaaccattcttaaggccatcccatacacttataatagggatttgcaggaaatcactcctcatttatggaatgcctgtgatgtggcctatgatacattaaaaatcacaaatcatatgcttttaactgtcacattcaatactgaaagatgcttagagcttgcaggtgcaaactttgcaacagcaacagacttagcagacattatggttagggaaaggaagataccattcaggacagcacataagattgtgggaagaattgtaaatgaggcagttgctgaaggattgaatccaagtgaaatcgatggagcttatgttgacaatgtggcagatgagcttggatttgataaattgaatttagatgatgatttgattcacaatgccttaaatccaattgaaaacgttaagataagaaatgttcctggaggaccttctcctgaaatggttcaattggctattgacaatatgaatatatttttagatgtggagtttgaaaaacaaggcatctga

SEQ ID NO: 1475 - DNA, 159 bp, Methanobrevibacter ruminantium
  source 1..159: mol_type = genomic DNA
atggctactaaaaaagaattatacactgtagaaggggacaaaatcgtaagaaaaaacccattctgtcctcgttgctctgaaggcgtattcatggctgaccacggtgacagatacgcttgtggtaaatgtggatacactgaaatgaaaactaaagaatag

SEQ ID NO: 1476 - DNA, 315 bp, Methanobrevibacter ruminantium
  source 1..315: mol_type = genomic DNA
atggaaattgaaattactgaaaagaaagaaaatattttatttgacagaacagaagttaaatttaactgcttatatgaaggagaagcaactcctaaacttttagatgttaaaagcaaattagttgctttacttgacactaaaaaagaattaatcgtagtagacaatattcaaccaggatatggtgaacctaaagcaacaggatacgctaaagtatacggaagagaagcatccttattagatgtggaaaaaccaagcgtaattgctaaaaacaaagaaccagaagctcctgctgaagaagaagatgaagcggaatag

SEQ ID NO: 1477 - DNA, 501 bp, Methanobrevibacter ruminantium
  source 1..501: mol_type = genomic DNA
ttgtttagaatagatgagaattcaatagatgaatttaaaaaaccattaggagtactgtatcctgattttgaagatgcaattcctatgataaaggaggctagttttctaatctctgttggtgatcagactattaaaaatcttcttgataacgatttatatcctaatttagggattattgacaatcgtattcaacgtaaagatcataatcatgatattattcgtacagaaaacattctaaaggcggacaatcctgcaggtaccattactgaagacctatgggaaaccatagagttagctatttcttcaatacttgaagatgaggacactcgcattattgaagttaaaggggaagaagatcttgcagttcttccatgcttattaatcgcacctgaggatgctgttatattatacggccagccaaacgaaggcttggtctttgttaatgtttttgaagctaaagacaaggctaccagactcatgactttcttcaataaggaatag

SEQ ID NO: 1478 - DNA, 831 bp, Methanobrevibacter ruminantium
  source 1..831: mol_type = genomic DNA
atgggatatttaacagatttatttaaggaagctttggtttatcctctcagcaatatagttacattaattattcttggagtattgctaacaataagcaagtttccaaatgttctatcaagttttggagtagatgtcgattttcagttaataattatctttgcattgatttcttttgtagtttcattattcatggacggctattcattggctgtaattaaggatgcagttgacttcaatgtatcaatgcctgcttttgacattatgaaaaatttcattgacggcgttaaggtatgggtattgaaaatactttactatattattcctacaataattacaatttttgttgctttattgactggaggagttgacgcaatacttaatatctttaggtttatcggtgaaaatcaggagcttttatccaatctaaatacaccagcagaattgataaatgcaattcctcaggaatatattgcaactttccttactagcttattcattactgcaattgttgcaattattttatacattatatttggtcttctttacaacattggcctttgcagattagctaaatatgacagcttcaatgaaggaataaacttcaaggcaatcatcaacgacattaaggcaatcggtttgggaacttatattctatggtatattatattgttccttatcatatttgccatatccattgttatgggcttgattgcagctattccatatattggaattatattgcttaatttgctttttgctccatttattttcttgttggtaaacaggtcacttggtttattgtatactaaagcagaaggatataatggatag

SEQ ID NO: 1479 - DNA, 183 bp, Methanobrevibacter ruminantium
  source 1..183: mol_type = genomic DNA
atggctttacaagcttgtacacattgcaatttattaactgaaaagcaacaatgtcctgagtgtaagaatcctacttctacaaattggagtgggcttttaatcattacagatcctgaaaattcagacattgctcgcgagttaggtataaaaaaagcaggagaatatgcattaagagtaagataa

SEQ ID NO: 1480 - DNA, 570 bp, Methanobrevibacter ruminantium
  source 1..570: mol_type = genomic DNA
atgacaactattgagggaactgtaagaattccaccacacagatttggtgaacctcttgaagatgtagctattgaaactttaaatgagtcctacaacggtcagcttgataagaatttaggtttaatagtcggtgttaccagcattgaagaaatgggtgaaggagttctcattatgggtgatggagctgcttaccacaatgttatctttaacgctatcttctttaagcctgaacaacaggaagtcgttgaaggagaagttattgatatagctgaatttggtgcatttgtaagaatcggacctatggatggtcttgttcatgtatcacaagtaactgatgattatataaattatgatcctagaaacgcttctcttatagctaaggaatctaaaaagatccttactgaaggagacagagtcagagctagaatcgttactttaagtcttaaaggaaaaaccgttcaagaatctaagattggtcttacaatgagacagcctaatttaggtaagtttgaatggattgaaaaggaaaaggcaaaagctcttgaaaagaaaatggctaaggtggaataa

SEQ ID NO: 1481 - DNA, 402 bp, Methanobrevibacter ruminantium
  source 1..402: mol_type = genomic DNA
atgaaatctgaatcaagagaagtttttattgatactaactttttcatgattcctttccaattcaatgtggacatcattgaagaatttaaaagggtattgcctaattataaattggtgacaaccacatttgttattgatgagcttaagggcttaaaaaataacaataaaggaaaagtcagattagcagcaggtttgggattaagaatagcccaatctgatgagatagaaattaggaatgtttctttaaatgatggagaatctgtagatgatgctttaattagaatttctaaggtattggctacaaatgacatagtcttaaagaaaaaagctaaaaagaatggaatcgctttggtctttttaagacaaaagaaatatcttgctgtagatggttatttggcttga

SEQ ID NO: 1482 - DNA, 1224 bp, Methanobrevibacter ruminantium
  source 1..1224: mol_type = genomic DNA
gtgaaagtacaatctgatgttaacataggactggtgggccatgtcgatcacggtaaaacaactcttactaaagcattgtctggtgtatggacagatactcacagtgaagaaacaaaaagaggaatatccattcgtttaggatatgctgatattgaatttagaaaatgtccaaattgtgaagaacctttatgctacactactaaagaagtctgtgaacattgtggcagcgaaacagagcttattaaaaaagtatcatttgtagacgctccaggacacgaaaccttaatggctactatgttatctggtgctgcaattatggatggtgctgttttagttattgctgctaatgaagagtgcccacagccacaaacaaaagagcatctaatggctcttgacgttattggcgtaaaagatgtagttgtagttcaaaataaggttgatattgttcctagagaaagggctattgaaagttacaaagaaattaaggaatttgtaaaaggcacttgtgctgaagatgcaccgattattccagtttcagctcagcaaggagcaaatattgatattcttattaaggctattgatgaaacaatcgtcactcctgaaaaggacttagataaacctgcaaggatgcatgtggccagatcttttgacattaataagcctggttcccatccagataagattaaaggtggagtaatcggaggtagtttgactcaaggtactcttaaaattggggacaccattgaaatcaggcctggaatcaatgttaaggaaaacaagcagaataagtggatcagcttaagttctgaaatcattggtcttcaagcaggaggagaggctgtagaggaagtgggacctggaggtctcattggagttgctaccaagcttgaccctgcattgactaaggcagattcattatccggttctgttgcaggtatggaaggcaccttgcctgacgtattgcatagctttgatatgaaaacagaacttttggaacgtgttgtcggtactaaggaagaaagggatgttgacccaatcaagcttaaggagcttttaatgattaactgtggtacaacaaccactgttggtattgttaccagtgttaaaaagaacattagcgttgatttgaaattgcctgtctgtgcagacaagggtgatagggttgctttatcccgtagggtcggcgcacgttggagattgattggttttggtatcattcaatag

SEQ ID NO: 1483 - DNA, 390 bp, Methanobrevibacter ruminantium
  source 1..390: mol_type = genomic DNA
ttggcatttaaaattgttgtatctgaaaaagaattaagctatcaattagaagttgaagaagctaaacaattaaacggtttaaccattggcgaagaatttgatggtcaaattgtaggattagatggctatactttaaaaatcactggtggtagtgacaaaaacggttttgctatgaaaagagacgttgatggtcctagaagaatcaaaagtcttttaactggtggagtcggctacaaccctaaagttgatggtgttaaaagaagaaaaactgtcagaggaaacactatttccgaagacatcgttcaaatcaacactattgttaccaaagcaggtagcaaatccatacctgaaatcttaaatcctgaagaagaagaggaagcagaagaataa

SEQ ID NO: 1484 - DNA, 1791 bp, Methanobrevibacter ruminantium
  source 1..1791: mol_type = genomic DNA
atgaagattagatcaccaattgtatctgttttaggccatgtagaccatggtaagaccacattattagattatattagaggtagtactgtagctgatagggaagctggtggtattactcagcatattggagctactgaaatacctattgatacaattaacgaaatatgtggagaatttatttcaaaactagcaattaaagatacaattccgggattgttttttgtagatactcctggacatgctgcattcacctcacttcgtaagagaggaggagcattggctgatttggccattttgattgttgacatcaatgagggcttcaagcctcaaacatatgaggcaatcaatatcctaaagatgtataagactccattcattgttgttgcaaataagattgacaggctctttggttgggaaactcatgaaggagcttcctttatggaaagctataataaacaggctccaagaatcaagtctgatttggacttgaagatttatgagcttatgggcaagcttcatgaggaaggtttccaatctgaaagattcgaccacgtaactgactttgcaagccagatatccattgtgccaatctgtgcaaaatcaggtgagggagtcattgagcttatagcattattgcttggtcttgctcagcaataccttacacagcaattggaaataagcgaagatgcccctgcaaaaggaactgttttggaagttaaggaagaagtgggacttggaattacagttgacagcattatctatgacggagtaatccgcgatggtgatgagattgcattgatggatgcaaacaatgttgtcacaactaaaatccgttctatcttaaggcctttgcctcttgaagagatgagagattccaaaaacaagtttaaaaaggtcgatgaagtcgttgcagctgcaggtattaagattgcagctccaaaccttgatgatgttgtttccggctctccccttagggtattaagcgaccaggaggatgtggaagctgaactcttgaaggaattggaagacatcactgtcgacactgacgatgagggaatacttgtcaaggctgataccttaggttcccttgaagcggttgttcatttgcttaaggagatggacttgccaatcagatctgctgaaatcggagacatcagcaagagggatgtcatcaacgcatcaatcgcaatggatgaaaatgaggaatatggcgtaataatcgcattcaatgtaaaggttcatccaaaggctgaggatgacctgaagaattctggcgtaaagctctttgccggcgatgttatctatcagataacagaggattatgaggcttggatagaggaacgtaaggaagctcagaaaaagcaatggctcgatgcaatcatcaagcctgctaagatcatgattcttccaaagcttatattccgtcaaagcaagcctgccatatgtggtattgaagtggaagccggtacaatcaagactggatattcattgatggatgcaaatggcgactatgttggtgttgttgcaagtatggaagataagggtgaaaccttacaggcaatgccaagaggtcaaagggttgctatggccataaacgatgcagtggcgggtaaggactttgaagagggagactcattatatgtggacattccagaaaagcactttaaggtcctagaacgtgaatttaaagacaagctaactgaggatgaatttttagccctagatgagatcgttgaaatcaagcgcaagcgagatagtgattggggtaaattaggtcttttcgagtattaa

SEQ ID NO: 1485 - DNA, 453 bp, Methanobrevibacter ruminantium
  source 1..453: mol_type = genomic DNA
atgattgaaagaagctttgttatgatgaaacctgatgcggtatctagacgtttgatgggtcaaattttaagccgttttgaagataaaggtctcaaaatcgttgctatgaaattaagacaaattgatgaagatttagctaaagaacatcatggtgaacacaaggaaaaaccattctttggcggtttagttgaatatatcacttcttctccagctttaaccatggttattgaaggagacgacgctatttctgtaatcagaaaaatggtaggagcaactaatcctaaggaagcagatatcggcaccattagaggagacttcggtatggatactggaagaaacattatccacgcatccgacgcacctgaatctgctgcaagagaaatcgcactcttctttgatgaagaagaaatttgtgattattctatgtctgataacgcttggatttatgaataa

SEQ ID NO: 1486 - DNA, 162 bp, Methanobrevibacter ruminantium
  source 1..162: mol_type = genomic DNA
atgagaacttgttcattctgtggtaaagaaatagaagaaggtactggaaagatgtatgtgaaaagagatggtacaatctatttcttctgtagtagtaaatgtgaaaagaatatgataaaacttggcagagtaccaagaaaagtaaaatgggttaaacaatga

SEQ ID NO: 1487 - DNA, 207 bp, Methanobrevibacter ruminantium
  source 1..207: mol_type = genomic DNA
atggaagaaggaagtccagctgaagttatagaagttctacacagaactggtatgactggagaaatcatgcaagtaaaatgcaggattctcgaaggaagagacaaaggaagaattttaacaagaaatatcatgggccctgtacgtgaaggcgatattttaatgttactcgacacaattagagaagctaaggagattagaactccttaa

SEQ ID NO: 1488 - DNA, 408 bp, Methanobrevibacter ruminantium
  source 1..408: mol_type = genomic DNA
atggatggcaaaagccagatgaaaaaggaggtaaattatatggcaaacatttatgtaaaatttgacacacctgaagaaatcgctaacaaagcagaagaagctttagaagtagcacaaaatactggtaaagtagcaaaaggaactaacgaagtaaccaaatttatcgaaagaggaaacgcagctttagtcgttatcgcagaagatgtagatcctgctgaaatcgttgctcacattcctgttcttgcagaagaaaaagaaattccttacgtatacttagctaccaaagataaagttggtgcagctgctggtttaagtgttggaactgcttccgcttgtattgtcgatgctggagacgctgctgacttagtagaagaagttgttgaaaaagtagcagaacttaaagaataa

SEQ ID NO: 1489 - DNA, 198 bp, Methanobrevibacter ruminantium
  source 1..198: mol_type = genomic DNA
atggaattaccaatcgctcctataggaagaatattaaaaaacgctggtgctgaaagagtagctgacgcagctaaagaagaattagctgaagcaattgaagaatacggtaacgaaattgctcaaaaagcagttaacttcgcacgccacgctggtagaaaaactgtaaaagctgaagacatcaaattagctattaaatag

SEQ ID NO: 1490 - DNA, 1197 bp, Methanobrevibacter ruminantium
  source 1..1197: mol_type = genomic DNA
atgattagatgtgtgtcttgtggagaagaatacgaagatgatgaagttatctacaactgtaaaaaatgcgggtctgttttagaagtggaaatggaagtcgatgttcctaaatccacctttgaaggcagaagagataacttatggaaatataaagaatgcttgcctgttgatgcagataaaagggtttccttagatgaaggaggaactccattctgcagatgtgaaaaattaggcaaggaacttggcattgacttatatgttaaagtggaaggatccaaccctaccggcagttttaaggacagaggaatgactatcggtatgactaaagcaatgatgcttggtgtggatactgtaggttgcgcttccactggaaacacctcagcttcccttgctgcttatgctgcaagagcgggacttagatgtgctgtatttttacctgcaggtaaagtggctcttggtaaattggcacaggctatgttccacggtgcagaagtgttctctatcaatggaaactttgatgaggctttggaagctatgactcagcttgcccgtgaaaaatacttatacttactcaattcaatcaacccattcagattagaaggtcaaaagaccatcggttatgaaatcgtacatgatttaggttgggaatctcctgataggattgtattgcctgttggaaatgcaggaaacatttcagctatctggaaaggaataaccgaattccataatgcaggattcatggatgacgttccaatgatgactggtattcaagctgaaggagcttgtcctattgctaacgcttatagggataatactatggatatggttcctgttgaaaaccctgaaaccattgcaactgctatccgtattggagctcctgtaagtgctgttaaggctttaagagcaatctatgattccaatggtatggctgaaaccgtaactgatgaagaaatcttggctgcacagaaattgcttgcaaggactgaaggcgtaggtgtggaacctgcttctgctgcttccattgcaggtcttaaaaagctagttgaacaaggagatgtcgataagggagaaagagttgtatgtgtcgtaaccggacacttgcttaaagaccctaacactgcaatcgatgcatgtgttgatcctgttcaagtggatgcagacattgataagattaaggagattttgcttaataaatag

SEQ ID NO: 1491 - DNA, 702 bp, Methanobrevibacter ruminantium
  source 1..702: mol_type = genomic DNA
atggaagactttaaatattacaagaataagattaaagaggagattaaactagcatttgctcataataaatactttttaatcgtttctgctcttattttcattattcctatgtttgtaggatatttctattcagatcagataactccatacattcagcctatggttgatacctttgaggaaaacattagaaatggaactgtgactttatcaacaaagtccctatttgcaaataatgttgaagtggctataattctatatgcattatctgcccttggggctattttaggaattgtcgttttagcaaacaatggattatttattggattttatggtgcaaactttgaattgacacgctatgttcttttaactcttcctcatggaatatttgagatttcagcaatcattattgcaacaacaggaggatttgtgattctatcatttgtgctgaacttcttgtataatgtgatatatcctgattactcctatactgatatatttgatccttactttagcgatgctaaaataactgtgggacaaagatttaaatcctcttttaaaaagcatggtcatagaattaaggaatcttttatattgctttgcgtatctgtaattcttcttataattgcagcattcattgaggcaaatattaccattccttttgcatattggatttgctccttgtttgggataagcctgatttaa

SEQ ID NO: 1492 - DNA, 1092 bp, Methanobrevibacter ruminantium
  source 1..1092: mol_type = genomic DNA
ttgattgatccatgggcatcattttcactagattatgataaattagtaaatcaattcggtataaaaaaatttgaagaagttttggatagcattgaagatcctgcaaggcttatgaaaaggggagttatctttggacatcgtgattttgacaagttagttcctttaatcaatggaggcaaggattttgcagttatgactggtatgatgccaagtggccaaatgcatataggtcataagatggttatagaccagctcaattggtattttaaaaaaggagcaagcttatccttatcaattgcagatatggaatcatatgctgcaaggggaataagcttcaatcaggcaaaggacattgcaataaatgaatatttaaaaaattacattgcattgggccttgacttgactgcagataatgtgaatgtctatctacagtcacaaaacaagacattgaatgacttgacatttaagttggctaaaaaggttaatttcaataatatgcatgccatctatggatttaatgaaagcacaaacattgcacacttatatgttcctttagtgcaggttgcagacattttgcttcctcagactgaagagtttggaggtcctaagcaggttgttgtacctgtaggtgttgaccaggatcctcatcttaggcttacaagggacattgctgctaagatgaatgaggaatatggatttttagctccagcttccacttatcacaggttcctaactggccttacaggagataagatgtcaagcagcaagccgaatactgcaatttacttgaatgaaactccaaagcaggcagagaaaaaggtcaaatcttctaagaccggaggaagagagacacttgatgaacagaaggaattaggcggaaggcctgatgaatgtgttatctatgagatgcttgtctatcatctgattgatgatgataaggagttggataagattagggaagaatgcataaatggagaattgatgtgtggacattgtaaggttcatacagcagagcttatgaaagacttctttgaagacttgaaggttaaacaagaagagtctttagatattgctgaatctctattggattaa

SEQ ID NO: 1493 - DNA, 516 bp, Methanobrevibacter ruminantium
  source 1..516: mol_type = genomic DNA
atgcgtggagatttatctgatggaatagttacagtcaaaattggagaaggaaacgaaagagctatttcacttaatcaaaaaagccagttcggtaaactgtctgaagactgtttagagctttctcttatggaagcttcctatctaatggaaagcggacgtttggatatttatgaagatgatgaaaaatgtcaattggattatatcattgacatgataaaagaccaagatctttatggaaaatacttggtttatagggatttaaaaaatagaggctatattataaagacaggatttaaatacggctctgaattcagattatatgaaaggggaaccggccctggcaaatcacactctgattttcttgtaaaggtcttgtatgaggcaaatgaagtaaatgtcttagactttgcaagctatgtaagggtttcacatggagtcaataagaaattattgcttgcagttgtagatgatgactttgatgtgacttattataatattgaatggacacgtccgtaa

SEQ ID NO: 1494 - DNA, 654 bp, Methanobrevibacter ruminantium
  source 1..654: mol_type = genomic DNA
atggctcgtgaaattagtgaaaatattgaagaatatttagaaactctctacaaatttggaagtaaagattcatatgtatccactaccactttatcaaaggaattaggaatagctccaggtagtgttactcaaatgcttaagaaattagaggatataggatatattgactatgtcccttataagggagcttttttaactgctgaaggtaataagattgctcaaaagattacaagaaaacacagaatccttgaaaagttcttgaaggatgtcttaaacattaaggatgagaacctccatgctcaggcatgcgctatggaacattcattatctgatgaggctgaaagggctatctgccatatgctggagcatccagacacttgtccagatgataatatcatccctgcatgtgactttaactttgaaagctgtgaagattgcttgaatgaccaccttgattttgatgacattgaagagagggactttaatcttttctcaatttcacaattgtctaaaggagatgagggtgaggtattgtttataagaggcagtgatgatgctttagcccaatgtgttagagtgggcatcaccgttggtagcaaagttaaaatagaggaatctgaaagccctaattttttattctatcacagtaaatga

SEQ ID NO: 1495 - DNA, 1449 bp, Methanobrevibacter ruminantium
  source 1..1449: mol_type = genomic DNA
ttgagttctaatagtttaagttctaatgaattaaattccaatcaattaaattccaatcaattaaattctaattctatttcaaattctaattctaattctaatcaaaaagccaattcaaaagattctcgtctgattttgctcaatgataaaaacttaaaagtaaacggaactgaagaaaaatattttataaagcttgttgatggcaacggaaatcctataccttatgttgatcttatttttaacatagattcttcaattgaattcgttggaggtaccgttcgaactgatgaaaatggaatcgcttatatttttatggatttctcatatcctggtccatatactgtttatgcttcatttgaaggtgatggaaatcataatccttccagcactttatcttctacagtatccgtttataaagacactgaaatcagctcattacagtcatatggctatcttggagagaacttttcatttaagattacaagttgcggggagcctgtatccaatcagaaggttcttataagcattgataataagaattatactgcaacaacagattcagagggtattgcaaaggtaaaactaccaaatcagcaaaagacctattcaatatcctgtaatttttcaaatcgtgtatattactatggatctagcttaagcaagaatattcctgtttataaaagggctttcacccagccaaattgctatgcccttttaagaaaatcaacattcacagttaccttaaagggagctgatggaaagattctatcaaatcgcaccctaagatttattgtggatggaaaggaatataataaaacaactaattccaaaggtgcagcttccataaatattgatttggaaaggggagaatatagaataaattattatttcaacaccgatggggtttatggtccagtaagcaattacactgatttgaatgttgtagatccttcaggccaatacaaaaggcttttgaatgtaaaaagctctgcttcagctaagatatatctcactggcggaggatatgccacagtcaccagcctaataaagagcactgcaaaatccatcactaaaaagtacaagaccaattttgaaaaggcagtggccatctataattatgtaagggataatttggattatcaatattattacaatacaagaaagggagccactaaaacattaaagacaaagtctgggaactgctgtgatcatgctaatctggtggttgctctttgcagggcatctggaattccagcaagatattccaattcaaagtactgtgtttttggttcaggtcttcgttcagggcatgtatgggctcagatttatgtgggaggcacttggtactctgcagatgccacaagcagcaggaataccctaggccatattgaaaattgggatacaaaaactaataagaaagattataacttccgcaatctgccattctag

SEQ ID NO: 1496 - DNA, 348 bp, Methanobrevibacter ruminantium
  source 1..348: mol_type = genomic DNA
atgtctagaacttggagtttttataaatcttttaagaatttgatagttggtgttaatattagaactaaacttttatttttatcagcattattgatattattattgtctatatcttctgtttcagcagacagttctatagatgattctaatttagatattgattctaatttaggtattgattctaatttagatttaaatgcagatttatatgcagatttaaataattttgatgattttaataatctaaataattatgattattccaataattatgttgattatagtgatattttagaaggggattccttaatctggaaattgaaaagaataatcattttaataaattaa

SEQ ID NO: 1497 - DNA, 3033 bp, Methanobrevibacter ruminantium
  source 1..3033: mol_type = genomic DNA
ttgcttttagcagttttattaatgggatttgtattaatatcctctgtatctgctattgatattgatgaagcaagttcttcaagtgacttatcagattctagcatttcaaatgattatttagtagcaaactctggagatgattctgtagctagttcaagtgcatctagttcaattgctgcagatgattcagatctttctaacaatgctagttcaagtaatgttaatttcgaaaatgaagttttaagtactaataataatgaagatacagaatccgaaattgtaaaggattctaaaaatcaattgtcttcatcttctcttcaagctagtactaaaactaaaaccactcttaaaggcagtggaagctccgtctataggggcaatccatattatgttactttaactgatagtaatggtaaggttttagctagtcagaaagtgacttttaacatccttggcaaaaattacactaggaccaccgattctaaaggtgtggcttccattaacattaatttagccaaaggaaagtataacatagcttgcttatatgcaggcactgaaaactatgcttcatcaaagctatctgtagctttgacagttaatttaatgtccactaaaatcaatacaggtggatcaaccgttaaaaaaggaaatgcttattcagtgaccttgactgatggaaatggaaaggcattatccagtcagaaggtgaccttaaatatccttggaaagaattataccagaaccaccgattctaaaggtgtggcttcaattgcaatcaatttggctgcaggtaagaaatttaccttgactgcatcctatgctggctctgcaaattatctctcttccaaggtatcagcaactgttactgttcaaaaaggagatacaagcataaagcctagcggaacttcaatcgttaagggaaatagctattcatttaccttggttgatggaagcggcaagggattggcaaaccaaaaggtcgccataaagatatcaggcaagtcctacagcagaaccacaaactcaaatggtgtggcttcaattgcaatcaatttagctgcagggaaaaaatattcaatagtctgctcttatgccggctcttccaattataaggcttcaagctcaacagtaagtctctctgttacaaatccaagtacaaacagcaagactttctccattgcaaaaatagaagctgccgccactaacctaaaggcttatgtaaataagaataaggcagtgcctacaactgtaagcgttggcggaactaacttgaaaatctcagagttttcatacttgatgtcaaaagccattgtaaatcttaattccaataatactaatgccataactcttccaagcggcatctataatggggcatcagcttccaattcattaaacgctacagtctataaggcccaatatgtggacttatccaaaagggtctataactatatagacaagaataaggttcctgctgcttatggtactgtttataatgccaatggcgcttccttaggaaatgcaggatttaacctttacacatttgcatttgcaaagattttggatttccataagaccaataagtatttacctaattactgcagctttgacagttctgtattcaaggcgtccaatggttcaagctcaagcaatagctccagttccactaacagttcaagctccactaacagttcaagcggatcttcaaactccagcggatctggaagttcaactcctgcagttaccgttaaggctacaagccttaaggcagcaagcacttccgttataagaggagatgactattcagttactttaactgatagcagcggtaatgctttggctaaccagaagattacatttgccctttcaagttccagctacactaggaccactaattcaaagggtgttgcttcattgaccctcaatttagcaggtggcaaatattccataactacttcatatgcaggcacatcagcctataaggcgtcaaagcttacaaacacagtaactatttcaaacagctcttccagattcttcttgaatgacattgaaacagctgctgagaatgtcaagacttatgtcacaaagaataaggcgttgcctaataccgttacagttgcaggcacccaattgaccctttcacaattctcctatgtcatggctaaggccattcataatataaatgcaagcaactctaattatatctcccttaaaagcgttgcaagcagcaattctactggagattatttggacactacagtctatagggctcaatatatgaacctaaccaatagggtcatttcatttgtggaatctgataagattactccaactttcgctacagtctacaacagcaatggaaaatctgtaggaaaggctgaattcaagctttacacctttgcatttgcaaagattctagctttctataagaccaataattatttgcctacctattgtactttccaaagctcagctatcggtgttgttccagatgttgcaactaatgtgacaatcaacagcaagatcaatgctaatatgaaccaattcaaggttggattgaatgagaagaacactgtcagcaacctttcagcctatttggtaggtactggccagtcaacaatcacaacaaacattaagaatgttgctgctcagctaaccaaaggattgaattcaactgcaaccaaggctcttgcaatatataattttgtaagggatgacatttcatacagctattattcagacagtaggaaaggtgcagacggtaccttaagctctggatctggtaattgtgtggaccaagccagtttggttgttgctctttgtagggcagcaggcattcctgcaaggtattcacatgctcaaggatgtaccttctccagcggattggttacaggacacgtatgggctcaaatccttgttgatggcgtatggtattcagcagatgccactagcgtaagaaatagtttaggaaatattgtaaattggaatacaaattcctatcatagtatgaagcagtatgctgctgttcctttctag

SEQ ID NO: 1498 - DNA, 3897 bp, Methanobrevibacter ruminantium
  source 1..3897: mol_type = genomic DNA
atggaggataatcttttgaaaaatagaaaactaattttgataagtatcttccttgttagtctgcttgcaatttctgctgtaagcgcaaatgaggatgtggataatggacttatcgattcagatgattctatcttgcagtcagctgaagtctctgattctgccattggatcagattctatcttgcagtcagctgaagtctctgattccactatagaatcagactctattgaactggaagataagggtaatgttttaaagtcaagtgataatgcttcttttgaactagatgataaaaataatataggatcagcagattctgaattggaagacgattatttagaacctaaagaaaagaatgttctttcaatggatgagaatgcatggttttataattatattgtgtggtatgatggtgatgatggagattgggtttcccttgattttgtagatgatttaaaaaatcctgaaaacatcaccatacgattaaacagttatgacactccatttgacggtgtggatttggctgttataaatgattatgactattcaatcactaaattaaccactgatgataatgggactgtagtttataatgttccatatgaggttgatgaattatctgtctttgtaggcttttggtatgatggggattttgtggccacttatggaaattgggaaagttacacaatctgcgcagtgaattggggcacttggtatagggacccttctaaacggacttacgacttttatgtctctgtgtctgatatggacacttatgaaagtccaattggcgcacaggtggtttttacaagcgattccaatcaatatgtcggaacaatagatgagaatgaaagagcaatcataccaaaggtcagctatggcacttatgatgtgaaggtcatatatgacggctattgcattcttaatctttcagattctagcgccattgagttctatgacgaccatcatacagaccctgattcacttggtgatgaaaggatagattatatgtatgtagatagtagtggagtagtttatcttgacctttgttatgatggttctctaaaagtgccagacaactccacttatgagccttatggtgatgacaacccatccggtggcggttcaggcaatcaatctggtggaactgttgctaatggcacattcacttcattgcaaagtctgtttaaccgtgctgcagcaaattcaacaatatccttaacaagggattatgtctatgatgatggattcgacatcaaaggaatagtaattaacaaggatctgacaatcaacggtaatgcccacacacttgatgccctaggcaaatccagaatattctatgttaacaatagcactgtcaaatttaacaatatcctatttgccaatggtaatgccactcttggaggtgccatttataatggaagtgccgtaaattgtctttttattaataatactgctcaagatggtggtgccatttattatggaagcgctttagtatgtgattttataaacaattccgcatctaggaatgggggcgctatctatagtggcggtgccgtaaactgtagctttataaataactcagccaatttaggaggcgctgcaatttatgattccttgtttgctgtgaattctacttttgtgggtaatacattggcttctagcaatcctacaggaggaagcgctacaacagatgtaagtgtggtgtcatttaatccaataactacctatatacctagccctccatccatgacaggttcaattggttggggaggtgccgtacttgactttacaaggcctgttatctatacggattataatgaaacattttacttgttgactaacttcactcttcagcaagatggctttaacaattacggcaatgttcaattgactggcagggatttggtcttcaagtcattatatccttactctggaaactattcaatggctcttatcatctctggacaaatctttactcctacatatgtccttggggaaaatgatacttatgaagcccattttaaactgaatggtctttctttagggctacatatggtttatgcatatgttgatttcggatatccggaatattatagctatagaataggtggaggctatatggatagggttgcttacgatagaactgcggagataatattccctattctcattaataagacagtagaaatctcatcttccaatctgaacaagtattacggtggaaccggaaagtatactgtcactcttacagatggcggaaatcctatagccaatgcaaatctcaatgtctctctagctggcaagacatatcctttaaagacaaatgcaaatggtcaggcaagcatggatataaaccttactcctggaacttatgaggcagtctgcacttatgatggagtttctcaaagatcaaatatcattgttcgctcaactataaatcttcaaaacctcactggcatttatcagaacgctaaagtaaatgccacattcttgaatgctgcaggcagtcctttagcaaacactaaagtcagttttagagtaggttccaagacttacagtgcaacaacaaatgcaaatgggcttgctacagccaatgttgatttagctgcaggcacttatgatgtgattgcaataaatccggtaaataatgagcaaaagacaagcaagctcactatttccaaagctaagtcttctataagtttaagctctacaagcaataatgataaggttaccttaacagcaagcttatccccttcaactgcaagtggaaatgtgacatttaatttaaacaataagaactacactgcaaagataagctctggaaaggcaagccaaaccattactggattgaatgaaggaaactacactgcaaatgcatattactctggagacagtaatcttaactcttcaagcgcaagcactaaagttgttgttaaaatagtcattccaactaaaataatctacaaaaatatgaccactggacctgtagcaaaatcagatggcaggataggaaattatttctgtgtaaaacttgtggatggcagcaataatgcattaacaggccttccaatcaagataggcttcaatggaaaaatctatgacagaacaacagactcaaacggcgaagcaagactgcagataaaccttgctaatgcggacatatacacctttgcaatctgctaccttggagacgatgatcatcaagcatcctttgaagtggctaagattgatgtaaacaagaagtatccaaagccaaacagtgcaaatggaaactccaatggtgtgcctgcccaagagacaataagcaatacaaagcttaagacctatatccaatacagcaatatgaccaccaaatcagtccttaaatcagacggaagggtgggagactactttgaagtcaaattgctggacaataacaaaaaggcaatggcaaatgttccaatcaagataggtttcaatggaaaaatctatgacagaacaacagactcaaacggcggtgcaaagctacagataaacctcttaaagccaacaacatacacatttgcaatcgcatacctaggcgatagcaaatatcaggcttcatttgaggtagcaaagatagttgtaaaagcccaaagccctaaactgactgctcctaaaaagacatttaaggcaaatgcaaagaccaagtctgtctcagcaactctaatctccgagagaggaaagcctatggccagtcagagccttaagtttacaataaacggcaagacatacacagccaaaaccaattccaatggtgttgcaacagtcaatatcagcctaaacaagaaaggaacctattcctgcacagtcaagtttgccggagtgactggagcaaatgcaaagaccactaaaacaacaataaaaattagttaa

SEQ ID NO: 1499 - DNA, 1650 bp, Methanobrevibacter ruminantium
  source 1..1650: mol_type = genomic DNA
atggcacaaattaatcaacctatgtatattttacgtgatgacactgaaagatttcaaggaagacaagccttaagaatgaatatttttgcaagtcagcttttagcaagcattgtaagaaccactcttggtccaaaaggaatggacaagatgttggtggataagatgggagatgtagttgtaacaaacgatggtgcaaccatcttgcaggaaatggacattgctcaccctgcagctaaaatgctagttgaaattgcaagaaaacaggaaaatgtagttggagacggaactacaactgttgtaatcattgctggagaattgcttaagaaagcacaggaattaatggaagatggaactccagtacctaccattcttatgggatacagattagctgttgctaaggcaatggaaatcttgtttgacatttcttttgatgcaagggataaggacaccttatttggaattgcaaagactgcaatgaccggtaaaggttctgactatgctaaagatgaacttgcagaattacttgttcaagctgtaaagaaagtcgaagagggagaagaggtagataagaccttaattaaaatccacagaatcaacggaggaagcgtagaggattccaagattgttgacggaatcttcatcgaccaaggaagggcaaacgaaaccatgcctaaggaaatccatgatgcaaagatagctcttatgaaatatcctttagagctaaaggacctcgaaaacgctaaagttgactttaccgacccattacaaatgcaaatatttttagacaatgagcaagagatgcttaaggaaatcgctgataagatcatagactccggatgtaatgtattgttctgtcaaaagggaatcgatgatgtagtgcaacactacttatccaaagaaggcatcatggcctttaagagagtcaagaacactgatgttaaaagaatcatgaaggcaaccggtgcagagcttatcacaaacattgaagacttaactccagatgttttaggaaaagcagattacatccaccaagaaagagtatttgaccaaattctaaccttcattgaaggctgcgatgaacctaaagcaagctccatcttaattagaggaagcacaaggcatatctcttctgaaatagaaagggctatggaagatgcattaggtgtggtagcagctacaatcgaagaaggaaaggttgtaagcggtggaggatctcctgaaattgaaattgcaagacaattaagattatatgctaattcaattggcggaagggagcaattagctatcattgcatttgctgacgctttagagattgttccaagaaccttatctgaaaatgcaggtcttaacacaatcgatttgcttgtagagcttagggcagctcacgaggacaatccttatatgggacttgatgtatttgaaggaaaagtggtggacatgaaggaagctggtgtaattgaacctcaaaaggtcaagaaacaagcaattcaatctgcacaagaagcttgtgaaatgattttaagaattgatgacttggtagcagcagccggagccctccaaaagccagaccctgatgagaacttagataatagtggaatgcctcctgcacctggaatgggtggtatgggcggtatgcctcctatgatgtag

SEQ ID NO: 1500 - DNA, 780 bp, Methanobrevibacter ruminantium
  source 1..780: mol_type = genomic DNA
atgaatttagaaggtgtagaaaaaacaatgctcttgaccttatacacaaaggcaaagcattcacaaaagccaaatcataaattttttgattatatggcaatagatataatctctgaaatcgattatgacttttccatagctgataaggacagatccatgcaaatgggagtaatatcaagaacaatcgtcttggatgatatggtatctgaatatatacgctcacatccaaagtgcacaatagtcaatattgcctctggaatggatactcgattcaacaggttggataatgggataatcaagtggtataatgtggatttggaaaattcagctaatttcagattgaattacattaaggatacagaaagggtaaagaccttagcctattctgccatggatccttcttgggcagaggaaatagaagcaagcggggatgttttatttatcattgagggtttaacaatgtatcttactgaggtcgagaataagcagattctggatatcattgatgaaaacttcaagtcatgcactatatttactgaaatcatgcctcctgtttccgttgagaatgtcaaggagaaatccgttgaggaaatggatgccaagtttatttggggagttcaagatggctttgagctaaggagattaaaccctagattcaattgggtaaaggatgtaaatctttttgatggaatgaatgtctataagcccattaccaaattgttcacttggattccttttataaggcgcagaatggattttatagctgttttagaaaaatag

SEQ ID NO: 1501 - DNA, 438 bp, Methanobrevibacter ruminantium
  source 1..438: mol_type = genomic DNA
atgaacagaaataaaataattgttttgcttgtattattgatagcagttgttggctttacaatggggccagcttgtgcagccagcactacaataaaagtaggcaattacaaggatgttggaaagggagataggatttcaacattcaatgtgcctaaggatgcacagtatttaaaaggagtttatgctgtaatattctatcacggcaagaatggtgacgatttcaggccacatacctatgtattgtctaagataaaggtatattataagaataaaaaaggcaaaatcgtaacaaggtcttctacagctaagaatctcagcggacttagcatactttccactaaacaggtaagtggttacactccttataagatggatgtaagttataggaagatgactaatgctgagaaaaagaaaatttgtggcagtttagtttattag

SEQ ID NO: 1502 - DNA, 975 bp, Methanobrevibacter ruminantium
  source 1..975: mol_type = genomic DNA
atgatgaggaagaatgatagaagttcaatcaatccatttacaggcaaggagcactatgacactgtagacgatgacaagttcttggaaggctgctttcaagggtactatcaggaactgcagcgctcccagttattagacaacactccagaaggccaatttatcgttcaagtggcagttaaactgatcaatacagttaatgaattccttacaaagataggaaggcaggattatgttgagggatattatgaatgggatgttcatttggttgcaaacaatagcgtaaatgcctgctgcatgcctggaggaaagattatcgtatattcaggtatcttttcaattgcaaacactgaagagagaatggcattcatcctggctcacgagatggctcatgcattgcttgaccacggaaggacaagggcaagcgcccaaagcacaaagaacactgctgcttctgttgcatgggtgggaagctttgcattggacatggtaggattaggcggtcttggatctcttgcaagggcagccaccaatattgcaagtgtcgggtcccaatacttccttcttcagccttggggaagggaccatgagtttgaggccgataagcttggaatgattatctgtcaccttgcaggctatgacatccgtgaagttcctaaattctggaaggaatttgcaggagacaaggcaagcaattttgatttcttttcaacacacccttcagatgccaagaggatagaggtaatggaagcctctgaaatagagattctaaacaccactgacttttacagcaagccagtattgcctgagacacctaaggcaactggagaaaggaagaatactaatgccaagccccaagaacctcaagctaaagccgttgctgataacaaatcgactcatttctgtacaaattgcggcagtgaggtagctccagatgataatttctgtacaaattgcggagcaaagataggaaaatag

SEQ ID NO: 1503 - DNA, 201 bp, Methanobrevibacter ruminantium
  source 1..201: mol_type = genomic DNA
atgattgaagagcataatcaaaaatcagttgaagaactggttgaaaacttttcttatgtttatgtttattttgctgatggaagatcaattagaatctctaaggaaaaaaagtttgaatttaaggacaataagttttatatttatgataaggatatagaagttaatatagttgatatagagttaattgagtttactgattga

SEQ ID NO: 1504 - DNA, 858 bp, Methanobrevibacter ruminantium
  source 1..858: mol_type = genomic DNA
atgaaaaaatcagtttttaaaattctaattgctttagctttaattttattggctgtatcaattgtttcatctaatgatctctctgattctaatgtttcaagtgatttaactgttgattcagactctataagctctgatgatacaggatctagcgatacaagttcagatgattcaaatcaggatgatgtatctcaggataagactaatgataaaaaactgtctgattcccagtcagattcatcaaaagatactcaagatactgatgataataatacagataatggttctgataaatgtaatttgattatcacaaaaaagggcaatgagaaagtcaaagttggagatactgtagagtggacaatagaggtaaaaaactctttaaacactgcagaaaacatctctgttgatgagttcctccctcaaaactttgagtttaagtctgctaaggcaagcaaaggaaactatgcagttgagatagcaaattgggacattggaaatttaaaggaaaatgaatctgctaccttagtgattaaggctcaagcattaaaggctggaaatttcaccaatgtggcaaatctcactacagattccgataatatcaatggaaaggtccttagcgctaaggcagatgtggaagtgctttccgagaataaaaagaatgagactcctgtaggacctaagaagaacaaagataataattctacagtcaaaaagattcataaattaattaaaaatcagacaaataatacaaatatgactccaatagattttaagaaatctggaaattcattgtttgctgttataatagctgctttggctgttcttggaatatttttaggacgaagaagaataaattag

SEQ ID NO: 1505 - DNA, 1221 bp, Methanobrevibacter ruminantium
  source 1..1221: mol_type = genomic DNA
atgaaagctgatgcatacaaaatagttgataatgtttactgggtaggtgttttagactgggatattcgtgactaccacggatacaccttggatggaactacctacaactgttaccttgtatttggtgaagataaagtggctttgattgacaatgtctatcctggaaagtctgaacagttctggggaagaatcaaagatgcctttgaaaaagaaggaagggaattcaaaatcgatgtagtcgttcaaaaccacattgaaaacgaccacagcggctctcttggtgaagttgttgccaaattcccagatgttgaagtttactgctctaaaaaagcagaacctggacttaaaaaccacttgccagagcttgaagactttgaattcaacactgtaaaaaccggcgacactcttgacattggaggcaagaccttccaatttgtaaacgctcctatgcttcactggcctgacagcatgtttacaatgttgatggaagatggaatattattctccaatgatgcattcggtcagcacatctgtgtatctgaaagattggacactgatgtggatcctgttatcctaaccgatgctgctagaaaatactatgctaacttgattactctcgcttctccaatggttggaagaaaaatcgatgagcttgctgaattaggcattgtagataatcttaagatgattgctccatgtcacggtcagatctttacaaaccctgaattcatcattgacctttaccaaaaatggtctaccggaagctatgaaggaaataagatcaccttcatctatgataccatgcaccattcaacccaaaggatggctcatgcaatggctgaaggggtcatgagcgaaggggtaaaggtaaagatgtacttcatgcatgatgatgacaagtctgacgcagtgacagatgtccttgactctaaggcaatcttcgttggagcccctaccatgatgaacaatccattcccgggaataggagatgtcatgtactacttgaactgtcttagctttggtaacattgaaaagaaaaaggcagttgtattcggttctaaaggttgggctggaggctctgcaagaatcttagctgctaaccttgaaggcgctggatttgaagtggtcgagcaaatggaaatcgacttcaagcctaatgaagaaatccttgaagaatgttatgaattaggtaagaaagttgctcaattgattaaggaataa

SEQ ID NO: 1506 - DNA, 843 bp, Methanobrevibacter ruminantium
  source 1..843: mol_type = genomic DNA
atgagtttgaaatactttaataatttaacttatgaagagattggagaatataatgacaaaatagtcctatttttacatcctaagctattatcacattggatttggaaaaaacaaatagaagaatatgataaatactttaataattatcactgtatctttattgacctgcctcaccatggagagagcaaatttgatggaaaattttccatagaagagtcctcagatatactcattgaatttataaagcatttattgaacaataaaaaaagtgaatcaataaatattgtagccataggccttggagcttcaatagccattgaaatactcaataaagaaactcacctaattaatcacatcattctatctggccttgaaatcgcccagattagagaaaaagaagaagagacaatcataaagagacttgctaaaacaaaagcagaatatctgaatatgaagcctgatcagtttatcattaaggcttatctaagatactatggaataaggaaagaatattatgatgatttagaaaaaagcctagacattcctattagaaaagaagaggaaatagcatataagtccttaaattatataatccccgatttctctaaagaaaccatagaaaaagacaatatactattggtctatggaaataaggacaatttcaatagcacaaaatctgccataaagcttaagaaattgttcttcaatgccaaattaattgaaattgaaaagggaaatcatctttggaacataattgattatgaactctttaatcaagtcattattaactttatacaaaaggaaattatctttaatgatgaaaggataaaagaaattgattga

SEQ ID NO: 1507 - DNA, 915 bp, Methanobrevibacter ruminantium
  source 1..915: mol_type = genomic DNA
atgaaaataggcgtaattggttatggaaatatgggttccatgatagcaaataacattctcgaattgaatttgctcttggccgatgaggaacttatagtttcaaacagacatattgaaaaaatcgaagaattaattgaaagatatccagatggaaaagttcagattactgacgataacactgaattggccaagtcatgtgaaaagatcattatttccgtaaccacccctaatttcaaggaagtgctcgatgagataaccccttttattaatgaaaagacccatataatctatacctgtgccggacttgactttgaacacatcagctctttttacgacggcaaattaagcttagtcattccaagcttggcatcaactgtaacttcaaacaatgccataagctcaataggaaggagaaaaggaattacccttataaagcataatgagaaggtagacattcaagacagctatttcttagaggatctctttaatgaattcagttatgtgagaacattaaaggaccataatttcttttttgaagaaaatggaaacttagcttcaaacaatccaaaattggaaatatgcaccatccttacaagttgcagccctgcatttatagccttgatgattgataattttgcagaaaggataagcaatatttcagacttaagcaaagatgaggcagaggatatgatcttaaaaaccgtcattggaaccgctatcctaaaggaagataaaaaaatatccaatagcgaaattatagaaaaggtagctaccgaaggcggaataactgcagaaggtattgacctattggataaaagattaaattccatttataagaaactcattaacacccttttaaatagatatgaagaagttagtaaagaaatggacgagctttatttaaaagataattaa

SEQ ID NO: 1508 - DNA, 1941 bp, Methanobrevibacter ruminantium
  source 1..1941: mol_type = genomic DNA
atggctaagagaaattttagtgaaagcttaggcaagatagtcacacttttaaaaaaggattttactgatgtatttaccaaaaatccagttgtgcctattgtattgcttgctattataattttaccttctttatatgctcttataaacatccaagcatgttgggatccatacgataatacaggaaatattgagattgcagttgcaaacttggataatggaaccacttttgaaggagaatcattaaatgttggtaatgagatagaggatgagctgaagggaaatgatgatttctattgggtctttgtaaatgaaacggaactgcgagagggggttaaaaatggaacctattattccggaataatcattccaaagaatttcagtaaaagcattaagtcaatcactactgatgaccctcattctgctgaattggaatatattgtcaatagaaaatccaatcctatggcatctaagttaagcgattccgctgcaaaggcggtctataataagatcaatgctaagattgtacagtttattaatgtggtggcctattcaaagttaggcgagcttcagtctgcattgtctcaaggtgcaggtcagatgtcatctggtgctgtccaattgtcttccggatccgctcaggtcaattctggcgcttctcaagtgaagtcaggctcaaatcaggtgaaatccgctgcaaatcaagttcaatcaggtggtgctgaagttcaatcaggcagtgaggagataaagtcccatgcatctgaggtcaagtcaggggcaaatcaggtctctcaaggctcttcccagatacaaagttcatcccagcagattcaagcaggttcctctcaagtgcaaagttctgctaagcagttggattcctctgttgatgttgacaaattgccgagtgatgacttgaagcatgttgtaaacagttccaagcaattggctaatgcaagttccaatctggcgggatcttcaagtcaactggcaaacggttctgtccagcttgcaaatggctctgtccagcttgctgacggttctgtacaattggctgatggttctgttcgattggctgatggttctgtaaggttagcaaacggttctgtacaattggcagatggctctgtccagttagctgaaggttccttaagccttgctgcaggctctcaattgcttgcaaattcagcagcttatgcattgtttgcagcttccagctcactttcaggtgctgcaagttctctttcaagcataactggcgttgacgagaatcaaatcggaagttatatctattctccagttactttaaatgagatagaattaaatcctgtagacaattatggttctgaagttgctccattctatttggttttatcaatgtgggttggagcattgattacctgtgtaatgcttagaacaggacaatccaccggaaccgaatacagcccttcagagatgtactttggtaaactgctcatatttatggtaatggctgttttggaaactacagtaactctcattggagcatcaattttaggaattgaaatgtcgaatccggtcttgtttgtattatcggcctatttcattgcccttgtgtttatgctgatttgttactcattgacttctgctttaggtcagcttggaaaaggaatagctgtcatttggcttgtgttccagatttcaggaactggaggtatctatcctattcaattgatgggtcctattcttcaggcagtaagtccatatatgccaatgactcatggtataacccttcttagagaagctgctttgggacttgtatggtctaattatatccattcattccttatcttgatagctatgggtttaatcacattgattttagctttaattattaaggtatttgcagataagagagctcattggtttgaagagaaattgaatgaaactgatttattccattaa

SEQ ID NO: 1509 - DNA, 339 bp, Methanobrevibacter ruminantium
  source 1..339: mol_type = genomic DNA
atgaatcctaaacaacttaaaaagatggaaagacaaatgaaaaagatgggtatggacatgaaaagcatcgatgatgttgaagaggtcattatccgttgcgctgataaggaaatcatcattactaatgctgatgtaagtgctatgaatgtaatgggacaagaaacttatcaagttacaggaactgctgtagaggttgaaagagaagttgagcttgtcattccagatgaggatattgaaatggttgcaagcactgctggtgtaagtgttgaagctgctgaagaggctttaagagaatgcggtggagacctagcagaagcaatcatgaaattaagtaattaa

SEQ ID NO: 1510 - DNA, 2001 bp, Methanobrevibacter ruminantium
  source 1..2001: mol_type = genomic DNA
atgtttgaaattaaagcaaaagatatgagaggacgtgtaggtgttttaaaaactaatcatggagagattaagactccaaacctaatgcccgttattcatccaagaaaacagacagttgatgtaaaggaatatggggcagacattgtaattacaaatgcttatttaatttataaggatgaagagttaagtaaaaaggctttggatgtgggcttgcatgagctaatcaactttgatggtcctatcatgacagattcaggctcattccaattatctgtctatggtgatgtagacattacaaacaaggaggtcattgagttccaggaagctatcggaactgatatcggaacttcactagatattccaactggaccatatgtggatagagaaaaggctgaagaagacctcgaaatcaccattgaacgtgcaaaagaggcaataagttatgtaaaggacaatgattacgagatgaagataaattctgttgttcaaggttccacttatccagatttgagagaatactgtgcaactgagcttacaaagcttgatgcagacttatatcctatcggcgcagttgtgcctcttatggagatgtatcactaccgagatcttgtggatgcagtgatgcattcagtcaaatgcttgccagactcaaaggcacgccacttgatgggggctggacatcctatgatatttgcactttgcgttgcaatgggatgcgacttgtttgattcagcagcttatattctatatgctgaagcagaccgtctattgactacccgaggaactgtaaagcttgaaaatcttaatgaaatgccatgttcctgtgaggtatgctgtaagtacactcctgatgacttaagggctatggataaggaggaaagggtgcagcttatagcacagcacaatctccatgtcagctttgcagagcttaggctcattcgccaagccatttatgaaggaagtcttatggaacttgtagaggagcgctgcagggctcatccaatgttgcttgatggtcttaggcatcttggagagtatagctttgacttggaaaaatacgacccaagaagcaagaagtctgcatttttctatacaggtcctgaatccttgaaaagagctgaagtgacaaggcatttaaacaaattaaatgaaatggataagaggaaaaatcttgttgtcctgccaacttatacaaagccatacacaaaacatttaacaaacagcttcaatgagttatttgtttatgcaaaggatgaatcattatctgaagatgcagagtgtaaaatagagaatggtgaaactgactttatggttttagacactccattctgtctcattccacttgaattggatgaagtttatccgttaagccaatcagatgcgcctagaatacgtgataagatggctattgaatttgcaagggactttttaatagactttgctgaagactatgacaatgtcctcatacatcctaatgttttagaggagcttgagcttgactatatagaagaatacaattatccggaggaaatcaagttcgaaaaagatgatattaagaagttaaaggcaattgcagattaccagtttggaaatggagcaggagatgcattattcactggaaaaatcaagatagaaaaaagcaaaaagactggtaagattagacatgtctatgataagaatcagattattgtaaatatgagagcctctgacagctttttgattctatctaaattaggtgcaaaaaggcttgctgcaattgaaggtatgagaaataaggtcatgattgacaatagcgtagaatcatttgcaagggatggaaaaagcgtatttgccaagtttataaaagactgtgatgaaaacatcagatcaaatgatgaagttcttattgtaaatgagcaaggtgagctattggcattcggcaaggctcttttgaattatagtgaaatgctggactttaatacaggtcaagcaataaagactagaaaaggatttaaggattaa

SEQ ID NO: 1511 - DNA, 1854 bp, Methanobrevibacter ruminantium
  source 1..1854: mol_type = genomic DNA
ttgaaaattaattcatttagagttttattatttattataataatcagtttatctttcattggtttttctactatttctgctgtggatttgtctgattcttgttgtgatactcttatttcagatggttctgatggtattattttaggtggatctgatgatattagtcttagcgatgaaaataataatttaaattttgatttaaatgataatccggattttaatttagattatgatagtaattcttatcctaatttaaatttatcttctaattcaaattccaagtccagttccaatacatatggtaatgattttactttatccagattcaaatccgttttaacttcttcatataacttgaatggaggcagctttgaagatattcaatctgccattaaccatgctgctgatggggatgatataatcctcaatggcacttttacaactactggctcagttattgtaataaataagacattaactatcattggaagtccaaatgctgttttggatgctaaaaacatatcaaagatttttcttgttgaagcagatggggtgaaccttaagaatctaactttcatcaatgggaaatcaaggaacgaaagtgataatgggccttatcaaggaacagttaactggcaggggagcaacggaactatcgttaattgcagttttattaacaatagcggtgatgagaaaagttatggcgcctctattctttggaaaggatcctatgggaaaataagcgattccatttttaaaaacagttattctggagctaatgggggagcaatatttgctttaggagaaaatttaaccatcaataattcagagttcatcaataaccatggaaaggaaggtggagcaatctatttcggaggttcttcagctatgtggattataaattccattttcattaacaactctgcagattctggtggcgcccttgcagcttgcgctatgaataggcaagtgattaactctaaattcattggcaactctgcaaataatggagggtccatttcatggtgcggttctaatggattgattagcaattccactttcattaataattcagctgatcaaaaaggaggatcaattttatttacagggactaataatttagtcaagggctctgtttttattaattcttcagcgaacattggaggggccattaattctctcaatagattgaattatattaatgacttaagatttgaaaacaataatgcaagccttggagaggattgctatggagatttggaatttaagagattttcaacatctattgcttccgaggatatggttacatctgccattgatgctaatctcgatggcagaaatggcgaatactttaatgtaagcttaaaggatgagtatggcaatccgttgataaataaggatattaaaataggattcaatggcagaatatataataggacaacagattccaatggccaggcaagcttgcaaatcaatttaaagtattctatggtttatacctttgcaatttgcttcttaggtaatgatgacttttatggaagttttacagtttcaaaaatcactgttaagactcaaaagcctaatttggaagtaaataactttaaatataaatcttcaactaagtctaaagtaattaaagcaacattgaaatcatcaagaaacaatccaattcaaggaaaaacaattagttttactgtgaataataaggtttatacagcaaaaaccgattcaaaaggtattgccagtgttaatgtgagcctgtcttctaaaaagacttatgctttcactgtaaagtatgctggtgatgacacttattcttcagtttctaaatctgctaatattttagtttattag

SEQ ID NO: 1512 - DNA, 1224 bp, Methanobrevibacter ruminantium
  source 1..1224: mol_type = genomic DNA
atgacttatatcgaagaagctacagtgattgatgatacaatatatgacttaataaatgaagctttcgaaaatgaaagaaaatacaatgaccctgtgtatagaaactccatatttaaaggtcataaggaatactttgtaaagacagatgatgggtcatacagcatcaaatcaaaagaaatcaataacaaggtggaaacactccacacctctactggagccataagcgaatcatttgaaaagttcataaagccattgaaactggattacagccaggacattgctatcttagacatttgtgcagggctaggatacaatacttctgcagcaattgacgattttatgaaaaattcaaccgaagatgcaaacctccagatagaccttctggaaatatccaagccaacccttgcagcaggattgatggttccatctcctataaaggcacatgacattacaaaaaaggcaatagaggatgcccttatagcggaagattatgcatcactctccttagaggaagaaagcataccagataatataaatttaaatatattcattgacgatgcaaggaaagtcatacaaaaactggaggacaatgtctatgatgccatatttttggatccttttagtcaaaatatggcgcccgagttagtatccgtggacttttttagggaatttagaagggttattaaagataatggaatagtctgtacatatacttcatcagcgcctgtaaggatggcatttattgaagcagatttttatgtatcattaggcccaatcttcggacggtttcaaggaggaacattggcatcaccctctccaaaaaatttgaccaagtcccttccaaagaatgatgagataaagatggcattatctgatgtggggattccattcagggatccaaatctaaacctatcatcaaaggaaatattagacaacagaactgaggagcgccataatgcgcggcataacactaaaatatcttcagcggtaaagacacctatattcctagcacaggagatggatgatgagccattgaagagaagagttgagcgaaaccttagaaaaatgaacattcccggagtattatcagaggaagctttttatcttgtggggcctgaggaaaactatagtgaggattatgcagaagataacaattcaagaactcgtgttattgaaatggctaaacgattggatgagattaaaaacaataaagtaattttttaa

SEQ ID NO: 1513 - DNA, 474 bp, Methanobrevibacter ruminantium
  source 1..474: mol_type = genomic DNA
atggacgtaaaaatcaaagagaaattggataatcttttcaattatatttctaatgcattaagttcaatttactcaagaaaagatgaaaaggattatcatgattttatttcttccataaatggcagattgatttgtatggctgatattctagacgaatctgaagaatttgaaagagaatattacacatttcttaaaatcaaaaagatgatttattatgtcttagagaatattgaatctataaaccgtgaagattgtttaagagtatttgactccttctctaaatttaatcttttaatcttgttaaaattcaattatttggatggtggaatatctcaagaagagtatcaaacaaaatttgatgatttcacattgtatttgagggaatttagggaatatttctatttgaatgtctatgaaaaagatggaagattcgatgctttgataaatgaagtatcatatatttttgtaaattag

SEQ ID NO: 1514 - DNA, 378 bp, Methanobrevibacter ruminantium
  source 1..378: mol_type = genomic DNA
atggataaaaaaataaatttgattaattttttttgggaagaaatactttttggactttttaaagaaaaatcggaattcctttcctgttttgtcaaatgctcaaatgaagttccttcgaaattcgaaataaataaagattatttgttaaataaactacaactttataattgcggtttaaataattttagaaaatattgtgatttatggcattctttagaaaatttaggcattcatgaggaggatcgtaaaattattttagatgctcatgattttgcaaaagatcagtttacaatatttgtgactgttgatgaagaattttataatgctgtcaaatctttttccaaattaaatattgacaaatataaattattgaattaa

SEQ ID NO: 1515 - DNA, 291 bp, Methanobrevibacter ruminantium
  source 1..291: mol_type = genomic DNA
atggattttattgatacaaatattgcgattgcatatacatttttcccagataagtattttaaaacagttgacgattttattgtaaattccactgaattctactgctcaaacaatgtttgtgaggaatataagcgaaaatataaatctattttcacatcatttgaatatttttttgatgaaattattctagctttagaaaataataatcgcatatttcttaataaatgttcttttgaacaatttgtattgtcacaaacaagtgatataatctggatatggataaaaaaataa

SEQ ID NO: 1516 - DNA, 522 bp, Methanobrevibacter ruminantium
  source 1..522: mol_type = genomic DNA
atgtacaatatcaatgaaaaaatcactttaccaaggattgaaatcaaaatggacgtaaaaatcaaagagatattgaagaattttcttaataatatttcaaacacattaacatcattaaataacaaaaatgatgaagagaaatctttagagttaatttcttcaatgaaagaatatttgttggattttgctatgtttttaaaagaattaaaagaatttcaaaaagaattttctttttttctagtaattagaagaatgttaaattatgttttagacaattatggttctctatgctcttctaaaagatctgtcatatttgattcattatttaaattttttgaattattaagaatcaaacttagctttttagaaggtatttattccaaatcatcatatttaagttattttaataaatttgatacatatttggatgaagtaaaaacggaatattatttaaatatatatcaaagaactggcgaatttgatgatgttatacctagaatatctcaaattatacttgattag

SEQ ID NO: 1517 - DNA, 2034 bp, Methanobrevibacter ruminantium
  source 1..2034: mol_type = genomic DNA
atgggtctatttgataacattaaaaagattcgaaataaggaaagtgcaaacagctcatctgccatattggcttccacatacaataagataaaccgcagatttggggttggaacagatgcaagcagctacattgccaaaaacatgcacaagttctatataacaagctccaagttttcaaaaggggtccaaatcaagaaccttctaagaaagctagacatcacaatccatcctgaaggattcatatacttcctagacgaatttagaaatcttgactatcatggccaaataataaacagtcctatcgactactcacttattctagactattccatctatgacctcaacgaattttacttcaaccctaaggaaggtccaggcttcagaaaccagtcctccgactacaatagggaaatgctcgctatccttgatggaattgagcttctcatatatgaaataaacaaggcattggcaaagtcctcccgtgatgacaagtcaaagtacatccgcatctttgaggacataatcgacaagaaggctagccattttgaagaggcccttcaaagaatacttttccttaatcaactcctatatcagacaggccacagcctaaacagcctaggccgtcttgaccgtatccttgaagactattactacaacgacctgaatgatggatacataactaacaaggaggcattggaactgattaaggatttcctaaaggccctcgattcatactcctggtataagaccgatgacgagtcaggactggcaagccagctaatcacccttggaggaaagtacatcgatgagttcggcgaatactatttctacaatgacctcacctatatcttccttgaggcaatcggccaggtcaatccaaaggatgttaagatagcactcagactaagctataagactccagacgaccttatccaccttgcattagattgccttaacgaaaacacaatatacattgaagagggtgtcgctgtaagttttatcattgacaatcggatatttacagctgacggagccaccattgaggccaatatagattcaaacatagtcttctcaaatgatgaggcaatcatcccaaggcttctcgacttcggatactcaagcgatgacgcatataattatattctatcagcccatcttgaacctacattcatatcctgccttgatgaaggcaacctatcatctatctctcttttaaagccattgaatgacatatttgaagacaagaatgagttaagattcataataaacttagactaccttatggagctttataagaacaatctaaaaaaggaaatcgaagaaaaaataagcgccctagatcaaatacaatggaaccaagaccctttcttatcattattctcagctgaatcatatgaaaaccaactggacatatcccaaggaggctccagaaacaatcattttggaattagattctatgggctccaaaacactgtaaacagcttatataaccttaagaaaatagtctttgaggacaagaccatagaccttatagaattggataagatgagaaaaaacaacttcaaaaggggcaaataccaagaaacattcctcctccttaagaacaatccagtaagattcccacaaaacaaccctgagatagcaaacatctccaacgaaataatagcattcataggcgactcaataaaagactacaaaaacagcctcgacggaaagctcaagtttggattaagcgccccaaggtacatgataaagaatgataagagagcatcttttgacgccacattaaaggacatcccgccagcaagacttttaatatcaagccaaaagacaaactcagatatattcatcttcaattcaagcttagactacaaaagctcagcaataaacggaaaccttatagagctaaatataaacacaaacgacaaacaactaaccaatatccttgtagaagcaatcggatacggtttcgaccagctccaaataaacttaatcagagaagagataatcaccaaagaggatactgaagaatag

SEQ ID NO: 1518 - DNA, 636 bp, Methanobrevibacter ruminantium
  source 1..636: mol_type = genomic DNA
ttgaattctgataagaagattacaaaggaatcctcaattttagatattggatgtggaaatgggaattttttatctcaattaaaaagaggaggatataaaaatctcacaggaatagacttatttattgaagaagagaatattttagaggggattaatttaattcaaacttccttagaagattataaaccttcagaaaaatttgatttaattgtttcgaatcatgcttttgaacatatggataatcaattagctaatctaaaatgttttgaaaatcttattaaagatgatgggttaattttattaagaattccgattaaatctgagccaatttggaaaagatatggagtaaattggtttcaaattgatgcacctagacactttttcttacatactctaaaaagttttgaaatattatgtgataaaaccgaccttaaaattttagatgtgatttttgatagtggatatgcccaatttgttttcagtgaaaattatcaaaacgatattgcttggggagaagatggatggactgattttaggtctaataaaaaattaatcaaaaaatataaaaaagagaccaattttttaaattcccaaggacaaggggatcaatgcatgtttgttcttaaaaaaatttaa

SEQ ID NO: 1519 - DNA, 327 bp, Methanobrevibacter ruminantium
  source 1..327: mol_type = genomic DNA
atgagaatattaaacggtgaaaatatgaaatgtccaatatgtgaaaatgaggagaataatttaactttcataattaaagaaatgcaaataggccttagagaagaatttgagtatattgaatgttcaaattgtggttgtctttttattaaggagatccctaaagatattgacaaatattatgatacagattatgcccctcatttaaaacctaaaagttttaatgaaataatttttgataaaggttctgcaataattttatctaattcaatcctatctaatttaatcccaaaagaatttgtcccccccccatttaaaattaataaataa

SEQ ID NO: 1520 - DNA, 201 bp, Methanobrevibacter ruminantium
  source 1..201: mol_type = genomic DNA
ttgaccgtttccttcctatttgtcaatggagcagcatctgttttgctgaatgcaattgataaggaaaaggcagtaacaaaaatctatattatggcagttatatttaacgtatgtcttaatttggttcttattccaatgtttagttatgatggagaggcaatatccactgtattaagtgtgaaatatttattatcattttaa

SEQ ID NO: 1521 - DNA, 114 bp, Methanobrevibacter ruminantium
  source 1..114: mol_type = genomic DNA
atgattattattccacttagcataggtattttcttctatgcaaggcttatcattgactttatttacagcaaccaatactctcttgcatcaactcttattcaaataattgtttga

SEQ ID NO: 1522 - DNA, 1428 bp, Methanobrevibacter ruminantium
  source 1..1428: mol_type = genomic DNA
atgaatcaaattaaatccatttttaaaaatactggttggttatctgtttcacaagtgataacaagcatttgtgcattcctatggaccataatcatagcccgatacctgggagtatctgattatggcattgtctcatttgcagtttctttcactggccttatgggaatagtgatggatttgggaataagcacatacatcactcgtgaaattgcgaaacataaagatttagtaaggaaatattttaacaatatctttttatttaagcttatattagccattatcttatttattttaagtggattgattttgtatgtcatgggatactctcatttaactataatagttactttggtttttacaatagaacttatcttcatgtctatgactacttttttaaatggagttttccaggcctttgaaaaagtaaaatatcaagccataggagctatattaaatagcagttttttattaataggcattctaataacattagggtttgatttgggcgttatatccattgcctttgcctacactgttgcatattcaatatatttttcatatatgtttttatcatatgttaaaacattcagccgacctcatttagaattggatacaaatttcataagggaagtaataatcaaatccattccttttggacttacaaacttcttctattctatttatttttcaattgacattgtaatgttgtcctatttggctggagattatgcaacaggactttataagtctgcatacaacataataaatgttttcacaacattttttgtagtttaccaaagcgtaatattccctgttatgagcaaattcttcaaagaaagccaaaatctaatcaaagttagctatgagctttctgtaaaatatttgttgttaattattattcctatcagcataggcattttcttctatgcaagaccagtggtggatcttatttacagcaaccaatactcacttgcctcaactccagtccaaatacttatctggacagtttcattcctatttgtcaatggagcagcggcagttttactaaatgcaatcgataaggagaaaactgtaacaaaaatctatattatagcagcaatatttaatgtgtgccttaatttaatacttattccaaggtttagctatgatggtgcagcaatagctacagtacttagtgaaatattgattactattattacactttatcatatattcaaaacagactacaaaccagatttaggactattgaagaatgttataaaactaatcgtttgtggaataatcctttttgtagcattatattacttaaatctctccctatggtttgcaatacctgtaggatttatagtttatctaatatccctatttataacaaaatctattgatgataatgatagatatgtaattagagaattaataaacagataa

SEQ ID NO: 1523 - DNA, 777 bp, Methanobrevibacter ruminantium
  source 1..777: mol_type = genomic DNA
atgctaatgtctataatctgtgtttataatgatgaagaggttttagaaaaatatttgttagaatcattaaaaacacaaaatgaagaatatgaattaatattaattgataatagaaatcatgaatttaattccgcagcttcagccctaaattatggtggaaaaaaagcaaaaggagaaatattgctttttgttcatcaagatgtggaattttatgaaaataacttaaaagatataaaatattactttgaaaattgtcaaaatctaggaattgctggagttcaaggagtttctgaggaaaactatgggagaattactacaaatatcgtctctgggattccaaaatcaacagtgtcagattatagtattacagatataaccgaaacccaaacccttgacgaactattgcttataattcccaaagaggtattcggaaaatatcaatttgatgaagaaacctgttatgattggcacttatatggagcagattattgtttaaacattaaacaaaaaggatattctgtagttttattcccaataacattatatcatgtatctgaaggaggttcaatgtctttagaatactttaaaacattgaaaaaagttttaaataaatataaatatgattataatcgcatatacacaaattgtttattaagtcatgaaccgaataatcagttaaagttggatatcctttactattctgaaattttacatataaggaatcccataactaattttttatcaaattttaactttctaaaaaaaatcttaaaataa

SEQ ID NO: 1524 - DNA, 1002 bp, Methanobrevibacter ruminantium
  source 1..1002: mol_type = genomic DNA
atgcaaactgttggaatgattctttgtggcggttttggaaaaagacttaggccagttactgaaaaagtgccaaagccgttagtggaaattaaagaagattatgcaatacttgataaacaattatttgattttaaaaatgctggaataaacgaggtttatctattagcaggatttttacacgaaaaaatccaagaacgctatggtgacgaatataaaggcataaaaatcaattatgtcattgaagacgaacctttaggaacacttaatgcaatcagattaggtatggaagcacttggagaagataaacaagttgttattagaaatggagatatagttgcagacattaaccttaaaaagatgatagaatatggcgaaagatcagattactttgttacaatgtttgtcaccaaaatgacttctccatatggaattgtagacataagtggagataaaatcactgcttttaaagaaaaaccactattggattactatataaacggaggaatttacttcaccaaagggttattggacttcggagaatttaaaacaggtgatatagaaaaaacattattcccagtgcttgctaaagaaaacaaacttggatactacagggaagatgatctcttttggatggcaatcgacacatcaaaagaattggaatctgttcaaaaggagtatgaaaacaaaacagacaagccttggggatatgagaaggtcctcatttatactgacaagtaccttacaaaagagctttacttaaaagaaggatttcagacttctttccactatcacaatgataaggatgaaaccatgtacataatgtccggtgcaggatacatcgagtttgaagacaggaaagaatactttggaaaaaacgattccattcgtattaaacctggtgttgtccattctattattgcaactgaaaatacaacattacatgaggtttctacaccatttttagatgatacaatcagagtaaaagattattatactcgttaa

SEQ ID NO: 1525 - DNA, 1008 bp, Methanobrevibacter ruminantium
  source 1..1008: mol_type = genomic DNA
atgagtgaaaagaaaaaaattaaagtaaaatttgttgattttcaagatagtctaaaagagaatgataatttctttatagacagtctaaaaaagaattttgatgttgaggtttcagatgacccggattatctcttttttggcgcttatggttacaaacacttagattatgactgtataagaatcatgtggactattgaaaattatgttcctgacttcaatatctgtgattatgcattagcttatgatatcattgaatttggggacagatatcttcgttttccatttttcttaaatcgtcctgaaattgaaaacgttagaaaaacaatagaaagaaaaccaattgacacaagcgttaaaactgatttttgcagttttgtagtttccaatgaatggggagacgattatagaatccgtctgttccatgaattaagcaaatacaagaaagtggactctggaggaaggtctctcaataatattggtggacctatcggcatgggccttgataagaagtttgaatttgatgtaactcataaattttcatttgctcttgaaaatgctcaaaacaggggctatactactgaaaaaatatttgatgcttttgctgcaggctgcattccaatctattggggagatcctaatattgaagaggaattcaaccctaaatcctttataaattgtaatgatttgactgtagaggaagccgtggaaaaaattaaagaagtcgaccaaaacgatgaactttatcatgccatgctaaatgaacctacttttttaggtgatttggacaaatatcttcaggattttgatgacttcttgtttaatatctgcaatcagcctttagagaaagcctaccgtagggataggataatgaaaggaaaaactcaagagcatcagtacaaattgattaacagattttattataaaccttattttttcttaattaaggtagcacagaaattacacattgaatttatcggaagaaagatttatcacttcattagagactaa

SEQ ID NO: 1526 - DNA, 801 bp, Methanobrevibacter ruminantium
  source 1..801: mol_type = genomic DNA
atgtcaagtcaaaatatccagatttatgttgtatcccatagtgaagaggatatcaaaaatattgattctaacgacatttacactcctctttttgttggacgtgcaggcaaggacaatttaggctttgtaagtgacgatactggagataacatatccaataaaaactcttcctactgtgaactaacaggactttactggatgtggaaaaacagccctgcagacataattggtcttgtccattatagaagatactttgcaaactggagacttggaaaaaggttagaacgagaagatattgaaaaaatattctctgaatatgatattattcttcctaaaaagacaactgctcttttaggctcagtatatgaagactacgaccattggaactatgctaaagacttggacctctgtgaagaggttataggcgaacaatgtcctgaatatcttgatagttataaacgagttgtggaaggaaaagatctctactattacaacatgttcatagcccctaaggaagtcattgctccttattgtgactgggtatttcctattcttgcagaggtagaaaaaagagtggacatgactggatatgatgattatcaaaaaagaatctatggattcttaacagaacgtctctttgatgtttggatggacaaacaaaacttgagagtaaaggaatgtgaactaaaagtcaatggacttaggcttaatgtccatatgtggattgtaaaaagaaagattgtaagatgggcttatgtccatatttatatgggcttgcttcataaggatatgagacgttaa

SEQ ID NO: 1527 - DNA, 1098 bp, Methanobrevibacter ruminantium
  source 1..1098: mol_type = genomic DNA
atgaaatacgattatctaatagtagggtccggccttttcggatccgtatttgcttatgaaatgaacaggagaggcaagagttgccttgtaatagaaaagagaagccatattggaggcaatgtttacacagaggaaaagcacaatataaatgtccataagtatggtgcgcatatattccacaccaacaataaagaggtatggaattatatcaatcaatttgcggagtttaaccgctacacaaactcacctgttgccaactacaagggcgaattatacaaccttcctttcaatatgaacaccttctaccagatgtggggagtgaaaactccagaggaggccaaggcaaagattaagcagcaaaaagctgaggcaaatattgatgagcctcaaaaccttgaggagcaggcaatctcccttattggccgagacatatacgaaaaattagttaagggatataccgaaaagcagtggggaagggattgcacagatcttccatccttcattatcaaaaggcttccggtaaggttcacctttgacaacaactatttcaacgacctctatcaaggaattccaatggggggatatactaaaataattgaaaagatgcttgatggaattgacgttgagctaaacactgattttcttgaggataaggataaatggatggctatggcagatagggtcttatttacagggatgatcgatgagtattatgactactgctttggagagcttgaatacagaggccttgactttgagtttgagaccttggatatggaaaactatcagggaaacgctgtaattaattatacagatagagaaaccccttatacaaggataattgagcataagcactttgagaatgcagtctctgataagaccgtgattactagggagtatccaaaggcttgggaaaagggccaagaggcatactatcctatgaatgatgagagaaacactgagctatttaataggtataatgacttggcagataaagaaggcaatgtaatctttggcggaaggcttgggatgtataggtactttgacatgtggcaggtcattgatgaggcattgaagttagttaaatctttagaatag

SEQ ID NO: 1528 - DNA, 183 bp, Methanobrevibacter ruminantium
  source 1..183: mol_type = genomic DNA
atggagattcaatatttattaaatcaagccctggaaaatgaaaacataagagaaatagagattgttgtaaaaatattaaaagagtttgaaaaaatcacccaaattaaatttgaattattgcataaagagttaatggaaaagccaaaaaagggcttaaagcaaagcaaattttcgataatatga

SEQ ID NO: 1529 - DNA, 156 bp, Methanobrevibacter ruminantium
  source 1..156: mol_type = genomic DNA
atgaatcaaaactcaaaaaaagaatttgaaaaaagatatgaggagttctctaatttcttttttaaatgcgaaatagaatatcatacattaaaaggcaaaacaaaacatttgatggcgaaaaaatatttaagtctttttgatatggaatatctgtaa

SEQ ID NO: 1530 - DNA, 582 bp, Methanobrevibacter ruminantium
  source 1..582: mol_type = genomic DNA
atgtatatgaatacaccaagccagaaaaacattgatattaaaaactatgaaagaattttcaaagaaaagattaattttgtagttgaaaaaatctcaaggttttttaaaggaacttcacaagaagattcttttttaaacgaaaaactactcgatttatctgatccctttattaaatcccgaataaaagaaattaaagaaacaactgaatctattgcagaatatttaaaaatagaatacatcaactatgatgaatattatgattttagagaaattcaaagcatgatgaaccaaactcttgattatggaagtatcgaagagttaaaaatcatattaaagatttttaatgaattcaaaaatttaacagaatttaaatttgaactattaagcaataaatcccactctaagagcattagctttaaagatattgatgaagaatcaaaagaaatctttgaaaaaagatacggagaatttagtaagttctttttcaatcgtaaacgagagtattatgcaatttttgaaggagaatgtgaagaggacgtaagtgaattctttgaattgatgaaaaagcatgcattaaagtag

SEQ ID NO: 1531 - DNA, 684 bp, Methanobrevibacter ruminantium
  source 1..684: mol_type = genomic DNA
atgaaattattcatagatagcaatgtaattattggttactgcatagaaatagattattggcattattatgctgaaaacctaatgaaaaatgaaaatatatactggtcaactacagtaaaaggagaatctgaatataaacttgaaaaattaattaaaacttattcaaacttttttaatcaaattaaagaagatttagacaaagagattattagtaaaactgaattcattaaattagtgaaatctatagaatatattaataacaaaaaagtacctttcgaacaagaaaatttagcaaatttagtttggacaaaaggtggatggttagatgatgtaaactctatagaacttaatgaaaatctaaatttaatttcacaaggactaaagaaaaagatgtatagaaattataactactgtgatgaaatgttaaatttatacgaaagacaattcaaagcagaatatattcagttagtcaaaagattagaagagcttaaaagaggaaacagagaaatacattctccagatagtgaaatacttgtagattgtcatgatttgtcactttcacaaaatctagatatgggctttattacttctgatggagatatagtctattttaaaaaggaaattaaaaaaatgaccaatataaaagacattatttatttaaaaaatgttcataggtacacttaa

SEQ ID NO: 1532 - DNA, 828 bp, Methanobrevibacter ruminantium
  source 1..828: mol_type = genomic DNA
atgaccataagtcccaagagaatattatatttagatgaagttcgctcacttgcaatcatgctcgtagtcattgggcatttggcaaggctgttttcatataactacaatagttggctgttctgcagcggagtattttccctaactcgtataggcgttcctctcttttttacagtaagcggatctcttcttttaactagaaaatatgaggtaaaaaagtttttagaaaagcgattcaaacgtgtatgtctgcctttcttctcttggataataatatatatagttgccggagtgctgatttggcattatgaccttacattcgaatatgtggtaaacactgcatttggtgttggagactattctgcactgttctggtttatttggtcacttattggagtttatctattaataccagtcatcagcagctttatacgtgaagagggaaattggggagcagaatatctgattttaattacaataatactgtccctattatacacattcggattctttgactatcctcaaatgaaatataactttagagtcatctttaacttcttcccagttctcggatacttcattatggggtcttacattcacaataagaagtttaagtattcagataagaagatgtttgctatcggatgcgtcttgtttatagtcggaatctgcggacactttgcaaaaatctatcttaagggtcttggaggactttcccttgcaccgatagacttctttgacatatgtgtaataatggaaacaatagggctattcattgcatttaagtatgcaagcaccaaatgggataaaaggaaagatgcaagaaattga

SEQ ID NO: 1533 - DNA, 258 bp, Methanobrevibacter ruminantium
  source 1..258: mol_type = genomic DNA
atgcaagaaattgaatttagggaaaccaaattaggtgaagtgattgttctatttgcatcatgcagctttggaatctatttctcacattatattcttatgagatatattatgtataatggatttttagctccaataagaaaaacacatgcactgttttggcttcctgtaagctcaataatcataataggattaagttggcttttaatatacgtaatgagcaagattccatatgtaagaatagctagtggggttaaatag

SEQ ID NO: 1534 - DNA, 1785 bp, Methanobrevibacter ruminantium
  source 1..1785: mol_type = genomic DNA
atgtgtgggattgtaggatgtgtactaaaagaaggcaaagtagcccctatcttatttgactctatatctaaacttgaataccgtggatatgattctatcggcatagcttgtgcagatgaagacaaaataaatcttaaaaaggattcaggaaaaattgcagaagtcgatgcaaagcttgacttatgtgatttggaaggcaaatatggaattgcccatgtaaggtgggcaactcacggagatccaagtaaaatcaattcacaccctcatctcaatggcgacggcaccattgcagttgttcacaatggaatcattgaaaattatctctcaatcaaggaagagcttgaaggggaaggttaccagtttgtctctgataccgacactgaagtgattcctcatcttattgacaaatatatgaaaacaggccttgatttgacccaatcagttcgcaaggtaatcggtgtcattgaaggggcatatgcacttgcagcaatatcctccgctgagcctaaccgcatagttgcaacaagaaaggacagtccccttatcgttggaataggagatagcgagttctttgttgcatccgactatcctgctatcttaaagtatacaaacaacatcgcattccttgaaaagggagaaattgtcattttagatgaggatggagtgaagttccttgatgaaaatgaccaagagatgactaaggagattgaagtcattgaatggtcccctgaaatggctgaaaagggtggttatgatcacttcatgattaaggaaatcaatgaacagtccacagccattaaaaacaccttgaatgaaaaggataaggtaaaggaaatcgttgatgaggtcaagggaacaatcaatagggttgtctttgtggcatgcggaacctcctatcatgcgtccctcactggaaaatatcttatcgagtcattggtgggaataccaactgaggtattgctggcttctgaattcaagtactctgcaaaggccttaaatgacaagacccttgtaatattcatatcacagtctggagagactgcagacaccttaaaggcacttgatgttgccaatgaaacttcaaagaccttggcaattgttaatgtgaggggatcatctgcaacaagaagggcagactatgttattcaaactcaagcaggtcctgaaattggtgttgcagctactaaaacctatgtaagtcaattggtggctatctacttattctcagcacttcttggtgaggatcatgagcttcttaagagattggaaaaggttccggattacattgaagaggtcctccaaaagcgagatgagattaaggaaatctctaaaaagtataagagggacaaggatgccttctttattggaagaggattctcctatcctattgcattggaaggagcacttaaattaaaggaaatctcatacatacatgctgaaggatatgctgcaggagagctaaagcatggtcctattgcccttattgacagaaacattccagtagttgtggttatacctccgggccaagaccataagaagatcatgagcaatctccaagaggtcaaggcaagaggcgctgatgtattgggaatcggtgcagttggcgatgaggacttgatttcagagtctgatgatacattccttataaactgtgatgttgatgatataattgctccacttgtttatatagttcctcttcagcttttaagctatcatgtttctgtaattagagagcttgatccggacaagccaaagaatttggctaagtgtgtaactgtggaataa

SEQ ID NO: 1535 - DNA, 708 bp, Methanobrevibacter ruminantium
  source 1..708: mol_type = genomic DNA
atggaaaatgctcctaataaagaagacattaaaaagattgcaggagacgatctctctaaggcagaattaaaaaagagaattatagaattatatgattctggccaaacaatgatggatattgcagattctgtaaatagaagtaaaatttatgtaagcaatgtcattcatggattttacgatgaggatgagattaaggtccgtcaatatgacaaattaagagggaaagcaaaacttgatttttcaagatatagaagttctacaggtatttatagggttagttatgtagaaaacaaaagaagcggaaatgattattggtcatatcagtactatgacgatggcagattgaaaagaatcgtttctgtcaatttatacaagcttaaaactgttgtaactgaaaaaggattggactggtttgaatttactgaagaagctaaagagatggttttaaaagataaggaaaactttgatgaaagctctcttaagagaacaaacaagactggattctacagggttacaaagcgaaaaaccaatacaaagcaaggatacacttgggcttattcatttaaggagaacaatcatctttattttgtaagttccatcagcatttcaaagcttaaggaaaaggtcttaagcaatggctgggaatgggaagaattaactgaggaagccactagattggtagaagaggattctaaaaagcgaatttaa

SEQ ID NO: 1536 - DNA, 750 bp, Methanobrevibacter ruminantium
  source 1..750: mol_type = genomic DNA
atgattgaaatggattctaaaaaattactttatgaaggaaaggcaaaaagtgtttttcaaggtgaaaatgctgatgaagtcataatcgactttagagacgacatgactgcaggagatggagcaagaaaagaaagcatgggaaaaaagggttatttcaactcaattatctgtgcaaaaatctttgagactcttgaagaggcaggagttgaaacacagcttatcgaactaaccgagccatgtgtcatgaaagctcgcaaattggatatgatccctatagaggtcattgtaagaaacatagctacaggaagcatcataagaaaattcccatttgaggataagagcccatttaatcctcctctcatacagatggactttaaggctgacgaatttcatgaccctatgttaaatgatgcaatagctatcgcccttggaattgcctctcaagaggaccttgataaattaagggagcttgccttaaaggtcaacgaagtaatgagcaaaatgtttaaggagattggaatcatccttgttgactttaaaatcgaattcggtaaggattcccaaggaaatatcatattaggtgatgagataagcccagatagctgcagactatgggatgccgaaacccttgatatgcttgataaggaactctttagacaaggaaaagatgacgaggtcattgatgcctatgaagaagtctttaacagactcttaaccgaagaagataaggcaaaatggaatattaaatag

SEQ ID NO: 1537 - DNA, 273 bp, Methanobrevibacter ruminantium
  source 1..273: mol_type = genomic DNA
atgatgtatgatatcgaagttaaagtttccctaaaagcaggaatgttaaatccagaagcaactaccattcaaaggtcattatcccttttaggatacgaagtaaaaggaaccaagacaaaagagattatcagctttgtaatggaagcggaatccgaagatgatgcaagggcaaaagtggatgacatgtgtcaaaagctattatgcaatccgatcattcacaactacactataaaaatcatcaaaatggactttacctgtgcaagctgcgaataa

SEQ ID NO: 1538 - DNA, 654 bp, Methanobrevibacter ruminantium
  source 1..654: mol_type = genomic DNA
atggcaattggaattataagattccctggaactaactgtgaccgcgacgtttataaggctatagatcttgctggcggagaggcagaatatatctggtggaacaatgaagacttgactgattatgatggaatcgttatacctggaggattttcctacggagactacttgcgtgcaggggcaatagcttccaacacacctgttgtggaaggggttaaggcacttgtaaaggaagaaaagccagttcttggaatatgcaatggagcccagattcttggagagattggacttgttccaggattgttcattacaaatgaagtccctaagttcaattgtgaatggagcagacttaaggtggcaaacaataagacaccgtttacaaagaactttgatttaggccaaatcattgacataccaatagctcatgcagaaggcagattctacactaaggatattgatttattgaaagaccaagaccaaatcgtgcttcagtttgcagaagagaaccctaacggatctatggaagctatcactggagtaagcgatgagtctggacttgttgttgcaatgatgccacacccagaaagagccacaaccaaattattaggctcagatgacggtcttgaattctttaaagggatgttagatagtatttaa

SEQ ID NO: 1539 - DNA, 714 bp, Methanobrevibacter ruminantium
  source 1..714: mol_type = genomic DNA
atgccagtatatttaataggtgcaggtccgggagaccctgatttaataactttaaaagctgtaaaagcattgaataaagcagatgttgttttatatgactatttagccaatgatgaaatattaaaacatgccccagatacagcaaagcgcatttatgtaggaaaaaaagctggagagcattataagacccaagatgagatcaatcaattgattatagaagaggctaaagaaaatgaaaatgtagtcaggctcaaaggaggagacccatttgtattcggcagaggtggagaagagcttttagcccttgcagaagagggaatcgactttgaagtcattccaggagtcacctcagcaatcggtgcacctacaagcatggcatttcctataacccatagagctgttgcaacatcctttacagttgtaacaggtcatgaagaccctacaaaagaaaacaagcaagtaaaatgggattatactgcagacaccctaattatcctcatgggaattggaaacataaaagaaaacactgcagaaattatgaaatacagagatccagacactcctgcctgtgcaatcgaaagcggaacactccctaacgaaagggttgtctttggaactcttgcaacaatagcggataaggaaatcaatacccctgcaatacttgtgattggaaaggtcattgatgtattcaagcaaataaagggaattgaataa

SEQ ID NO: 1540 - DNA, 720 bp, Methanobrevibacter ruminantium
  source 1..720: mol_type = genomic DNA
atggaaatcggagaaattattactgattctttaaagtatcctattaataacattaaagctttaataatttacatagtcctcggtatcgttgcaggtcttgtactcgtattaaccggcgttggcgtcggagcaggtgcaatagcaaatagcgcagcagccactggaattgttggaattattggaattattatattcttccttatatacttattaatcttaggatacgaattagatgttataaactttggtattgaaagaagagatgacgctcctgaaatcgacttcgctagacaaataactaatggtattaaatggtacattacttgcttcatttacatgttaatcccaactatcattatgataattttatcatacctcaatcaaactttaggtttaattgtaggaataatattatttatcatagcagcattcgctttattaatggctcaatgcagattagctcacacagacagcttaggtgaagcattaaatattccagaagcaattaaagatattacaaaagtgggaattataaaaataatagcagtattccttattttagttatcctaggccttgtcgtatcatttattttaggtttatttagtgtattaggcgatgtaggcacatatattggagctattttatctggtattttcacaatctacctagcctttgtagtcttcagagctagtggattattatactcagatgcagtttaa

SEQ ID NO: 1541 - DNA, 1512 bp, Methanobrevibacter ruminantium
  source 1..1512: mol_type = genomic DNA
atgaaaattctattcttaaacttaccatatgaattcaatataagcagggctagcagatggcctgaaaagaccaaatcaggtaccttatattatccttactggcttgcatactgtgttggggtatgcgaacgtgagggatacgactgcaaattggttgattgcattacaaaggcatatacaaccgaagatacagttgaagaggttaaaaactaccaacctgattatatcatggctgaaataacaacccctacttgcgcttatgattatacagttataaatgccattaaagaggcttatcctaaggcaaaaatacttattggaggaactcatgcaacaatattgcctgatgcagtcttaaaagagtgtttaggcatcgattatcttcttcgccaagagtatgactatactgtaggggagcttatatcctctgatgatgttgcatcagtgaagggagtctcctatagggtaaactctgatggtgtggacatcgcatctttaggtatcaatctattgactgaaccagttgactttgaagtaaggcataccgaagacagagagcctcttgaggacttggatagccttccatatgtttcaaaggtttaccagaagtatctaaacttcgatgactatgcatatgccttcgctcaaaagccaatgattcagattgtatcatcaaggggatgccctaaccagtgcaatttctgcagctatccatctacaatgggcggaagaatttataggacaagatcagtcactgaccttgcagatgagtttgaatacatcttgaaggagcttccagagattaaggaaatctttattgaggatgacacattcactgttaatcagccaagggttattgagttttgtgatgagattataaaaagaggcctaaagcctatctggtcctgcaatacaagggttgacttaacctatgagacaatgaaaaagatgaaggatgccggttgcagattacttgtttgcggatatgagtctggtaatcaggacgttttaaatgagactaaaaagggaataacccttgaacagtcaagagcatttgcagagaatgccagaaagttagacattaaagtatttggctgctttatgatagggttgactggtgacagccttgagacaatcgatgagacttataagtttgctcaatctgtttatccggacatgtgcttcttccagcaagcggtaccattcccaggtactggattttatgattgggctaaagagaatggctatctcattacagaggactattccaaatggctgaatgaggatcggtatcttaattgtctggtggactatccttatgcagatcataaggagatagagaagttaagagacagtcttatgagcaagtattatttctcatttgcatatattgtaaagactttcttagctaaccttgattgggttgaattcaagagagtcatgcgaggaggaactcagtatattacttttagacttaaaaaagctttaaataagtctgataatttggattaa

SEQ ID NO: 1542 - DNA, 777 bp, Methanobrevibacter ruminantium
  source 1..777: mol_type = genomic DNA
atgaaaaagaaaatagcaatcacaagacctcaagaacggtcaaaagccgcaaaggagtttatagaaaactatggatccgaagcaatcatagtcccaacacttgaattgaaactggaaaataccgaatcactaaagaacctgatggaaaaatccaatgagctagactggttgatatttacatcagtaagttcaatcgaatcaatctttgaattctatccggacttcttggacaagttgaatccagagtgtaaaattgcaaccataggtactaaaactgcagaacttggtataaaaaaaggactccctatagacatcatacctaaagattatactgctgaaggactgcttgaagaatttgaaagaatcgacttaaataataaaaatgttggcgtccctaggacattttctgcaaggactattttacctgaaggacttaaaaatatgggggcaaatgtgatcttggctgaaagttataaatcagtcattccagaggacacaagcaagatagaaaaactgattcaatgcatcttagatgaaaagattgacggaatcacatttacaagtcctttaactgtatcaaacctttttgaaatagctaaagatgaagataaggataatctagttgaaaagttatctacaacaacccttactgtagctattggaccaattacaggtaatatattgaaccaattaggagtaaatcacatctatccaaaaaggtatactgtaaaagacatgattgacttgatgtttagggagttaaacaatagggaataa

SEQ ID NO: 1543 - DNA, 906 bp, Methanobrevibacter ruminantium
  source 1..906: mol_type = genomic DNA
gtgaatggagaatatctgatgtttattgattcagatgacacatatccaaaagacgcttgtgagattctcttaaataaaatagaggaatatggatgcgacattgcctttggaagatatcttaggcattatccggaagagaatttcataagaaaatcctacactccctatatcgacacccttgatgaaccatatcttagctatttagatgatttagtaaagggatccaactttaagggaatagtagggagcctttggaaaaacatattcagcaagttcttctatggtagctccatagatatgaataagttcaattcaaaggaatctgataattcccacccaaaggaactggataaaaattataaaaataataaagagatattcataagaaatattaaggatgaaaataaagaggaaatagctatcttaaagattttaccttcattttggactaaaatctatagaagcgaacttataagcaaaaacaatatcaatttccccgaatgtgtctctgcagaggatttgaactttctattggaagcatactttaaaagcgaaaatggaattttgtttttgaatgacaagattgtctataattattttatgcgtttagaggttgtagataagtcagttacaaaaaatatcaatttcagattggtttatgattcaattaaagcatatagattgtcttcagagctttgtgacaatttcaatataaagaataaggacctgttcctaaacccttatctattaaactggataagcttatggctaagcagaaaaaatacaaaagaggaaaataagatatttttagaggaatttgataagttagataagactaaaaagtatggtttgaagtataaattgattttaaagaccacaaaattattattaaaaataaaatcataa

SEQ ID NO: 1544 - DNA, 324 bp, Methanobrevibacter ruminantium
  source 1..324: mol_type = genomic DNA
atgaaagaagtaatgatatggccaatttatttagatgcagacaaatctctaaatgaaggcagaaagatatcacaggaatatgctatttcagaaccaagaataaaagagattgaaaaggctgctcaaaaattaaaatacaaatatactgttgaagaggataagtcctatcctggagaatggtataataaatctggaagaatcataattgaaactgatgattcaaaaaaagaaattcttatgaatttgtcaaatagcattaaagatattagagaagctagaaagaactataagcctactaaaaaaggtaaaaaaggaaaaaaatag

SEQ ID NO: 1545 - DNA, 1443 bp, Methanobrevibacter ruminantium
  source 1..1443: mol_type = genomic DNA
atgatagaaacattaccaccagacatgaaacagaaatatgaagaggcaaaggaacttatagagtcctcagaagacattaaaatatatagccatacagattgtgatggaatatcttcaggagccatcctatccactattttaaaaagaataggaaaagactatgaaatagagatagtaaatcttgatgtcttggaagatttggaaatagaacatgaactaaccatcttttcagaccttggatcaggacagcctgtagacaaacatgccaaaaaagattcaaaaatactgatattggatcaccaccctccacttagggaaatggactatccagacagtgtggaatatacttatctcgagataaatccaatgtttcacgatatagacggttcacaggaaatctgtggaggaggactatgctatctccttgctaaggaattcggctatagggacctcagttggataggagttcttgctgccattggagatatgcaaaacactaaaaccggaaagcttcaagggatgaacaaaacaattcttcaagatgccaaagaagaagggctagtcagctccgatactgacctgtcattatatggcagacaaacaaggcccttatttgtagcattatcctatttcagtgatgttaaattgcctattaccaacaataagaatgaaacaattgcgcttttacaaagattaggaatacctagaagaattaaagatgaaagcgttccttcaggagaaagggcaaccaccctcagtgacttgaatgacgctcaaaaaagggcattgactagcgaattgataaggatgatatcaaacgaaattcctccaagatatagcatttatgttcctaaattggtaatagctgacacttacgaattcttagccgaagaagacggcacattcctaagggatgcatctgaattttccactgcaatgaatgcatgcgttagaaataatgaagaggtcgttgctttaaaaatcctagaaggaaatagagctgaggcattagatgcacttgaaatcatttctaaagaccatagaggttatttggccgagaacattcaaagcattgaggatgagcataagattattcaaatgaaaaacctgcaatactttgacggctcaggaatcagaagcaatgtagtaggtacaattgcaggaatggttcttagctatggagattggagaaagcccatgattgcatttactcaagtaagtgatgagaatcaagatttaaaaatatctttacgctgctcaagacttttggcatatgatggaattcactttggaaacattataagagaagttgcacaaagcttaggaggaaatggaggaggccataatgttgcttgtggtgcatatattcctaaagataaaaaagatgaatttttaaatttgatgaatgaaaaactagaaggaaaattagctcttgaagactaa

SEQ ID NO: 1546 - DNA, 828 bp, Methanobrevibacter ruminantium
  source 1..828: mol_type = genomic DNA
atggagattttacaaaaaagaggagctttaactcattttcaaatattaggtgaaatatctaagcaagaaccaaacttaaaacaaaaagatttggctgaacgtttaggaattactatccaagcagtttccgaaaacataaaaacattaaccgaacttgaatacattacttcaaaagacggaagagcaccatataaaataactcaaaaaggaattgcaaaggttaaaaaagatgcaatcatccttagaaaatatactgacagtgttcttgaaaccatgacatattataaatccacttggcctgcaattgcaaaagaagacttgaaagaaggagacgaagtaggtttatatatggaaaatggaagattatatgcatcaataaacgcccaaacttcagcatatgcagatgtgatattagacactaaaaaaggctttgatgttgctctaacaaatctcaaaggaacaattgaaatcaaagacagcaagattttaatagtcacattgcctccaatcaaagatggaggatcacgttctgctgatttggacttggttaaaggaatctatgaaggaaactatgaaaattatggattaagttccattgataaggttgcagcaatcggcaccacttcacatgcagtagccaataatttaggcattccaatagacattgaatttggagtaagcgaagcttcccaatctgcagttagaaaaggacttaatgttatgattctttccattggagacatgagcaagaatattagtaaagatttagaggatgctaatattcaatatcaagtcatagatgctaagaagtctgtaaaaactgcctaa

SEQ ID NO: 1547 - DNA, 696 bp, Methanobrevibacter ruminantium
  source 1..696: mol_type = genomic DNA
atggaaaataagcttataagacaagacactagcgatttagatattgtaaatcatccagagattaagggtttacagattattgaaggaaaaataaattttccaatcagttggttaaatcagcaagggtactgtgaatacacattatatctgcaatacctaaaaggcattaaaacaatgccaactcaggctatgaccacaggcactaaggaacatttaaagttagaggaagaatttaagcaaactgcaaccccatcaagttttgatgatgcatttaaggaatctaaggaaaaggaaatactgtctcgtgaaatgtttgttatagattctgaagagggggttcgaggttttattgatgagatttggatgactccagatgagattgtgataattgatgataaaccgggcaatagggcttatccatcatctatgaatcaagttcgtgcatattgtttggcctttaaaaacatgattggcgatgataatcgtataatcagaggcgctttaagacaaagaggcactgacaatatattttggagtgaaatctttgatgagaaggttgaagagaatatattatatttaattcaccgtatgcatggtctatttgaaggcactaaacctttcatacctactaaaaatggaaataaatgtagagcatgcagatatcaatcctattgtgaacacaaagttgatatttag

SEQ ID NO: 1548 - DNA, 441 bp, Methanobrevibacter ruminantium
  source 1..441: mol_type = genomic DNA
atggatttatttgtaaaaagaatcattgcttacattcttgatttctttgtagtttcagcatttatgtggattttctcatatttagcttatttctttattaattatttaaatatgttccaaatctaccattatttcatttttatacttccaatattaattttagtttactttacattcttggaaaagaatataggggcaactgttggcaagaaattaatgtttatagaagtgaaatctactgttgctaaaagaagtagaaatggaaggaattataatttaacttatgggcaagcatttattagatctttatctaaaatctactggttccctataatcattgatgtgattcttggtaaaattgctggaaaaaccagattactcgatggattttctaaaaccactgtagttgaagaaagagtagacagatatctttattattaa

SEQ ID NO: 1549 - DNA, 1011 bp, Methanobrevibacter ruminantium
  source 1..1011: mol_type = genomic DNA
atgaaaataggtatgtcacatggagctggtggagaagttatgggtaatctaatttcagaaaccattcttaataatttatcaaaaaaagctgttgaaggaggtttaggcctagatgctttagatgacggagcaactatacctttaggcgattatgaaattgtatttacaactgatggtcacacagtaaatcctttattcttccctggaggagatattggaagaatttcagcagcaggaaccattaatgatgtttcagttatgggcgcaaagcctttagcaatttccaatgcaatgatcttgcaggaaggctttccaatagaggatttggataaaatcatcaagtccatgagtgccacttgtgaggaggctgatgttgcagttatcacaggagacactaaagtcatggaacaggataagcttgaaggaattgtcattgtaaccacaggtattggaatagcaaaaaaaggagaggtaatcaaggattccacattaagcgttggagataagataataatttccggaagtgttggtgaccatggaatgagtttgatgtcctttagagaaggctttggatttgaaacagagttgaaatctgatgtggctcctatgtggggaattatttcaaaggctcttgaagttggaggtgtcactgcaatgaaagaccctacccgtggaggtcttgcaaattgcataaacgagatggctcgcaaatctggtgttggagtattgcttcaagatgaagccattccagtgaagcaagaagtcagagcggcatctgaaatgttaggaattgacccttatgaagttgctaatgaaggtaaggttttaatgggcgtaaaggctgaaaaggcagaggaaattctagaagccattaagactgataagtatggtgccgatgcagctatcattggtgaggttattgatgatgataaggttttaattgaaacgggaattggaggcataaggattttagagactcctattgcagatccggttccaagagtatgttaa

SEQ ID NO: 1550 - DNA, 378 bp, Methanobrevibacter ruminantium
  source 1..378: mol_type = genomic DNA
atggcaatttgtcaaggaaaatcaactagaacaccttctggtgctagaagagttgcaaatcgtggaaaaagaaaatctgaattaggtagagaatctgcagaaactaaattaggggacaaaaatttaagaaaaatcagaacccgtggtggaaacgtaaaaaacagattagctagagacaataagattaatgtagttgatgcagaaggtaaagctcaaactgtagaaattttcggtgtaatcgaaaacactgctaacccaaactacgtaagaaggaacatcattactaaaggtgctattgtagaaactgcagctggaaaagctaaagttacttctagacctggccaagatggtgttattaacggagttttaatcgaataa

SEQ ID NO: 1551 - DNA, 681 bp, Methanobrevibacter ruminantium
  source 1..681: mol_type = genomic DNA
atgccagaatccccagagcaattagctattgaaaaagaaattcaaatccaaaaggacaagtttttaaacttctttaatggagagttaccagatacaatggaacttgaatttgagggattctacagaagaggtttttttgtaagcaaaaaaagatatgcagtaattgaaaatgagaaaatcatagcaaaaggtttagagcttgtaagaagagattgggcaccaatagctaaaaaaacccaagaggaaatattgatggccatcctaaaagagggggatgttaaaaaggctgaaaagatcattagcaaagtccttaggaaaatcaaatcaggagacattgcaactaaagatctaatcatacatacccaaatcactaaaaatcttgatgactataagcaaataggacctcatgtgattgctgcgcgtgaaattgaagcacatggaattaaagtaggtaaaggaacaattgtacaatatataatcagtaaaggaaaaggttctattagccaaagggcagtcccttatgaatatagtgaaggagttgaatatgataaagaatattatattgaaaatcaactgattccagcagtttcaagaatgatggaacctttaggatatgataaaaatagattgagagaattggcatcaaccgaaagacagcaaagtttagatgcattcttttag

SEQ ID NO: 1552 - DNA, 681 bp, Methanobrevibacter ruminantium
  source 1..681: mol_type = genomic DNA
atgactaaagctgtgttctttgatatagatgatactcttttagacacttctagctttgcagatcttgcaagacatgcggctattgaaagtatgtgcaacaacggtttacctttagaacctgatgaagcatatgacctattaaaagatattattaaagaaaaaggttcaaactattcaaaacactttaacatattgacaaaagaagttttaggtaaggaagatcctcttttagtggcaatcggcatgaccacttaccataacgttaaatttgcacttttaagaccattccctagaacaagtgccattttaatctacttaaaaagtaacggctataaattaggggcaataacaaatggaatcacaataaaacaatgggagaaacttgtcagattaaatttatatcatttctttgacattgtaattacatcagaggaagtgggagttgaaaagccagaccctgaaatctatcttgaagcatgcagaagaatggcatgtgatgttaaaaaaagtgttatggtagggaataaactagatattgattgtatgggtgcagttaatgctggaatgagtgcaatacttgtaaattccactttagatgaagaggaaaaagaaagagttaataatgaagacattgatataatagttttagacagcatttccgatgttgatactgttttataa

SEQ ID NO: 1553 - DNA, 789 bp, Methanobrevibacter ruminantium
  source 1..789: mol_type = genomic DNA
atggcgcaaatcaaatgcccagactgtggcaaagaacaagaagatacaaataaattctgtaaaaattgtggagctaatctatcaaatgtaaaagcagaagaagtaaaattagacctagacgctgctccaactgaagagaaaatagacttaaacactgctccaactgaagaaaaattagatacagatgcttctgaagttaaagaaactcctaaagctcctgtggaaaataaaaagatatgcagcaaatgtggacatgaattgaataatgaaaagttctgtccaagatgcggacaatccacagcatccatagttccatatgaagccaagactgaaagccaaggtgaaaataatgacaaaacctgtccatcctgtggaactaaagtaactacagaaaagttctgtccaaattgcggaagtaaaatagaagagaaaaaaccagttcaaacacaaaacgctccacagaaatattgtagaaattgtggaaatccgattgatcctaaagctgaaatatgtccaaaatgtggcgtaagacaattgactgttgttaaaaaagaacctttattctctcttattctatcacttatattcccaggccttgggcaattctataataatcaaactcataaaggaatctttttaattattggagcaatcgtatccatcgttttaacaatttttgtaattggagtcttattatacatgcttgtatggctttacggtatgtacgatgcatatagcactacaattgctttaaataatggagagtatgttgaagataaactcttctaa

SEQ ID NO: 1554 - DNA, 273 bp, Methanobrevibacter ruminantium
  source 1..273: mol_type = genomic DNA
atgagtgattttgaggaagtaatgactgaatacatcaaaatctcaaaacaccgcgaaaaagtatttaaaacattgaaagatggttctaaaaaacctagtgacattgcaagagaaacaaatttaaacatcaacagtgttagtttatctcttaaacagttaactgaaaaagaattggtttatttattaaatcctgacgacaagaaaggacgtttatataaattaaccgaaataggcgaaacaataatcaaggaatttgatgaaaaaaccgaataa

SEQ ID NO: 1555 - DNA, 777 bp, Methanobrevibacter ruminantium
  source 1..777: mol_type = genomic DNA
atgacaaaaattagacttatctcatggaatgtaaatggcattagagcaattcataaaaagggctttctagactggtttaatgaagagaaagcagatattgtaaacttacaggaaaccaaagctaaaatagagcagttaccaaaaaaattaatcaatgttccaggctataccagctatttccactcagctgaaaggggaggatatagcggagtggccacttacacttcaatagagccaaatgaagttattaatggaatgggaattgagaaatttgatattgaaggaagattaatcagattggattttgatgactttactctcttaaacatctattatcctaatggaggtcgcgacgaagagagattgcaatataaattagacttctatgatgcatttcttgattatgctaacgatttaagagaccaaggaaaaaatcttgttatctgcggtgacttaaatactgcacataaggaaatagatcttgcaagacctaagcaaaatgaggatgtatcaggttttcttcctatagaaagagaatgggtaagcaaatttctagacaatggctatgtagatacctttagaatgctacatgaaaatgaaaaagaaaaatatacatggtggagttataggactagagcgagagaacgcaatgtagggtggcgtttagattacttcttcgtaaacgaagaatttaaagacaatgtaagagcatcttacattatctctgaagtgatgggttctgatcactgccctatagctttagaaattgaaatttaa

SEQ ID NO: 1556 - DNA, 1548 bp, Methanobrevibacter ruminantium
  source 1..1548: mol_type = genomic DNA
atgagtgaagttatagataaaatcattaatgaattacatatttatgaaaaaaaattacttaaagagttagaaaagaacgaagatcttagtcctgatgagatagctcaagatacaggcttaaacattaagtctgtaatgagcgcagcaggaattctcgcttccaaaggaatcatcactgttaaaaaagatgttgaagagaagttcagcttaactaaatatggtaagaagtatgctgaaatcggtcttcctgaaagaagaatccttaatgagcttcaagagaaaaaagaattgcatatgaaagatttggctaaaatagacagtcttgaaaagaaggaaatcaatattgcaattggctggttagttcgtaaaggctgggctaagataaacaaaggtgtagtgactatcactgaagttggagaatcttctaaagataaattaggtgatgatgaagttttacttaatcttttaaatgaaaagggaagtttatctcaagatgaacttgatgaagatatggctaatggtttagcagcacttaaagataggaaaaaattaattgcaagtgaaaaaaccacttcccatagcttccagctaaatgacttggcttatgagattttagataagggctttgacttaactgaagaggctacccaattgactcatgagcaattgaaagacggcagttgggctaaactaaaatacaggccttatgatattaatgctgaatatcctattttcttcccaggtaaggaacatccattaagaagaatcattcaggaaattagggaaatcttccttaaccttggctttacagaagcaaaaggagaatatttggagtctgcattttggaatttcgactcattgttccagcctcaagatcacgctgcaagggagatgcaggatacattttatgtaaagaatccattgacttgcgacttgccagatgatgaccttgttgaaagggtagctaaaacccatgaagatggtggaaataccaattctgaaggttggcattatgattgggatgcagatattgctcgccaatctgttcttagaacccatacaactggaatttctacacaagcactagcaaattgggagcttcctattaaaatgttttcagtaggcagagtatttagaagagaaacctttgactataagcatttgcctgagttccatcaagtggaaggattggttgcagctcctggaatcaattatcaaaatctcctcggaacattaaaggaattctataagaaattaggctttgaagttagattcagacctgcatatttcccttacacttatctttcaactgaatgtgaaatctatttggaagagaaggaaagctggatagagcttggcggatgtggaatgtttagacctgaagttttagaacctttaggtgttaaagttccagccttagcatttggtttaggtattgaacgtttagctatgattagatatgacttatctgatattagaatgctttataagagtgatatcagttggttaagggaagttcctttagaagaaggcattaactttgaataa

SEQ ID NO: 1557 - DNA, 900 bp, Methanobrevibacter ruminantium
  source 1..900: mol_type = genomic DNA
atggaagcaaaccaaatagcaaaattggcacaaattgcatcagcgttagaagttagtggttatccaaaacctggaaatgttcataggactcgtaattatgatgatatggtctttgaagactttataatcagtggagttgttattggagataccattcgagaattggctaatcacacccaatccattgatgatttgtctgatgcaaatttaggcaaatatattttagaggcagttgctgaaacaaataaatggattgcaaataataccaatctgggcattatgatgatgtgtgttcctattgcagctgctgcttcaataagtgatgattttagccaaattcaagaaaatgtaggtaaattgatggatgcaactactgttgaagatgctgtagatttatatgatgcaattaatttagctgatgctggaggaatgggggatcaggatgagtttgatgtaaccagcgagaaggctaaggatgaattgcgtgcaaacaatcaaaccatgtttgatgttttaaagatatctgctccttgggatagattggcatctgagcttacttctaaaatgcctgtttcctttgaaatcggttatccgacattcactggtttctgcaattcatgtgaggatgttgataaaatcaataaggctactgtactcactttcatgacacttttatcagagattccagacactctcatttcaagaaaatatggtgatgaggttgctaaagatgtgtctctaaaggcaaaagagcttttagaatttaaagatgatgatgactttgtagaaaagcttttagaattcgatgactatctctatgaaaataaatataatcccggcactactgctgatttaactgcagcatctatatttattagctatttggataaagaattctaa

SEQ ID NO: 1558 - DNA, 996 bp, Methanobrevibacter ruminantium
  source 1..996: mol_type = genomic DNA
atggattttccaaatactagaatgagaagatatagaaaaaactctaaaataagagatatagttcgtgaaaccaaattaaataaagaggatttgatttatccaatctttgtaaaagaggatttaaaggatgatgaaaaggaagagatttctacaatgcctggagaattccgattttctataaatggtgctgtggaatatgcaaaaacattggaggctaaaggattaagatcaatcatcatattcggtattccaagtgatagcgaaaaagatgaaatcgcaagccctgcttattctccaacaggaatagttcaaaagaccgttcgcaaattaaaggctgaaactgatttagttgttataactgatgtttgtctttgtgaatacacttctcatggtcattgtggaatattgaaggaaaatgaagatactgattttggatatgaaatattaaatgacgaatccttaaagttcttggcaaagactgcggtatctcatgcagaggctggtgctgatattgtagctccttctgatatgatggatggtagagttgcagcaatcagagaggctcttgatgaggcaggatattataatacaatgattatgtcttattctgttaagttcgcctcttctttttatgctccatttagggaagcggcatgctcttctccatctgttggaaataggaaatcctatcaaatggatccagctaatgctcgtgaggctattcgtgaggcagagcttgatgttactgaaggaactgactttttaatggttaaacccgctttaccttatttagacattattaaaacagtaaaagatgaatttaatctgcctttggtaacttataatgtaagtggcgaattttcaatgattatggcaggaatagaaaatggctatttgactgaagactctattatggaatccttattatgcattaaaagagcaggtgcagacttgattattagcaatttcgctccatatgctttagatcatttataa

SEQ ID NO: 1559 - DNA, 1101 bp, Methanobrevibacter ruminantium
  source 1..1101: mol_type = genomic DNA
atgacaaatacaattggaaaaatctttagaattactagttttggttctagtcatggaaaagcacttggagctattgtagacggatgtccagctaatctagaacttagtgaagaagatatacaaattgaattaaataaacgcagaccaggaaccagtgctttaacaactgcaagaaaagaacaggaccaagtggaaatattatcaggagtatttgaaggaaaaacagatggaactccaataactggagttgtatacaatacaaatcaaaaatctaaagattattcatcacttaagaacactccaagaccaggacatggagattactgctggatagaaagatacggaaactacgactataacggaggaggtcgtggaagcggtagaattaccataggccatgtaatcggcggagctatagcaaaaaagcttcttagtgcaaaaggaataaaaataatctcccatgttgtgcaaatcggagatataagagcaaaggaagcaaatattgaatcacttgaagaaaacatcacaaagaataatgtaagatgtggagaccttgaagtggccaagcttatggaagatttgattttatctaaaaaggaagaaggaaactctgtagggggagttgttgaaacaattgctttaggagttccagcaggacttggagaacctgtttttggaaaaatagatggagatttagcaaaagtcctaatgaacatcaatgctgttaaaggagtggaaatagggttaggatttggtgttgcgaccaaaacagcaaaagaaatcaatgatgaattctattacgaaagagatgatgttaaaactaaaacaaacaattctggaggaattcttggaggaatgacaaatggaatgccaattgtatcaagaattgcaattaagcctactccttcaatttctcaaattcaagaaaccattgatttaaataaaaaggaaaacactacaattgaaattaaaggtagacatgatccatgcatctgtccaagagttactgcagtggctgaatcagcaactgcaatagttttagcagaccatatgattcgttcaggatttatccatcctacaaatttagaaaaaagagtttaa

SEQ ID NO: 1560 - DNA, 942 bp, Methanobrevibacter ruminantium
  source 1..942: mol_type = genomic DNA
atgaaaataacatttttaggttctggtggaggaagatttaccaccattagtcaaaaaagaatgactgggggattcaggcttgataatttcggtggaaagaattatcatatcgacccaggtccaggtgcccttgtcaggtcttaccaatttggtgtaaacccaactaaaattgatggaatttatatttcccattcacacactgatcattatggtgatgcagagattcttattgaagcgatgactcgtggaatgacaaagaataatgggattattatggggagcaggtctgtttttgaaaagtataagcgttggggtcctgcaatttctaattaccatagaagcaattccaagaatctgattttggttccaaataaaatcaaacgtttccctgatttttcaataaagggaactgacaccattcatggagatcctacaggtgtgggctttcagatggaagcaaataacttaaaggtttcctacacttccgatacaagatattttgaggaattgaagaaatatcataagggtgcagatatattgataggaagcgttttaagacatgatgatgatgctatcaagggacatatgtgtactgatgactttataaatttggttggtgacgttaagccaaaattagctataatgactcattttggatttaagatgattgctgccaatccggttgaacaggcaataaaggtttcaaagaacacaggtgttagaactcttgctgcatttgatggaatgttggtggatgttaatgaaaaatatcctcaaaagtctcgtatgttaagacttaaggacagatttgcagctcatatgaaacaagaagacgtttattcaactaattttaaagttaaatcaaataaaagaaataaaatgagaaataagaagaaatattataataataatgattctaataattcttttagctctaaataa

SEQ ID NO: 1561 - DNA, 927 bp, Methanobrevibacter ruminantium
  source 1..927: mol_type = genomic DNA
atgagtttaattattgcttatgtaggaaaaaaaggatgtgtaatggcggcggataagcgtagaattgcttatttcggtttaaaagaacaacgtgaaattttagaacaagaaatttactctggtgaaattcataatgatgaagaattatatgctagggctgaagagttagatgttaatttaaaagttacagataatgcatgtaaagtaaaaagcattgaaaatgttgctattggtgaagtaagctctagaggaacaatggaaactaaaaggaaaagaatttatggtacaagcaatggttttaaaatcattgaactttccggttctcatgtattaaactctaaaagaggagtctcttcaataatcgtatttggtaataaagttactaaatcattagctaataaaatgattcaggaaagatggaagcctagtttcagtttaaaatatatgggagagatatttggagagattctaaaggacattgctgaaatcactccttctgtaggtaaggattatgatgtgataattgaaaaaaataatttggcaaagagccaagttcaagattatatagatgaagtcgctgaaagggacgttaaagttttagctaaattcagggcacaacttagagagcagttgatggaacagaatgaaaatataaaattggcttcaactattattgaagagggatccgttggcgaaatcgttataattgatgataccttaattgaagtgaagttaaatcctgatgttagggcatttgatgttaattggaaggtccttgcaggtcctggtgaaaatgttttaatggttgtggacgactctgaaggtcttgataagggcgatgagatagtaattgaagacgaagtcttatgcgttaagaagaataaggctaatttgaaatgtgatataattttatgtcatcttgaataa

SEQ ID NO: 1562 - DNA, 381 bp, Methanobrevibacter ruminantium
  source 1..381: mol_type = genomic DNA
atggtaaaaattaatgaaatttacagatgcaaccactgcggaaatataatcgaaggaatcgttgaaggtgccggagaacttgtatgctgtggagaacctatggaactcttagaacctagacaattagaggaaggtggagtaaaacacatccctgtagttactaaagaagatggaaaaattgtagttaaaatgggagaagttgaacaccctatgttagaagaacactacattaactttgtccaattaaccattggagatcaagtcttccgtgctaacttaaaaccaggagaagaaccaaaagcagtatttgacattaacgctgaaattgaagacataaaagcaatcgaatattgtaacatccacggcttatggcatgcataa

SEQ ID NO: 1563 - DNA, 510 bp, Methanobrevibacter ruminantium
  source 1..510: mol_type = genomic DNA
atgaaaaagaatatttttttaattgcaataatactaattgcagttgttgcagttagtggatgtataaatagccctatggataatatcaataacaatatgaaggaattgaacactgatattaccgaaggagacaccgattataattctgctatcaattatatcaataataaggactttattagtggaactgacaacatccaaattgcaaaagacaaatttaatgatgctgatgagaagctttcaaatattgagcaatataaatctagcctaaacgagagcatttatcttgattatttatatttgattaaagaggaagtttccattaaaagacaagccagcgatgaactttatttggctttacaatattatacaaacaatgatttcagctctggaaattcatatgcccaatcagcaaattcattaatgaatcaggctaaagttttacaagatgaaagaaaccaaattgttgaaaacaatcctgatctatttaaaaaagcaggaataatctga

SEQ ID NO: 1564 - DNA, 2343 bp, Methanobrevibacter ruminantium
  source 1..2343: mol_type = genomic DNA
atgaaagaagcatgccctaaatgtaacggaactggtttagtagcagtggatacaaagatatgcgatgcatgtgatggaacaggatatgaagacacttttgaaatgaaaaaccatttcaaaggagttaccagcaatgcaagagcaaaatttgatttggatgcagatcaagacattccatgtgaagtatgcaatggaaaaggtgttgtggatgtttttgaagactgtccctactgtaagggaacaggccaaatcaacgtatgcaacagctgtggaaaggcaattccagatgataaggattactgtgacgaatgcaatgaaaagcagcttgaagaaaagatgaataaagtaaaggaaagactggaaaatcctaaaaagcttaaagtcgagtcagacattgaaggaaaggaaatcgtatacgaattagacggactatgtgatatgagtgacttggaaatcaattcactttacaaaggaaaagtcacccgtgtagaaagatacggtgtttttgtaagccttaacaatcaggtttggggattgatgagaaccagcaaccctcacaataaggtcggagacaccatctttgttaggatttcacagattaaagagagaaaacgtgaagttgatatggttccggcacatgtctttaaaggagaatatgtagtcaagaaactatccaagaacattggaagaaccaaaatcgaaacccttgatgaaagctctcttaaaagcattgttaaagtatacggagaagtcatacaaatccaacagacatcagggccaaccatctttacaatcactgacgagacttcaatcacttgggctgctgcctttaatgagcctggagttagaatgtatcctgaaattgaagtgggagacattgttgaggtcattggagaagtcaatcagcacaatggagaaatacaaatcgaatctgaatccatctccaaattagatagtgatgaagctgaagcaatgaaagaattgattgacattgctttagataaaaaagcagaacctgatgatgttgatttcttaattgaaagccctgttcttgaaagattaaagccaaaaatgagagaggctgcaaaagtcattagaagagcagtgctggatggaagatccatacttgtaaggcaccataacgatgcagacggaatctgttcaggtgtggcaatagaaaaagcagtaattccatatttaaaggaaaacaatccagacaatgatgcagaataccactactttaaaaggtctccgagcaaagccccattctatgaattggaagatgttgtaaaggacttgtcctttgcacttgaggaccttgacaggcatgggcaaaaactgcctcttattgttcttttagataacgggtctacagaagaggatattgttgcattgatgcaagctaaaatatatgacattgaaatcgtggttattgaccaccactccccaggaaatctaattacaaaaaccttaaggaacggagaaacagtctcaggagatgtggaatctgctccagaagacattatgggaggaactgtagcagttgacgaatatgtggacacacatgttaacccatatcttgtcggaggagactcgcagattacagcaggcgcattggcaactgaagtggctcatttcatcaatccagaaattgaagacttaatcaagcaccttccaggaattgcagcattaggtgaccatgcagaatcagatgaagcagaacagtatgtggaacttgcagcaagtaaaggctactcaagagacagattaaagcagattgctgagtgcattgactttgaagcttacttcttaagattcatgaacggaagaggcataatcgataccatcttaggtgttgacaatattgacaaacatcctaaaatggttgatgcattgtataaagagtatttaagacgtgttgacactcaaatgaaagcagcgttgccgaatataaaaagagtgaaattagacaatggcatctactttaatgttttagatgttgaaaaatacgcacataagtttactttcccagcaccaggaaaaacctgcggatttgtccatgacaagattgtaaaggaaatcggcgatgacaagcctatcatcacattaggacatggcccagactttggtgttttaagagcaacagacacagtacaccagctctttggatttaatgtgaataatattgtaatcagtcttgcagataagatacctcaagcaggtattgatggaggaggccacgaatgtgcaggatccattaaatatattgagggtcttggcaaacaggtattgactgaacttctcaatgaagtcagtgaaatgactgacagttctaagaattaa

SEQ ID NO: 1565 - DNA, 375 bp, Methanobrevibacter ruminantium
  source 1..375: mol_type = genomic DNA
atgtacagtgataaagttatggatcattttgcaaatccaagaaactctggcgaaattgaaaatgcaagtggtgaaggtactgttggaaatcctacttgtggagatttaatgacaatctatatagatgttgatgatgatgaagtaattcaggatattaagtttaaaacattcggctgtggtgctgcaattgcaacaagcagtatgataactgaaattgcaaaaggaatggctgttgatgaagctttaaaaatcactagaaatgatgtagcagatgctttagatggtcttccgccaattaagatgcactgttccaacttagctgctgatgctttagctgaagcaattaaggattataaggaaaagcaagaagaataa

SEQ ID NO: 1566 - DNA, 1209 bp, Methanobrevibacter ruminantium
  source 1..1209: mol_type = genomic DNA
atgatttatatggacaattctgcaacttctccagttaaagaagaagttttcaatgcaatggttccttacttaaaggaagaattcggaaatccttctgccttttattcattaggtagaagtgcaaaaaaagcagttgaaactgcacgtgaaaatgtggctaaattaatcaatgctgagacaagagaaatcatctttacaagtgggggtactgaatccgacaatatggctataaagggcatagcctttaaattggaagataaaggaaagcatatcattacaacagtaatcgagcatcctgcagtacttaggacctgcgaatacctagaaacaaaaggctttgaagtgacttatcttccagttaaggaaaatggtattcttgatattgaagacttaaaggaagcaatcagagacgataccatcttaatttcagtaatgcatgcaaataatgaaattggaactatccagcctattgaagaggtcggtggaattgcaaaggaaaaaggcatcactttccatgtggatgctgttcaatctgttggaaaaatccctgttgatgtaaaaaaagcaaatattgacttattatccatctcttcccataagctttatggtccaaagggagtaggtgcgctattcattagaaaaggagtaaggattgaaaccttgattcatgggggaggccaagaaaacaatctcagatcaggtactgaaaacgttccaggaattgttggattcggtaaggctgcagagattgcttataataatttggatgcaaatattgaaaagcttcaagaaatcagagaccttcttataggagaggtattggataaggtcccagaggcatatttgaatggtgatagagaggagagactccctaacaatgcaagcttcagatttgcagcgattgaaggtgaagggctaatcctaagattggatgcgaaaggaattaatggggcaacaggttctgcttgttcttctaaaaacctaaaggcatcttatgttttaagcgctcttggattggaggatgctgaaattcacggctcattaagattatccttaggagtagagaattcaatcgaagatgttgaagttgtatcagatgccattgcagatgtggttggaagcttaagacagatgtctcctttatgggacaatgagaaaaacgaatccttagaattggatgaatccaaatttacagatgtggatcattag

SEQ ID NO: 1567 - DNA, 1320 bp, Methanobrevibacter ruminantium
  source 1..1320: mol_type = genomic DNA
atgacaaataaaaattatggattaagtactttaggattacacgcaggacaagaagaaccagacccagcaaccggtgcaagagccgttccaatctatcagacttcgtcttatgtattcagcaatacggatgaggcagctaacagatttgcacttcaggaatttggtcaaatctacagcagattaactaaccctacttcagatgcatttgaagcaagaatcgctgctattgaaggaggaaattccgctatctctgctgcaagtggtttggctgcaatcagttatgctttgttaaacattacaccgcctggtgatgagatcgtatctgcaaacaacctttatggtggaacataccaattgtttgattacactttcaaggatttggcacgtaatgttatctttgtagattcccaggattatgatgcctttgaagctgcaattaccgataagaccaaggcaatttatgcagaatcattaggaaaccctaagttggatgttcctgactttgaaagattagctgaaattgcacattctcatgacattcctttaatcatcgataacaccgctgcagtagggcttgtaagacctttagaacatggtgctgatgtcattgcagcatctgcaactaagtttgtaggcggacatggtactgcagtaggaggatatattgtagacagcggaaaattcaattggggaaacggcaagttccctacaatatctgagccagatccaagttaccatggaataaactattgggaaatattcggagatttcccaggtcttggaaacattgcatataccttacgtatcagggcaagattattaagggatttaggtgcaacccttgcgccagttcatagcttcatattcttgcaaggattggaaaccttaacaatcagaatggaaaaacattctgaaaatgctttaaaagtagctcaattcttggataatcatcctgcagtcagttgggtaaactatccaggtcttgaacatcatccaagccatgaaactgctaaaaaatatttaggtgacaaattcggtgctctcattgctttcggtattaaaggaggtcttgaagctggtaaggagtttattgataatgttgaattattatccttgcttgcaaatattggagacgctaaaagtttggttatccacccggcttccactactcaccagcaattaactccagaagaacaggaaagcactggtgttactcaagatttaatccgtttatccattggtttagaggatgttgacgacattattgctgatatagatcaagcattagcaaaagtaagtgaaaaattcggtgatgattaa

SEQ ID NO: 1568 - DNA, 2100 bp, Methanobrevibacter ruminantium
  source 1..2100: mol_type = genomic DNA
atgactgatcttaataagatgtttaatccagactctgttgctattgttggagcttccaactctgaaggaaaagttggttatattattgtaaataatatgatcaatgatggttttaaaggaaatatatatccaattaaccctaaagatgatgaaattcaaggattaaaagcatataaaaatgtatctgacttaccagaggtacccgaccttgtaattgtttccattcctagtgttttagtaaaccctgtcgttgaagaatgtggtgaattcggcgttaaaaacatggtagtcatcactgcaggatttaaggaaattggcggagacggtgtggaaagagaaaaccagcttgtagctttaggagaaaaatatggcataaatattattggtcctaacagtttaggtatcaccgattcacacactccattaaatgcttcattttcacagatcatgcctcctgaaggaaatattgcattcatttcccaaagtggagctatgatggtagctattatcgattggagcgtaacttccggaattggtttcagtaagattatcagtttaggaaacaaggctggaacaaccgaaatcgagcttatcgaatacttatcatatgacgatgagactgcggtggttatctgttacttagaatcaatcactgaagatgacgacttcgttagaaccttaagaaaagtgtcctataagaaaccggtcattatcttgaaatccggttccagttctgctggtgctgaagctgcatcctcacataccggtgcattggcaggtagtgacattgcgtttgacacagcattcaagcaatctggtgtatttagagtaacaactatggatgaattgtttgatgtcggtttggcattctccaaatgtccattgcctactggacgtaaccttgccatcattacaaatgcaggtggtggaggagtattgtctgtagatgctatggaaagatataatttggatttagttaaatttgatgagaagaccaatgcaagacttaaagaggcagttcctgaagagggaagtattaaaaaccctattgatgttttaggtgacgctcctgttataagatataaggaatctttagaagctgttttagattctgatgatgttgacggattggttgtcatggtatgtcctactgcatctgcagatgctgatggaattgccgatgcacttgttgaaggtgcaagtggatttgacaagccggtcattgctgttaacatgggtggacctatatttgaaaatgctaacgatgtcttaagggataatggaattcctacctatgtattccctgaaactgctgtaaaggtatttgactaccttgcaagatttgctgcagttcaagatagaaattatgatgatcctgtaggagagcttgatgacgttgataaggaagctgttgaagaaatattcgctaaagtaaaagctgaagaaagagacactttgcttggtagtgaagcttatgctgtagctgaagcttatggaattgaagcagctcctataaagcttgcaacttccgctgaagaggcaggtcaattggctgaagagatggaattccctgttgtgcttaagattgcatctgataagatcttgcacaaatcagacattggcggtgtaaaggtaggcatccaatccaaagaggaagcagaagaagtcttcgaagagatcatggctaatgctaagaaagctcacccagatattgttccaaacggtgtggaagttcaaaagatgatggattccggtatagaagttcttgttggaatggttagggattcacaatttggtcctatgattgcatttggtatgggtggagttcttgtaaaccttttagaggatgtttcatttaaattggctaaaggcttgaccactgatgagattgccgaacagatggaaagcactaaagttatgggacttcttaaaggtttcagaggagaggctcctggagatattgaagcagttaaatccgcaatcattagaattgcaaaactcactttagacttccctgaaatctctgaacttgatataaaccctatctttgtatatgagaaaggatcaagtgctttggatattaagattaagttggcttaa

SEQ ID NO: 1569 - DNA, 1443 bp, Methanobrevibacter ruminantium
  source 1..1443: mol_type = genomic DNA
atgacaagggaaaaaggagagttgaacacattattcgcagataagatcaaactctttgtatgtggccctacagtttatgatgatgctcatataggtcatggaaggacctacatatcctttgatacaatcaagaggtatcttgaatttaagggatattcagtattctacttgcaaaacattacagatattgatgataagattattaatcgtgcaaaagaaagcggcatagattctaaatacttagctgagaagtttgaaaagagatttatagaagatatggctgcattaaatgttacaagcgtaaactattttgcaagggcaactgaccacatagaagaaatcttagatcagatccaaaggcttatagataagggatatgcttatgttactgaaactggagtctactttgaagttgccaagtttgaagattatggaaaattgtccaatcgtaaattggaagatttagaaacccataggatagatattgacagttccaagaaaagtccacatgactttgccttatggaaaaatagggaagctccagaatatgcaggagaacctgtttgggattccccttggggtaaaggaagacctggctggcatattgaagatactgcaatcactgaaaagtactttggccctcaatatgacattcatggaggaggacttgaccttattttccctcaccatgactctgagattgctcaaatggaagctgtctctggcaaggagcctcttgttcaatattggatgcatacaggattcttaaatgtttcaggagaaaagatgtctaagtctcttggtaatttcattacaatcagagaattattgaaggaatactctggagacacttttaggctatttgttcttttaacccattataggagcccaattgacttcagtgaagtaagcttgcatcaggctgaaaggaatgtctctagaatcaagaattatcttgaaaatcttgatgagaaaataaatgacatatttgaaaagggaaatctctctgaagaccttcttaaattagcagaattggaagaaaatgaatttgatgaagaattaatcaattttgattatttcaaatcaaattaccctgccttaaaagaaggagtaaatgagtttttcacaagtatggatgatgatttcagcactccaaaggcaattgctgcaattttctcatttataaagcaatcaaataaggacttagaagaagatgatttgattatagatgatcttttagcaattaaacactggtttaaggacattagccaaattttaggtatcgatttctttgtttataaggacgaaaccagtggaaatgaagcggaattgttagatataattgctgatgttcgtttaaaattaagagctgaaaagaagtatgatttgtctgatgaaattagagataagcttatatcattaggcattgaagtaagtgattaa

SEQ ID NO: 1570 - DNA, 381 bp, Methanobrevibacter ruminantium
  source 1..381: mol_type = genomic DNA
atgaaaccaccttgtgaaatggtagtatggtatatcataccagccataagatctgaattagctaaagacttattaaaattaggcatgaaacagaaaaagatatctgaattaatggatattactcaaccagctgtatcccagtatttaactgataaaagaggcagcggaattgggtttaatgatgatgttaaggcattgattcaagaatttgctaatgacttaaatgatggtaccgcaaccaaatttgatataattccacgtacctgttatatatgtaaaagaatcaaaacagaagacgtaatctgtcaaatccataaggaaaaaggacatatgcctgcagattgccaagcatgtttaggttcagaggcacatttattataa

SEQ ID NO: 1571 - DNA, 741 bp, Methanobrevibacter ruminantium
  source 1..741: mol_type = genomic DNA
atgtttgatgatttaaaagatgatctgcaagctgcaaaagcaagagaccctgctgcaagaagtagcttagagattctttgctgttatcctggaatatgggctattcttttgcacagatggaatcattggctttggactcataatttgccattttggggaagattcttctcacagatttcaagattcctcacaggaattgaaatccaccctggtgctcaaataggaaaaagagtgtttattgatcatggaatgggaattgtaatcggtgagacaactattgttggtgatgatgttttgatttaccaaggagtcgttcttggtggaacaagtttaagcaaaggaaaaagacaccctactgttgaagatgctgttgtaataggctccggagcaaaggttttaggaaacattacattaggatgttcctctaaaattggagctggagcagtcgtattgcaggatgttccaaggggagctacagcagttggtgttccaagcagaatcattcatgaagaccgtaaatgtgttttggatttagagcacgaattcccagaccctgtctcatcagctattgatttgcttttcgaacgtcaggaagagcttgaaaaaagaatcaatattctaagccactttcacgatatcgatcatgttgaatttagtcatgaccctaaagttgaagaggtatttaagggcgctgatgaaaagtctttttataagttgaataatattattgaagatgaatga

SEQ ID NO: 1572 - DNA, 957 bp, Methanobrevibacter ruminantium
  source 1..957: mol_type = genomic DNA
atggtgaatattccagaactaaaaagaggcatagctaacgatatgactgaagctattggaaacactcctcttgtaagattaaacagattaacagaaggattagaagcagaagtgcttgtaaaagtagaatcttttaatcctgtaagtagtattaaagatcgtatagcagtaaacttaattgaaactgcagagaaagacggattgcttaaggaagattcagtaattattgaacctaccagcggtaacactggtattggtctttcctttgtagcagctgcaaaaggctataaattaattttaaccatgcctgagaccatgtctattgaaagaagaaagcttttagcagtcttcggtgctgaaattgtcctcactccaggtagtgaaggtatgggcggagctattgctaaggctaaagagttggctgaaagcactccaaattcatttatgccacagcagtttgaaaacaaggcaaactctgaaatacacagattgactacaggtcctgaaatctggagggacactgatggtgaagtggatattgtcgtatctgcagctggaaccggcggaactgtaacaggtattgctcaatacattaagcctttaaaggctgaatttaaggcagttgctgtagagcctgcaagttctcagactttaggaaaaggagaaaaaggacctcataaaatccaaggtatcggaccaggtttcgttccagatgtattggatgtggacctaattgatgaggtcgttccagttaaggatgaagacgctggaaacactcttcttagacttgcaagagaagaaggtatctttacaggtatatcttcaggtgcagctacttgggccggattagagcttgctaaacgtcctgaaaacaaaggaaaaactattgtagttatcttgccagacactggtgagagatacttgtctactgaatgggtctttggagacttattctaa

SEQ ID NO: 1573 - DNA, 606 bp, Methanobrevibacter ruminantium
  source 1..606: mol_type = genomic DNA
atgactctctttaaatacattataacttcaagccctattggagaaataacaatcatttggaggaaaaaaccacaattccaaattgaagaaattattatttccaatccaaatcagacatcatcacaaatagctaaagaaaaatacgaaaaagaaggagaattagctattaataaaaagtcaaaacaattaaataaggtcttaagggaaatggagaattactttaatgaaaaggactataaattctcccttaaatatcttaatctagataaattaaaaccatttcaaagagctgtgcttgaagctgaattcaagactgaaaaaggaactgtaaatacctataaagaccttgcaaaggaaattggaagtcctaaagcatatagggcagttggaagtgcacttgctaaaaatccatttccaatcatcattccatgccatagaacagtaaaaggagataggacaattggaggattcagcggatttgcaggaggtcttgaatctaagaaaacacttcttgaattggatggtttaatgattcaaggcaaaaaaatagttggagatagtcctataatttcactggataagacttctcaaacaaaactggtttaa

SEQ ID NO: 1574 - DNA, 648 bp, Methanobrevibacter ruminantium
  source 1..648: mol_type = genomic DNA
atgagaggatttaaaatgaatgatgaagagaaaataagagagatctttaggagattaaatgaagtttatactatccgtacttttcatgaccatgacccatacaaggtattgattagaacaattttatctcaaaggacaagggatgaaaatacagatcaagctgcaaacgctttatttgaagtttatccagatatttacgcagttgctgatgctcctgttgagcatgttcaagagctaatcaagcctgcaggattttatagggtaaaggcagctcgtattttagaggtttcaaggatattgatagaccaatatggcggggaagttccaagagaaatggatgagatgctaaagcttccaggtgtagggagaaaaacagctaattgtgtgattgtttttgcattccaggatgcagctattcctgttgatactcatgttcatagaatatccaacaggtggggaattgctgatacaaaggatccagaggaaaccgaacaggttttaatggaaaaggttccaaaggacttatgggttgacttgaatgatttgatggttcagtttggtcagactatctgcaggcctattggccctcaatgtgataaatgtcctattagtgatctttgtgactatgatgtgagtaaattagaatag

SEQ ID NO: 1575 - DNA, 1368 bp, Methanobrevibacter ruminantium
  source 1..1368: mol_type = genomic DNA
atgaatcttaaaataaaaaacttttctaaaatcaatggaactgttaaagcgccatcctctaaaagctatagtcatagggcagttattcttgcctctttatctgaaggcaaatccaagctctttgatgtattgtactctgaagatgtcctatcaaccattagggcatgtgaagcccttggggcaaggatagataaaaagaaagaaatcatcttaaagggagataaaagtcagacagttgactatttggaagtttatggaactgggggtaaattgcataatgttagtgacgacccttcttctgacatgattgatcttgcaaactctggaaccacacttagaatcatgacaagcgtagcagccttatctgacaatgaagtgatatttacaggtgacgattcacttaagacaaggcctatgggtgcattgattgatgcattggagactttaggtgttaagatagagtcattgaatgaaaacaataaggctcctcttaagatttatccaggatatgaaggaggacagacagacattttgggaagcatcagctctcaatttatctcttccattcttatttctgctcctttatctgagaatggtgtggagcttgaggtttatcctgaatttgtatcaaagccttatgttgacatgaccatttccattttggaaaaattcggaatatccgttgaagaggaagagtatcaattccatgaaacctgcaagaaagaacatactgattgtttgggggttaaattcattgtaaagcctcaaaaatacattgcaagtgattatattgttgaaggagatttctcatctgcatcttatttgcttgcagcaacagctattgcaggtggatatataagagttcaaaacttattcgctgattccaagcagggagataagttaattctggatattttagaggaaatgggtgcaaatgtcactgtttttgatgattatgtttctttaaggtctgatggaaacttaaagggaattgatgtaaacctatcaaatgctccagacttactccttactgtagcggttcttggagcacttgcagaaggaaaaacaaccatatctggagtaaagcatggcagattaaaggaaaccgataggatagatactacatgcagggaacttgaaaaattaggatgcaaacttgaggaatttgaagatggaatgactatctacggaaatacaatttcagatggaattgtagagtctcatggagaccatagattggctatggcattttcattgattggattgaaacatgatgttgaagtggaaaatggcgaatgctttgatgtttcattccctaattttatagaggctatggcagagattggaatagatttggagcttaaataa

SEQ ID NO: 1576 - DNA, 1620 bp, Methanobrevibacter ruminantium
  source 1..1620: mol_type = genomic DNA
atgcaaagaaagacattatcacgttttgatgaaattgtaaaaattcttaggaaatatgatatggataaggttttaggccaaaccacccgtaataggataagcccatttagaagtggatcagaaaataaagaattattaaaggaagactttccagaaagattaagattgacattgcaagagcttggaaccacatttatcaaatttggccaattgttaagcacaaggcctgatttggttggagagagaatcagcgaagaactttcacagctccatgatgataatcctcctattgactttgaggaaattaaggtaattatcgaagaggatcttggaggaaatctaaaagatttttttacagagttttccgatacagcccttgctacagcttcaatcgctcaagtccatgaggctaaactgcatagtggcgaaagggtagcggttaaggtacaaaaaaccaatgttcaagaaatcgttgaaactgacttgaatataatgaaattccttgctaatgaatcagacagattcaataccacctttaagcatcttaatcttcccgctgtcgttaaggaatttgacaggtccattcataaggaaatggattttgacaatgaactgatgaacatcagacatttaagagacaatttcattcataatgataagatcattgttccaactatttatccagactattcctctgaaagagtcttgactatggaatatgttgatggggtcaaattatctgaagttattgcaggggatgatccaaaatataataagatactcattgcagataggatggttcgtgcttattttaaacaaattttccttgacggatttttccatgcagaccctcatcctggaaatattttcattacagatgacaattccatatgtttcattgattttggaatgatgggagttcttgatgaaaacttcagacaagatttggctgaattgatgatttgtttctcaaatcgtgacattgatgggctaatcaatcagttaatttatatgaatattctaaatgttaaaacagacattagcattttaaaaggtgaccttaacgacttatttgcaaagtattatggggtagagctcagtcgttttaatggtgttattgaggatttgctctttttaatgcaaaaatatgatgtgatgttgccaaatgagtttgttctaatggcaagaggattgtcaatggttgaaaatattggtttgagtttagatccagatattgatattgtagaaatcattaagccatttgcccgcaagcttatgattcaaaagtataatcctaagaaaatggttcataatgctaggaacacctttttcactgttgagcatatgctaagagcattgccaagccttgtttcaaaaaccttctataaggttgatgaaggggagctgactataaatattgaagtcaagcagataagtgagataactaaccagatttcccttgctatcattattgctgctcttgttataggttcttcattggcaatgatggttgaggcagggccaaagctctttggactgcctttgcttggttttgtaggatttacaataagtttggcgcttggagtctttactgttgttaggtattttatggatttttaa

SEQ ID NO: 1577 - DNA, 411 bp, Methanobrevibacter ruminantium
  source 1..411: mol_type = genomic DNA
atgagtcttgataggtttatagaagcacaaaaagaagattatgacatggcttttagagaaatcaacaatggtagaaagagaaatcactatatgtggtatatatttcctcaaatcaaaggcttaggccatagttccacttccagatattatggaattgacggtcttgaagaagcaaaggaatatatggaaaatgagtatttaagcaataatctaataaaaatttctcaaaaattattggatttggagactgatgaccctatagagatatttgggtctactgacagcaagaagctaaagagttccatgactttatttgaattggttagtgataatgaggtcttttctttggttttagaaaagtattttgatggaaatagggatgagaggactttagatttagcaaataaataa

SEQ ID NO: 1578 - DNA, 786 bp, Methanobrevibacter ruminantium
  source 1..786: mol_type = genomic DNA
atgaaaggaatcataggagcaattgccggagacataattggatctactcacgagtttcatccaattaaaactaaagacttttctctttttaataaaaaatctcattttacagacgatactgtcatgactttagcgattgcagattggttaattgaagataagaattcaagagatgtattaattcaaaaattaaagttttatggtcagaaatatcctaatgcaggatatggaagaatgtttatgcagtgggtgctgtcagagaatccattgccttatggaagctggggaaatggctctgccatgagagtatctcctgttgcatgggctggagagagcctggaggaagttcaacaattggctaggctgtcttctgaggttactcataatcatcctgaaggaatcaaaggagctcttgccactgcagatgccatttatttggcaaggataggttcatctaaggaagaaattaaggagcatattgaaataagatatgattatgacttggatagaacagttgatgagataaggccaggctataagtttgatgtttcctgtgcaggatgtgttccagaatcaatcatctgctttttagaggccgatgactttgaagacaccattagaaacactgtttctttaggaggagatgcagatacaatggctgctattgcaggacctattgcagctgcatactgggaagttcctaggaatattgcatataaatcaattcataggttggattataggcttttgaatgttttaattaaatttgaagacaagtttttatag

SEQ ID NO: 1579 - DNA, 729 bp, Methanobrevibacter ruminantium
  source 1..729: mol_type = genomic DNA
atgtctaaaagaatcatttttattttgatgttgattgccttacttggcttatctgctgttgcagcagttgacgctgacccattaactgataatcaacttaatccaactattttttatcttgattttaatcatggcgctttaaatgatggttttaaaaaagaatttgatctctttgagtatgttccaacatttgatagcgtagacctttacaacgatggagaaaatgtctctgtaagcttttatagtttaaatcctaccattgatgtggataacttaaatgatgagattatagattatacatttgaggttatggaagatcctaaagccaatataactacattaaaggatggaataaggaacatatgctctgagtatggtgcagatgatgtcaagattaatgtggattctgtaattggagaggatgaaattccagttatttttacaactgaaggagattccatgcttcctaccataaaaagtggagataaggtcttggtgaataagagtcataatattcacgttggaaaccttgtttcagcaaactcttcagagtatggccctatctgtaaaagggttgctgatatagatggagattcagtttatcttgtcagtgacaataagaaggttactcgcgagtattatgatgattattatgtggaatataagggaatcactacatgggttaatattgatgatattgatggtgtgattattgacattatgaattaa

SEQ ID NO: 1580 - DNA, 222 bp, Methanobrevibacter ruminantium
  source 1..222: mol_type = genomic DNA
atggttgaaattactagcaaaacaaaatatatggatctcttaaatgaatatcctttgcttaaaacagatttggttaagaaaaatcctaagtttggatttttggtaactccaatgggtaaaattagcttatgggaatctgacctttccgaagtcagtgaacgtgctgaaatgactgttgaagatactgtaaatttatttattgaattagtaaactcttattaa

SEQ ID NO: 1581 - DNA, 1059 bp, Methanobrevibacter ruminantium
  source 1..1059: mol_type = genomic DNA
atgaagcatagattaaatttagataataaagacccaaattatattttgttgaaagaaatatttaaaattatggattctagaaaatccaaaagtatattagcatcctatggatttaaaaacttaaatagaacaatatttacttttaaaattatatttataagtatgttctttggaattgacattccattcattttaaacgagcttaaatccaaaaaagaacttcgcaaatactttaatatttctgaagttttgactgcagatcaagtttataaaattttttcagaaataaactctgaaaaacttataaaatgtttaaacagaatcttaaactcaaggaatatggttaaaagaataggaaaaaagacttttattgttgatgcgaccccagtggacgtagatattaatttccacagaaataaaaagactaaagaacatctggaaaaaattaatctcaaatggagttattcatcctctaaaggttattatattggatttaaagcaactgttgtattagattatgattctatgaatcctgtttgtattttagtccactctggagctccaaacgatgcaaaacttttcgaagaaattttagaaaaccttcaaaaaagacgaataatcagaaaaggagacacattaatctttgataaaggatattacacctataaaaactaccaaatcggaatcagcaaatacaaaatcattcctttcatttttccaaaagaaaaattcagcagaacccgattggatgacattttaacttatccactagccgtatttaacaaaacaaagagaataatgaaagaaaaaagattatacaacagtttaaaaatggaattaatgaaaaaaatagattcatgggaaaaatttaaaccaataaggggcaaaatagaagattttttcaaattattaaaacaaggcttgaatatgagagaaatccacaaatatactccaaaatcagtagaaaaaaccgtttatctaaatgtatttttgggagcactgattatatcacaaggattttactcaaaaacgaccatacaacaattatctgaaaactaa

SEQ ID NO: 1582 - DNA, 2820 bp, Methanobrevibacter ruminantium
  source 1..2820: mol_type = genomic DNA
atgaatgcatttttaactttaattatttttattattcattttatttggaggaatattttgacaaataaagaaattcctaaagattatgaccataagagcgaagaaaaatggcagaaaaaatgggaaggagatgagatttacaaattcataggtgatggcacaagaccaagatacattatagacaccccgccgccttatccaactggacttcttcatatgggccacatcttaaattgggcttatatggatttcaatgcaagatacagaagagaaaaaggcatggatgttttattcccgcaaggttgggactgtcatggtcttccaactgaggttaaagtggaagagacacataatatcaagaaaaatgatgttacaagggcagaatttagggacatgtgtactgaattgacctcacataacattgagcttatgagaggacagatgcgctcagtaggtttctcacaagactggagcagggaatacattaccatgactccagagtacagaaaaagaacccaattgtcctttttaaagatgtatgatcagggattgatctatcagggaattcaccctgtaaactggtgtcctagatgtgagacagctatcgcttttgctgaggtggaatacagcgaaaacaccaccttcctaaactatgtcaatttcccgccagcagacgttccagaggaagtattggctaatgttgaaggcaattcatatgtaagatatgcagattgtccagacaatgctgatgcaagcgtaccaggtgtattgattgcaaccacccgtcctgagcttatgtctgcttgtgtggctgtagtggttcaccctgatgatgaaaggtacaaccaattgctcggaaaatatgtggaagttcctttatctggccaaaaagttaaaatcattgcagatgaagaggtagatatggaatacggtaccggtgcggtaatgatctgtacatttggggataagactgacgtcgcttgggtaaataaatatgatttggatgtcattgaagcaatctctgaacaaggtatcttaactgctgctgcaggcagatacgaaggaatggaacttcaggatgcaaagaaacagaccatcgaagacttaaaatctgaaggataccttacaaagcaagaggaagtggaccagaatgtaggccaatgctggagatgcaagacccctattgagattcttgtcaaaaagcaatggtttgttggcgtaaccaaattgattgaagaaagcaaaaaggcttcaaatgaaatgcgttgggttccagaacatatggaaagccgtttattaaactgggcagatgctatggaatgggattggtgtatttcaaggcaaaggttatttgcaacccctattcctgtctggtattgtaaggactgtggaaaggttatacttccaaaagaggagcaattgccaattgatcctacaatagacaagccacttgaaccttgccagtgcggatgcaacgaattcatccctgaggaagacgtattggatacatggatggacagttccatatctccattatctgttgctgactggccaaatcctggctgggaagagattttcccatcaagcattcgtccgcaaggacacgatatcatcagaacttgggcattctacacaacccttagatgcttggccctcactggccagaagccatttgatgacattgtaatcaatggtatggtattcggtgaagacggatataagatgagcaaatcccgtggaaatgtaacaggtcctgaagaggtaattgctgaatatggtgcagatcctttaagattatgggctgcaaacagtgttccaggctctgacgttgcatttgactggaaaaacatcaagcatggatacaagttcatcagaaaattctggaatgcattcagattcatcagcatgcacatctttgatgaagagtctgaaaaggccttaagcggagacatcgaatcaatcaaagcaaagctaaacccaatggacacatggatttttgcaaaattgaacaaggtaaataagatagttgatacagcattctatgactataactatgctactgcaataaatacaatcgaacagttcatttggcatgatttctgtgatgaatacattgaagctgtaaagtacagattatacaatgatgacattagtgaagagtcaaggattgcagcaaaatacactctcagaactgtaattgaagattcattaaaacttcttgctccaattgctccattctttgcagaagaggtttatcaatactttgatgaggataaaagcattcacagcactctctggccagagattgaccctaacttagactccactcaagtggaagaagacggtgatttggctattgaactaattggagaggttagaagattcaagtctgcttccaaaatcccattgaatgcagatgttgaaagcactactgtctacatcaatgagaaaacagagaaccttaaggatgtatttgaatactttgcagacgacattaaaggcactttaaagattcaagactttaaggtcacctcaggtaagcctgaagttcatgaaaaggttattgaaattgagccagacatgagtaagataggccctacctttaagaagaatgcaggtcaggtcattggattcattaaatcaaccgatccgaatgagatagctaaacagctagaggaagatggcgagatagctattgcagacggcgtcatcactgaagatttcttaaagatgaaaaaggaaattgtaggtgcaagcggtaagaaggttgacattttgcaatctgaaaaacttggcgtaattgtagaagtagttagataa

SEQ ID NO: 1583 - DNA, 357 bp, Methanobrevibacter ruminantium
  source 1..357: mol_type = genomic DNA
atgcacttattatggttttatgtagctatcgtacttgccataagtgatgaaatccatagcagaatagtatggggctatgtcagagacttttacatagtttttggcggaatcataagcagttctctagattctgtaatggaaacttggattgtccatgaaggattagaagcattattccatatgatattcgtatcaatagtcttcttttcattaaaaataggatttttagcggctttaatccatttcctattagatgtaagtcattcaatcgtcataagacatatgccatggttacctcatagagcattgcactttgttattgaatgtttattctttatagccgtatttggattatag

SEQ ID NO: 1584 - DNA, 1656 bp, Methanobrevibacter ruminantium
  source 1..1656: mol_type = genomic DNA
atgcctgttattacatttaaatatcaagatttaaaagatttaggtattgatatggaaaaagacgaacttatcaatactttgccaatgatggcaagcgatatagaggattacgatgatgaggaaataaaagtggaattcttcccaaatcgtccggacaacctttctgttgaaggggttgcaagatcatttaaaggttttttaggattggaaactggaataccaaaatatgaaatagttccatcaggtgaaaaagtcacagtaagtccggaagttgcagaaatacgtccatttatcaagtttgcaaagattgaaaatgtggacttctctggagataagatcaaatacatcatggactttcaggaaaaccttcactgggtaatcggaagggacagaaagaaagtagctatcggagttcacaatgcagatgtcattagcggaccatacaaatacatagcaactccaaaagacgaaaatgcctttgttgcccttgaaatggaagaggaaatgactccaggagaaatattgacccaacataagaaaggggaaaagtatgctcacttgattgataagtttgacaaataccctcttattctcgataaggacaatcaagtattatcaatgcctccaatcatcaatggagaacttacaaagctcacagaagacactaaaaacatcattgtggatgttactggaactgatgaaattgcagttacacaggctttagatattttatgcgcatcattcgctgaagtgggaggccaagtcaaatccatggaagtggaatatgaagatagaaccgtcataagccctgactttactccaaaagtcaagacagttcatgttgacttgacaaacgagcttatcggaggaactgacttaagccctgaagatattaagaagctccttgaaaaggctagatttgatgctaatatccttaatgagaatgaattggaagtattcatcccaccgtacagagtggatatcctccatgaagtggacattgtagaaaacattacaatccaatatcatatcaatgcagttgaagccaaattgcctgatataaccactgtagcaaatgaacataattggtttaaatctgaaaagacaatcagagagcttatggtaggacttggattccaggaaatcatgagcctaatgcttaccagcgaagaaagccaatatgaaaaaatgaatgctgaggaaatcgaccatgttcaagtctcaaagccaataacaatcagcggaacaatgattagaacaagtcttttaaatagcctaatggaatttttagaagacaacaagcatcaggaccttcctcaaaagatatttgaaataggagatgtcctatatatggatgagtcaaaagaaaacaagacaaaatccgcgaaaaaactagctggaatgatttgtcatagctctgcaaactttacagaaataaaatcaactgtttcaagcgtgctttccaatttaggatacactatggaaatatccaactcaacaaatggtagttttattccaggaagagcagctgatgtgattggtgaatctaaaagtggtaaagtggttggattctttggagaaatctctccagaggttattcgtaactttgaattagagtatccagttactgcatttgaaatagagttcaaactttaa

SEQ ID NO: 1585 - DNA, 699 bp, Methanobrevibacter ruminantium
  source 1..699: mol_type = genomic DNA
atggctcaagtctttaattatcattgcagatcttgtgatttttattttacaattcataactatcgattttgctttgatgataaaatggattgcattgaagagtatatggctttattcactgattctgattatggtaatgattccttaatcaaaggtcgtgtaattgaaaagtactgttcaagttgccagaagactgtaagaatctatcagttcactcctgactctagcatttacactacagacgcttcttttgactttttaaaattctatattcctaaaaagcatgattttcttttagaatccattgattttcataaggaattgattgaattaatagagaataatgagaatttgaaaaagattagttcttttatagaggataatcatgtttataatatttatgaattaaatttaaatcattatttgaatactaaaaggtccggattcaattcaaatcaattgataaaggatattgggctttatttagatgccattaatgataatctagatagatttgatgattttattatttgcatgaattcgactgaggataattataatttggatttggagggaaagatgtttgatatggatgtctgtcctgagtgcggagaggagttttatccaatcagtctaaagaatccttgtcctatctgtggtaaaaatacgatggaaaggtctagagaaatgattgattaa

SEQ ID NO: 1586 - DNA, 1668 bp, Methanobrevibacter ruminantium
  source 1..1668: mol_type = genomic DNA
atgcttttaaatgataaatctgaactattaaaatcattatctattttatttttgctaatagttctaattacaagttttaattcagtttatgcaaattcagataattttgatagtgctaaaagttcagatttaattttcagtgattctaataatgtttatatagaaaatattgattgttcggattctattttaattaatgtctattctaataaaaaggattctaatttaggttcctattttgtaggttctagttcagattcctatttaaaggattctaattcagattctgcatttgtagtttctaattcagaagattcctatttggaagactctaatttgaaccattctaagaattatctctctagccaatcattatcagcttctagcaagtcaaaggttattttgaccacaagcaatctaagtgctagctataagacaaagaatttcacagctaaactcactgatttaaacaaaaatccaattgcaggtgcaaaactgtcatttgtcattttatcaaagacatattacagaacaacagataaggatggcctagctagtctaatgattaatctggctccggggaaatataatatcagcactaaatttgaaggagatagcaattattcatctgctgtggttaaaaactccattacaatcagcaaaaagaagctttcaatatcaagctctgacttgtcaaagaaatatggggattcaaatagctttcaagtaaagataactgataacggcaatcctatttctgatataaaggtggctttaaagctttcagcaaagacatattataggacaagcgataagaatggcttagtgagcctgccaataaatcttataattggaaaatatattataaactcatctgtatatgataataagttttattatagcaatacaaattccaataatattattgtaagctctcaaaatccttataatctctctgtcttaaaatggggaacaaagggaaacattaaaaagaattctgttcttatgaataatattccaaaatcaagcttaaccaatgctataatctctgcttgtaataatggaactcctttaattcaatttggtaatggcagcggcaagaaggtatttattaatgcgggagttcatggacatgagctttcctctcaagcggcagcatttaaactcatcaataatatttataattcaaagaaaaagataaatggtactgtctatatagtgcctgtcttatgccctaagatgactgaacagaatgcaagatatttcaataatgtaaatttaaacagtgttgcaaataagaatggaacagtttcaaacaaactggttaatcttgctttgtctttaaaggtggatgttctcggcgatttccattgtacaaggccaaatggagatccaggtaaaaatgttgctatgggaacctcttctccaatggcatcaagtgcaactcttgctaaatatatttccaagacaacaggatattcctctttgatttataaaaaggcaggtgaagagtatcctggagctgttgaggacgtttgtaatttaaaaggaataacttcagtgacttgtgaggctctcactcctcatggtaagatagcaagtggcagtgttggaaagtcttataatatgatgatagcccttttaaagtattatgggattacaatttaa

SEQ ID NO: 1587 - DNA, 429 bp, Methanobrevibacter ruminantium
  source 1..429: mol_type = genomic DNA
atgataataaataaatctttaaaaattaattctaactctaattttcaaataattgacatcacaaatgagattagtagaatccttgatgaaataaagtttaatgaacctaattcgatttccaatggcattttaacaattttcactaaacattccacaagtgccattgttgtaaatgagaatgaaagaggactcttatctgattttgagtttattttagatgaattagtcgccgataagaataattatgctcatgatcggattgacaacaatgcctcttctcatcttaagtcatttttgctcggttcatctgagacaattccgattgtagatgggaaaatcgatttgggaacttggcaatctatcttttttgttgaattggatggtcctagaagaaataggactattgatttggtttttattggtgaataa

SEQ ID NO: 1588 - DNA, 123 bp, Methanobrevibacter ruminantium
  source 1..123: mol_type = genomic DNA
atgattacttgtaatgtttgtggccatttaaatcctccatctgctctagtctgtgaaaactgcggttctgatttgtcagacagcccagacttaggcggcggatttgatgatgacgaccggtaa

SEQ ID NO: 1589 - DNA, 519 bp, Methanobrevibacter ruminantium
  source 1..519: mol_type = genomic DNA
atgagtgaaaatcaggaagatgaaacacgaaaaaccaataattatgaatttgacaactctggatttaaggctaaggattatgatgatgcagaggagtttgaaatttgggacttggagcaaatctttaaggacagagtaaaaatattgcaggatttaaacaatgaattttgggaagcctatgaaggatccaaaacagaggcctctggcagaagaaaagacaaaaaagaaagattggaaccattaagcgtaagggtaaagccacataccaaaaggttcctaaaggaagactctatactttcagcaagggaaatcctagaaatttatgaggaattttataatggtcgtgatgattatatcaaatccttaaaaagggatgaaattcaattaaaggaagaattgtctgaaattgaagaaaaattaaagaacgctcaggaattcactgaaaaattaaatgaaatcaagattcaaaaggatcaagaaaaagaaagagctaaaaagattaagattaatattgaatag

SEQ ID NO: 1590 - DNA, 144 bp, Methanobrevibacter ruminantium
  source 1..144: mol_type = genomic DNA
atgtatagatatgagaatgatagattggcatctcatgaaatagaccccactactccttcaaagtatgtatattggaatgctaaaagacttcttgaggtcttaaaggaagtggaagctactaaaaagcaaaatcaagataaataa

SEQ ID NO: 1591 - DNA, 633 bp, Methanobrevibacter ruminantium
  source 1..633: mol_type = genomic DNA
atgtcagacaaagtaaaagcagaagaagtaaaaagtgaagaaactcaagtaaaagatgtagatttagtctttttacttgataaaagtggatccatgtatggtgtggttagagacactatcggaggattcaattcatttattgaaagagaaagagagaaaaatccgaacactcatgtgactcttgtgctttttgacactgaatataatgtattatacactagaaagccaattgctgaagtggaagaactcactaaaaatgaatactatgcagatggatgcactgcacttttagatgcaattggaacaactatcaatcgccttgataggcaagtcaacaatgatgttttatttgtaattacaactgatggattggaaaactcttcaagggaattttcaaagtccgacattaaaaacatgattgctaatcataactgggagttcttattcatcggtgcagatattgactcttatggagaggcattaactcttggaattgacgaatcccatgcagctaattatgaaaaaacttctgcaggattaggtgctttgtttgattctgttggagatgctcacgaggaaatcagtcgtggaggatctttagatgacatgagttggaaaagaagattaggttaa

SEQ ID NO: 1592 - DNA, 1614 bp, Methanobrevibacter ruminantium
  source 1..1614: mol_type = genomic DNA
atgactttggattatcaactatctgaaatcaaagaattggaaaatcaagaggaattaataagcatcattcaaaatcctaatttagatgatttaaggcgcagtgctgctgcttctaattataacttaaataataaggattttttaaaagaactggcttcaaacattaatttaaactataagatacgtcgtggtgccataaaaaatcttaatttagatgatcaatcattatttattgatattggcttaaatgatgagaatattcaaattcgccgtgcagccattaaaagaatcaccgatcaggatactctcacaattatcgctcgagaaagccttgattttgcctctcgcttgattgcagtggaaaagatttcagatattgctgtaagattggatattgcagtaaaggattcaaatgatttggtttcatttaaggcagttgatttatatccttttttaagcactttaaactctttattttacaactttaattgcagtggacgctatgttgataatgcattaaaattaattgactttattgacttgtgtctatctaaagattttaataaggaaagccatgatgctttaaataaatttaaagattatttaaatgatttaattaatattaagctttcagacttaaaggaagttccatatcatttagaaaaatcattctctcgtcgcgtattaactaatatggccatattgacatgggatttggcctttgccataattgattatacagaagatgattatgaactgttaaagatattcaatgttcaaaatgatataagaattcgcctagctgctcttaaaaagataaaatccgagcattttttaattgatattgtttcaaatttccgaacaggacactctttatatgacgataccctaggtagtttgcaaaggagattttcttacgatcttgatgaatgcctgtcaatccataagttcactcaagaagagcttattgatttggcagtatattccggatttaaaaagacccgtagaatagtggttaagtatataggggatatggaattattggaatactgggctttaaacgattcatatactggatttcgaagggaaattgtaagtttgccaaactttaataataaggagcttttatctaagctggtttttgaagatgattgtgacagagttcgcttatatgcagttcgaaaaataaatgaccaggaaattttatctaaattagctgtagatgattcctattgggctgtaagagaggaggcggtttctaaaattagagacgaatccattttaatagatcgagctttaaacgatccaaacgttatgattatcatagccgctttaaagaatcctaatctcaatgatagacaaaccataaataagataggcagttatccaaacttttgggttactaaaatcattgcagagcatcctcttacagatgatgagactttaattgacattgcactcaataatccatggaactatcctcgtgaaaaggcaatagagcgcatttatgataaagatgttttaaaatatattgcagaaaacgataaagacccttggatatctcttatctcagaatccagattaagaaaattggatgaaaatgaaaatgtgtga

SEQ ID NO: 1593 - DNA, 306 bp, Methanobrevibacter ruminantium
  source 1..306: mol_type = genomic DNA
atgacaaatcaagtaatcgaagatatggctgaagtatgtcatgatgaatgggtaaaatggagcaagaacatttctgaggaattggctcttgcaattgatgtattgaaaaaggacattgagtttgctcacgaaaagggcgttgaaaataaggaagctattgaactggttgaaaaatttgaatcccgtcttgaacgatggggtgctttatggattccatatgaggatttaactgaagaaatgaaggactctgatagaaaatatgcaattaagatgtttgacattgctgaggaagctttaaaagaataa

SEQ ID NO: 1594 - DNA, 240 bp, Methanobrevibacter ruminantium
  source 1..240: mol_type = genomic DNA
atgatagtggagaaagtttctaaaaatgaccagtgggaagattacttcataaaaagcaaatcatccaataaggaatacattatcactatagatcttttagaaggcactgtaagctgtgactgtgaagactttaagtatagaaaggaaaacttaaggtttggaggagtccgtctaagtgataaggccaatcactgcaagcacataaaaaagatcttagagattagggacgatttggactag

SEQ ID NO: 1595 - DNA, 891 bp, Methanobrevibacter ruminantium
  source 1..891: mol_type = genomic DNA
atgaaaaagatatatcttattttcccaatccttgctggaataatgtttggatctacaggaatattcgttagaacattgactgaaaacggaatagattctacaacattgcttttcttgcgtttttcaattgcaataatttatatgctaattgcaattgtcttaactgataaaagcctaataaaagtgtctaaggaagatattccactatttctaatatgtggattatgcatacttggattaaacctatgctataataattcaataaatacggtgccactgtcccttgctgcagttctcttaagcactgcccctgtatttgtagtgatatttgcatatttcatattcaatgagaagattagctccgctaaagtaatttccataattctagtgattatcggatgcatattgacaaccggactacttgaagagagcatgattccgattacaagcattggactgattagcggaatcggatctgcaatattttgggcaatctatacaatagcctctcgaaaatcaatcgataggggaaagcatacatttacaatattattctattcattgattataattacaatcgttacaataccgtttacaaactttggacaaatcgaaagctttgttttggcaaatccggccaataatataatctttttattattgcattcattgatttcatttgctctgccgtatattcttattacaatatccttaaaccatttggatgcaggaactgtggtgattctatcctctggagagcctgtagctgccctcgtctttggtgcaatagtttataatgagattccaagcccattgatgttttgtggaataattataacaattattgcattgataagcttgagtagaaaaatagagatgaaaagtgaataa

SEQ ID NO: 1596 - DNA, 513 bp, Methanobrevibacter ruminantium
  source 1..513: mol_type = genomic DNA
atgaacaataaatactttttaggaataattataataataattgcagttttagcagtgatatttgctttttcactagattatcaaacaaattatttgaatggaagttccaatggatctgtaaatactaatgaaaatagttcatttaatcaatcaaataatggtcttcaaacaaatgtccaattgacaatatctgccgaacagtcattcccaatggaaaaaatagctgaggaaattaaaacacaccctgcttatgaaggctacgatgaagatacactaaaatggctagaaacctttaatggaagcattatgtttacatcaaaggattattttgtagttatggataaaaatgatgcagaaaatctacctacaagctttgttaatgatgcatttatttatgatgacttcacatgcgatataattgaaaaacgttccttaggaaaggatttaaaagatataatatatgttaaaaatgttaaatttgaaaatcaaaggatagtgcctatgattttttaa

SEQ ID NO: 1597 - DNA, 216 bp, Methanobrevibacter ruminantium
  source 1..216: mol_type = genomic DNA
atgtttgaaaaacaaggatttatagaaaggagaatctttaaaaataaagaatcttttatgtataaggggttcttttcgcataaagaagattttattaataaaggagattttatagaaaaggaaaagagtttaaaaaagcaaaattttataaaaggcaaatatgcaaacttgatttttaaaatggatgatgattgtattattttaaaaggaggctaa

SEQ ID NO: 1598 - DNA, 1032 bp, Methanobrevibacter ruminantium
  source 1..1032: mol_type = genomic DNA
atgaaaaccactttagataataaaagcgttaaaaacaattcaagaaacagcaaaaatgtaaggagcaacttaagagacaacagaagcatgagaaccaatttaagagctagcagaaacatgaaaactggcttaggggatgttaacatccaaagcaatgatgaagctactaaaaaatgtccctcttgcggatctgttgatttcgaaatcgactacgctcgttctgaggtctcttgtaagtcttgcggtttggttcttgaagaaaacatcattgattttagccctagcggaaccgcaataaacagggacggtcaaaatctcactcaaaacggagcaccatgcagtattactaaacacgataaaggtttagctactgattttaaattagaaaaccttaaacatgacagggctcgttgggcacgtattagaagattacaaaaacaatctagagtcagcggcagtcgtgaaagaaatttagcaagggcattcagtgaattgtccttattaatttccaatctgtcccttcctagagacgttaataaagaagcggcttcaatctacagaagagctcttgaaaaggatttggtaagaggcagaagcattagcttattaatctctgcttctttatacgctgcatgcagagtatgcagagttccacgtaccttcgatgaaatcgctgaagtttcaactggcagcaaaaaatccatagctaaaaactacaggtttttaaatagagaattggctttaaaaataaggcctgcatctccagttgattacattcctagatttgcctctatgttagagttatctagcccagtagtggttaaatctattgaaataattaatgagcttaatgaaaagggattaattgcaggtaaaacccctgctggtgtagctgcagctgctttatactactcttctcgcgtgcttggagaacgcagaactcaaaaggagattgctagcgttgtaggtgtaactgaggtaacaatcaggacccgatataaggaaatgactaaaggattaaatttaaattaa

SEQ ID NO: 1599 - DNA, 285 bp, Methanobrevibacter ruminantium
  source 1..285: mol_type = genomic DNA
atgagtcaagcaagaaatttagaaaaggatgtatccagtagtaaagcttattttaaaggtgaaaatgagttaagtattaacagtaatattaatgaaaccaagttcaatgaaatgactgatagcgattctaatttctttggaacgcggttcattctgaatctaagtcttatattaaagttaatattgaaaaaacaaatgaaggtgatatcgcaaatagaaataatctcaaacaatcaaaagacgtcaaaacagtttcaatacaaaatcatacaaaaaacattatag

SEQ ID NO: 1600 - DNA, 528 bp, Methanobrevibacter ruminantium
  source 1..528: mol_type = genomic DNA
gtgactattttagatggtattttagaagataataagaaatttgtagaaagctttgaaggagaagaaatgtctcaccatgcacagaaaaaattagctattttaacttgtatggactgcagattgattgactttttcgaacctgctttaggacttgaaagaggagatgcaaagattgtaagaaatgctggaaactccattgtaggagaagacgcaatcagatccattggcgcagcattatacaatttaggcgctgaagaagtattggttgtcggccacactgaatgtggtatggcaggtgctgacgctgaagcattaaaggaaaaaatgcttgcaagaggcatcaaagaagaagacatcgccaaatacgatatcgctgaatggattggtggatttgacgatgaggaagaaaacgtcctcaatgttgtagaaaagattaaaaaccacccattaattcctgaagttccagtgcatggtcttataattgatattgtaactggtgaattaaaagtattaaaagaagattattag

SEQ ID NO: 1601 - DNA, 837 bp, Methanobrevibacter ruminantium
  source 1..837: mol_type = genomic DNA
atggcgaataatggacatggacatcatggagctgcaaatttaactccagaacaacagaaaaagatgatagagcaagagatgaagctctttgaacatatgaaaaacatcaaatacaaaattgctgttatgagcggtaaaggcggtgtaggaaaatctacagtagctgctaatctagctgaggcattccagaaaaaaggattgctgacaggtattcttgacgctgacattcacggacctaatattcctaaaatgttggatgtcgaaggagaggatgtaatcatctcaaatggggaaatgattcctgtcatgagcagaaacgggatcaaggtaatgtctatgggatttttaattgactctcaagacactcctatcatttggagagggcctcaaaagtcaggttccattaagcagtttatggcagataccgcttggggagatcttgatgttctcatcatagacaaccctcctggaactggagacgagccattgacagtgcttcagtccttgcctgaagtcgatgcagtaattatggtcacaacacctaacagcctatcccatgaggatgttttaaaatgtgtgggaatggttaagatgctccatattgataagattgggcttattgagaatatgtcttattatgtatgtcctcactgtggtgaaaagactaatatatttggtgaaagccaaggggaggactttgcaaatgagatgggagttaaatatttaggaaaccttccactaactgagcaagttccagaatctgccaataaggacagcactatggtaaatgcctatgcagagtctgaagttgccactaagttttttagaaatgattga

SEQ ID NO: 1602 - DNA, 2997 bp, Methanobrevibacter ruminantium
  source 1..2997: mol_type = genomic DNA
ttgcttttagttctaatggctttgcttattcttgcaatgtcatgtgtgtctgcaagcaatgcaagtgataatttggatgatttaaccatttcagacagtaattcactagatcttgtatctacatcaaattcagatattttatcttctgatagtggtgttagttctgatgatagttcaaatgatgcttctggtgatgttcttggttctgatgtatcaagcaatgaatcaaataatcagtctcaatctactttggattctaataatcaatctcaatctggtttagattctgataattcaacattattagattcacagtcaaataatcaatccaattcagaatcaagtgattcctctgatagttcagaaactgtcatcaaaaatgcaaccagcatatcagtttcttctaaaactgttgttagaggaaattctctcaatattactttaaaggataatgctagcaccttattatctaataagacagtcacatttaccttcaatggtaaaacttataataaaaccacaaatgctaaaggaattgctagcttaactcttacagcgactcctaaaaagtacttggtgaaaattgcctttgttggtgatgagctttatgaggcctcttcaaaatcagtgaatgtcactctaagcaagactccaaccagcatttcaaactcaggcaagtcaatagtcaggggcaaattatataagcttacattaaaggatgctaaaggaaaggccttatccggcaagaaaatcagcattagctttaatggaaagaaatataccaagactacaaattcaaatggccaagtcaacctaaccataaatgtaaatgtaggtaaaacttataaaatgacctataagtttgcaggagattccaattatctctcaagttcaggctctgtaagcattaaggtcaagatgggcacttccataatcggttccggatcaagcatcgtcaagggaaagtcctatacagtcaccctaaagaatgccaatggtgctgttttgtctaatcaaaagatagcctttactttaagcggcaagacttacaacagaactacaaatgcaaaaggtcaagcaagcctaaagataggtttaagctctggaaagacctataatttgacttataagtatgccggcaattcatattatggaggatcttccggcaaggtttccctctttgtcaagactccaaccactatgaagaactctggcaagaccattgtgagcggagagacttataaggtcactttaaaggatgctgatggaaaatctttggctaataagaaagtttccataactttcaataataagacctatgccaaaacaaccaattccaacggtcaagccagcttaacaatcaaagggacctttggaaggtcatatcctttaagctataagtttgcaggagacagcaaatacggacctagctccggttcattatgtcttagggtcaagaaggcaacaagccttaagggttccgcatctagcattgttcaaggaaaatcctatactgtaactttgaaggattccaatagcactcctttagctaatcagactatcgtattcactttagatactaagaaatataacagaactacaaatgctaaaggtcaagcaagcctaaaaatcggattggctgcaggaaagacttataatttggcttataagtactcaggtacttcatattataatggctcttcaggatctgtaaaattaaaagtcaagttcccaacaagtcttacaaactctggtaagtctgtaatgaatggaactggctataatattgtcttgaaggattctaaatccaatttagtctccaataagacaatatcaattggattcaatggaaagacctatgatgaaataactgatgcaaacggaacagtcactctattgattgatgcaaacgttcctaaaacatataagatgacttataagttcgctggagacagcgattatggagcatcctctggaactgtcaatctaactgttaaattcaagaacgccttcaccatctctcagattatatcagcgtcttcaagcttaaagtcatatgtattgaagaataagaaggttccagctacagttagtgtgaatggagtctcccttaacttaacaagctttacatatcttatggctaaggcaacaataagcattaattcaaataagacctctggaagcatattgttagttcctgtagattctaattatacaaataacggcagccgtatcaacgctaatctctataaggcaaattatattgatttggctaaaaaggtaataagctctgctgaggcaaataaactcgttccaaatagcgtttccactaatataggtcttgtttcccatgacctctatagctttggccttgctaaggcattggtcttctttaacagcgatcattacctgccaaactacttgattttaagcagtgacgatgttggcgagaaacattcaactgtaatccctagcaatgcaaggggaaatgcatcccaattcaaggcaggattgaatgaggcagagaccttgactgctgctcagattgcaaaataccttgttgcttcaggccatgatgctacaaactctgaaattaaagcattggcagctaagttggtttcaggaaagacttccctttgggataaggcaaatgcaatatttacttttgcaagagacaacattacctatagttattatgcggattccaaaaaaggcgcagcagggactttgagttcaaagagcggaaactgttgtgatcactccaatttgattgtatccctctgcagagcagctaatataactgcaagattctcacatgcacaaggatgtactttctcaagcggtttggttgcaggtcatgtatgggctcagatatacattgatggtgtttggtacactgcagatgctacaagccgaagaaacagcttgggaaatattgtaaattggaataccaatcattataatactttaaaacagtatgatcacttatctttctag

SEQ ID NO: 1603 - DNA, 2478 bp, Methanobrevibacter ruminantium
  source 1..2478: mol_type = genomic DNA
atgataaatagactaagaaaagactttggaagaataataaaactcataatcttccttatattggaagtaattcttttctttgcaatcacccaaacatttggcgggatcataatccccgacttaaagactgcatttgcaataatcatcgctttatcaatattaaacgccctactttggccaactatcacttacctatccctaagattcatagtcttgaccttaggatttggaacctttttaatagacggagtccttctttatataataagcttattcatacctggagtgtccattaacggaatagcattattttcaattcccctgcttatcggactaatatcctctatgctttcaataatcctaaacattgatgacgactatacctactatcgatacatcttggaaaaggagatgaaggtgatacataggaacatccccaaaaaggagggattcctattcctggaaatagatggattatcttatagaatcataaaagaagccctagacaacggagatatgcctaccctcaaatcatggattgacaaaggcagccacagattgatctcttgggaaaccgatctttcaagccagacaagctcatcccaagcaggaattctccatggaaacaataacaacatacctgcattccgatgggttgaaaaggatcatgaaaacagaatcatctcctcaaacggaaggacagattcgaaattgattgaaaaaagaatatccaatggaaaaggcttattgtcattaaatggagcaagcagaagcaatctgttctcaggagatgccaaggaccatcttttaacattcagcagattcagcgattcagaaagcatcaattcaaacagctggttttatctttattcaactccctatgtaattgcaagaatattggttctcttcatctttgacatgattatggaactgttatcaagagtcaggcatctgttcaagaacattcagcctcgcctcaaatggagaggattgaagtattttgtagcacgtgcaggaaccaatgttgttctaagggaagcaacaacattcacattaatcggagacgtctttgcaggagagcacaatgtaatctatgcaacatatatgggctatgatgagattgcacatcactcagggatagaggactttgactcattctatagcctaaggcaaatcgacaagcaattcaagcatatagaaaatgcgataaacaattcaaatagggactataagataattgtgctctcagatcatggtcaatcaaatggtccaagctttaaacagaagtttgatattagcttaaatgacttgttaagtgaattcctacctgaaaacattacagtacatagtattttgcattcaaatgatgaccacttcagcaaagagttttccataaatcaccttggctcagaaaaccttgaaaaattagataaaagagtggaaaatactaaggaaaagctggatatcaagatagacaatacaaaagaaaaactagaccacagaatagacaacacaaaagaaaaactagaccacagaatagacaacacaaaagaaaaactagaccacagaatagacaacacaaaagaaaaaatagacaccacaaaagaaaaactagaccacagaatagacaacacaaaagaaaaaatagacaccacaaaagaaaaactagaccacagaatagacaatacaaaagaaaggatagattccaacttggactacactaaagaaaagatcaacaccagttttgatggagaattaataaatacatgggataaattaatcaaatttaaaaacaaatcatccaataaggcctttttagacaaattaagaaagaaaagaactttaatcaataacgatgagccaataatagataggataaacaatgtttcagaggacctctctgaggatttggaagttaatatagagctttccaaagagaagataacaagtgacaaggcggctcagacaattgttctatcttcaggaaatcttggattgatttattttacagactggtccaatagaatgagctatgaacagatagaggatgcatttcctggactcatcaatcaacttgcttcacatgatggaataggttttgtaatggttaaatcagatatatatggcacattggttttctccaatgacaatttattttatcttgaaagcgaagagtatgtgggagagaactttttagacaagtttggtaaaaatacagtacaaaaacttaaaagaactgataaattcgctcatgttccggacatacttgtaaacagcgaatacaatatggagacaaatgaggtctatgcatttgaagaattgattggaagccatggaggcattggaggaacacaacaatatccattcatattatgtccaagcaattgggaaagcgaagagatctttggtgctgaaaatgtatataaattctttatgaaagagataaataaatcatggaatcaaagcaagaataaatag

SEQ ID NO: 1604 - DNA, 489 bp, Methanobrevibacter ruminantium
  source 1..489: mol_type = genomic DNA
ttggaaactaaaaagatgtttttggttatattattatttgcatttattgttataggaggatcttattcggtatttgctattgtttcaaatggcggaggcaataattctctctcttgggacaatattacaattgcaggtccttctggaaatgtaagcgatgatggcaataatagtgatgatggtttattaggcatttttaattccggcgattcttcagattcaagttcaagcaattcaaatactggttccagttctagtcagtctagttcttcccctgcgcgtagttcaagttcttctagttctagttctagtcagtctagttcaagtcaatctagttctagtcagtctagttcctctagttcaagttcaagttctagttctagccagtccagttctggttctagctatgattcaggctctggaggcagcgttgttgaatctggcggacattattatgatgtaaactctggtgatgagctcgattggtaa

SEQ ID NO: 1605 - DNA, 507 bp, Methanobrevibacter ruminantium
  source 1..507: mol_type = genomic DNA
atggaaacagaaaatttaattattgtaattcttttagttttaatagctatggccggaattttctgtgcatttttatacacattcggtacaggaggcaatgatttagctcctgttgagccaaatctcacagctaatcaaactaatgttacaaacatgactaatgatactgctaacgctacaacagttgatgctcctttaaataatggggcttatggatccagttccatagacagttctagttctaatggcttgagtggatctaactcttataatggtggctctaacacctataatggcggttcaaatactaataatggcggttctaacaccaataatggtggatcttcctcttctgattctggtaatggcggttctgtcgctcctgattctggtaatggtggttcatcagattctggtaatggtggttctgtcgctcctgattctggtgggggcggttcatccagtggtggttctgaacctgcagccagtggcgaatcttcaaattaa

SEQ ID NO: 1606 - DNA, 1497 bp, Methanobrevibacter ruminantium; identical to SEQ ID NO: 119
  source 1..1497: mol_type = genomic DNA

SEQ ID NO: 1607 - DNA, 612 bp, Methanobrevibacter ruminantium
  source 1..612: mol_type = genomic DNA
atgaaagtattattaattaacggaagccctcataaggaaggatgtacctttacagctttaagcgaaataaaaaaccaattagaaaaggaagatatcgatagtgagattttttggataggaacaaagcctgtaagaggttgcattgcttgtaagaaatgcggacataaggaaggaaaatgtgcctttgatgatgaccctgcaaatgagataatcgataaactaattgaggctgacggggtaattgtcggatctcctgtttattatgcagggcctaacggtgcattatgcgctgtgcttgatagggttttctatgcatcaggtggcagatttgcatttaagcctgcagcatccgttgtaagcggccgcagaggtggagcaagcgctagctttgacagattgaataagtatttcacaatttcaaatatgccaatcatatcctcacagtattggaatatggttcatggaaacactccagaggaagtaagacaagacttggaagggcttcaaacaatgagaaccttggcaaagaatatggcttggatgcttaaatccattgaaaacagtgatttgcctaatcttgaagataaaatagccactaactttgtgagatag

SEQ ID NO: 1608 - DNA, 795 bp, Methanobrevibacter ruminantium
  source 1..795: mol_type = genomic DNA
atgaaagaaagattagataagtatttggtaaacaacaatcttatcgctagcagaacaaaatcaaaggaaatgattaaatccaagaacgttaaggtaaacgataaaattatcaccaaagcaagctatacagtcagagatggagataaggtggaaataatcaacgacgaatccttaagatatgtctccagaggcggattgaagcttgaaggagcgatagattcattcaatctcaactttaatgaaaaatccattatggacattggatcttcaacaggaggatttaccgactgtgggctgcaacatggagcaaagagagtggtggctatagatgtaggaacagacataatgacaaccagccttagggatgatgatagagtcgacttatatgaacaaatgaatttcaaaaatgctccaagttcattatttaaagatatagacattatcgtttcagatgtgtcttttatttcattaaagcacattattgatagaattgcccaagaagatgatgactttgaattggtgtttctcataaaaccgcaattcgagtgtggaaaagaaatagccgaccaatttaagggaataattacagataaggaagtccataaggatgttattttagagataaaagaatattttaaaacaaaaggatattatctaatagatttagatgtgtctaaaataaaaggcaaaagtggaaacattgaatatttaggccattttaaagcaaatgaaaaagttagagaaatagatatagaagaagtaatcgatagggcctttatagatgaagaaaattaa

SEQ ID NO: 1609 - DNA, 393 bp, Methanobrevibacter ruminantium
  source 1..393: mol_type = genomic DNA
atggaattagactcagaacaagttgtaaaaagaatagaagaactcagaaaagattacagttgttcacaagcaacccttatgggaatttgtgaagttggaggcatgcctactgaggaattggcccttcttgcaaaaggattctctggtggtattggcggaaccttctctgaaggaacctgtggtgctgtaaccggtgctgtaatggctttaggatttttaggtgctgatgaaaaacagattatttcagcttctaaaaagttatttaatgaatttaaagataagtatgagtctgtaacttgtggatacatctcaaaagatggtgatgacaagtctccatgtgttgaagtatgtttatttgcaggtgaaaaggtctgtgaatacttaaaagaataa

SEQ ID NO: 1610 - DNA, 2094 bp, Methanobrevibacter ruminantium
  source 1..2094: mol_type = genomic DNA
atgataaagaaggtgacaaatgtgattgatgaaataaccgatttcctatttggcttaaagatgactattatttcagggatatttctcttgattgctgttatttttatgatttttggaatagacactccgatttatctaaatcctgcatggggtacagtaataattagcggaattccaatgcttcttcttgccatgacaagattgattcgcgaaaaatgggtttcctctgctcttcttattgcaatagccatggtggcatcactattgattggcgaaatctttgcagcaggtgaagttgcatggattatggcattaggtgctcttctagaggattggactgtagagcgagctaagaaaggattgagaaatcttatcaatttaactccacagactggaagaagaatcgttggagatagcgaagaagtgatttctgttgatgagataaggattggcgatgtcttaagaatccttcctggtgaaagcgttcccgttgatggtgaaatcataaagggcagttcctctcttgatcaatctatcatgactggggaatcattacctattgataaggaagttggcgatgaagtattttgcggtaccatgaatatgtatggtgccattgacattaaggcaacaagcttaggtgaaaactcctctcttcaaaaattgattgaccttgtaaaggcagctgatgaaaagcaggctccgactcaaaggattgcagacaaatgggccacttggcttgttccagttgcattggccattgcaatcgtagcttggctagttacaggtaatattgaaaggggagtgactgttcttgtagtcttctgtccatgtgcattgatacttgccacacccactgcgattatggcagccattggccaagcgacaaaatatggagtcttaatcaagtctggtgaggcgcttgaaacattaggtgcattgaacactcttgtatttgataagactggtacattaacttatggtaatttagcagtttcagatattatctccttaaaggatgatttagacgaaatggatgtattaaggattgttgcatcttgtgagaaattaagcgaacatccattggctaaagctattgtaaattatgcaaatgaagctaaagttgatattgaagagccagaagactttaagatgtatcctggcaaaggggtatattgtaagaattcctatggccatatatgtgcaggtaactccaaatttttaaatgaaaataatattgattttaatattggttctaaggatgacttggacgttgattccatattaaatcatttaaaacaagaaggaaaggcttcaattatagttgcattaaatggtgagatcatagctttaatcggattgtctgatgtaatgcgtgaggattctaaagccatgattgagagcttgcatgacttaggaaccgaaacagtattgcttacaggagataatactgaaactgcaaattattttgcttcacgtcttggaattggaaaggtatatggcaatctccttcctcaggaaaagcttgattggattgaaaggtttaaggatgaaggcaagaaggtctgcatgattggagatggggtgaatgacgcacctgctcttaagactgccgatgtaagcgtggcaatgggttcagttggaagtgatgttgcaatcgaggcagcagacattgcacttttaggtgatgacattggcaagattccatatcttaagaagctttcaaattcaactttatttacaattaaggcaaatattataatttccatgacaataaatgctgtagctattgtttgctctgttttaggactcttgaatccagtgactggtgccatagtccataatgcaggatcttgtcttgtagtgctcaatgcagcattgctttatgataggaaatttgatgattcaatcaaaagaatcgacactgaaaatgtggagcactcccattatcatttccataatgacggagaacattcccattctcatgaaggcattaggataattgatgaaatcaagacagataatggaataaagcatatgcatattcataagcatgcattaaatcggcagagttgtgaggcttatcacaactag

SEQ ID NO: 1611 - DNA, 822 bp, Methanobrevibacter ruminantium
  source 1..822: mol_type = genomic DNA
atgagttgttataaatactggggaaaaattgaagaaatcgcaaacaaactttcaagctatggtgatttggataatgaaggcctttctgcattggatggtactgatattgatgagattacaaagattttagatgagattgaagtcatagcccacgataaggaaatcgattttgactctgcaaagcacattctagacgatgaaaagatgaacaaggcattgcaattgattcgtaagttctatgtctatataggagcaaggctagagagggaaaatgcattgacaatattggaggccgatgatcctaaggtcgctttggattcattccacttttatgatagatacataggccttatagataatgaaaggcaattagctaatttcaatgaaaacaagacctttgtattcttgggaagcgggccattgcctcttacaattatcatgtttaatatggtgacaggctgcaagtgcataggcattgaacaggaccctgatgttgcagacctttctagaaaagtattaaagcgtttagatcttgatgaaggaattgaaatcgtaacaggtaatgaaaagacaattgcagaattagattatgacattctaatgattgctgcatttgcagagcctaaagacagagtatttgcaaatgtctgggacattgtagatgaagacactcctgtgctttataggacttatacaggtatgagagctattctttattctcctgtaactgaaaaggacacaagaggattccataaggaagtcatgttgcttcctagaggaaaaacaaataatacttctgttttaattagaaaaattagttaa

SEQ ID NO: 1612 - DNA, 612 bp, Methanobrevibacter ruminantium
  source 1..612: mol_type = genomic DNA
atggaattaactggtaaaaacatatcctttaaatacagttccggatccagacaaatcttaaaggatgttaacataaccgttgacaacaagaagattttaggattgtttggagacagcggaagcggaaaatcaagcttatgcaagattcttgcaggacatatcaaaagatatgaaggtgaggtaaggctagatggacaggagattccaaagggcttcgatcctattcaattgatttaccaacacccggaaaaggttatgaatcctaaatggaagatgcatgatgttttaggagaatcctgggaagttcctgatgacttgttggaagactttggtattcaaaagtcttggcttaacagatggcctgcagagctttccggtggtgaattgcaaagattctctgtcttaagagcattaaaccctaataccaagttcttaatagctgatgagatgactactatgctggacgccattacacaggttcagatattcgaatcagttttaaagatagttaaagagcgcaatatgggtttattggttgtaagccacgatagggacttaatggatattatctgtgatgaagtcatttaccttgatgacattaataatatttaa

SEQ ID NO: 1613 - DNA, 1065 bp, Methanobrevibacter ruminantium
  source 1..1065: mol_type = genomic DNA
atgagtgatttaattaatgtttcaaatatttccatttcatttacacaatatgtaaaaggccttaaccaaagggaattgaaggttatcaccgacttgaccttagacattaaggaaggggaaatcgtagctgtcttaggttcaagcgggtcaggtaagagtttgcttgcacatgcaatacttggaatattgccacataacgcaaacctttcaggtacaatggtctataagggagaagtcttgacagaagagctaaaggaaaaattgcgtggtgatgagattgcacttattccacagtctgtcaatttcctagacccattgatgaaggtttcagatcaggtaatcggcgaatgtaaggatgaagcagaggaaaaggaaaaaagagccaagcaaagagctatctttgaaaagtacaatctctctgaggaagtggatgacatgtacccattccagctttctggtggtatggcaaggagggttcttgtatcaaccgctcttctaacaaatcctaagcttgtaattgcagatgagcctactcctgggcttgatgaggagtctgtagaggaaaccttgaaccatttaaggcagatggctgcagacaatgtgggagtattgctcattacccacgatattgatgctgcattgaaggttgcaaacaggattgcgattttctattcaggctatgtaattgaaattgccaatgcagaggatttcagtggcgaaggtgagaacttgctccatccatataccaagtctctctttaaggcattgcctcttaacggatttgaacttacaaagggacatcagccattgcatggtgagattccggtaggctgtccatattatgacagatgccctcataaaatggatgattgtgataagacaagacctcatttaatccctattgatgagaataaaagggttagatgctttaagtatgagggagagataaaggacagttctgaggagcaggttgtggatagttctgaggagcaggttgtggatagttctgaggagcaggttatggacagttctgaggatcagataaaggatggctctgaggagtag

SEQ ID NO: 1614 - DNA, 861 bp, Methanobrevibacter ruminantium
  source 1..861: mol_type = genomic DNA
atggatgagtcagctaataagatgaataagtttgacgttttaggaagcatgaacttaagaaccaagaccctgcttgcaataggactctctgccttcatattgattgtagtggttcttgtcagtttcttcattgaccctacaagcatcacaaccgattggtccattatgaatcagccaccttcccttgagcacctattcggtactgactggatgggaagagatatgttcacacgtacaatcaagggtttaggattaagtgttcagataggattcttcgcttccatattaagtagcatcattgctgttgctttagctttcctttcaagcttcaacaaatatttagacagctttgtatcttggcttatagatgtgttcctctctattccgcatattttgcttatcattcttatttccatcgctctcggtggaggagcattcggtgtattggttggtgtggcattcactcactggacatctcttgctagggtccttagggctgaaatcaaacgtatcaagacttcagagtttgtaacaatctctgaaagattaggaaaatccaagttctggattgcaagaaagcaaatcttgccattggtaatcagccaagttatcgttggtacaatattgattttccctcacgcaatcatgcacgaagctagtgtaacattcttaggtttcggtttatctccacacgaaccggctatcggtatcattctttccgaatccatgaaatatcttgcaactggtaattggtggttggctttattccctggtttagcattattgattcttgtattgctctttgatattgcaggagaaaacatcaagaagatgctagatccggcaagcgcaaatgattag

SEQ ID NO: 1615 - DNA, 993 bp, Methanobrevibacter ruminantium
  source 1..993: mol_type = genomic DNA
ttgttagacaaacagaaaatacttaagtttttaggttataaactcgttcgttttgctattttattaatagttgtaatattattaagttttatattaattgacatgtctcctattaatccggttaacgcttatatttccaatatggttgtaagccctgaaaagattgctaaactagaagcatattggggtgtaaatcagccgattactgaaaaactgatcaattggttaggaaatattatcactggtgattttggaacttccttaatatacagaactcctgtattgcaggtaattgctgaaaagttcacagcatcccttatcttgatgctaaccagttgggtgatttctggaatattgggctttgctttaggagttcttgcaggatttaaaagagacacttggattgatagggttgtaaaggtatactgttacgtattgcaatctgcacctaccttctggattgctttgcttgttgtaatggtattcagtatttatctgggatggttcccagtaagcgggggcgttccgattggggcgctgagtcaggatgtgtccttcttcgattggttgaagcacctgatattgccggcatttacgctgagcattttaggagttgcatcaattgcactctatactcgtgacaagcttattgaagtaatgacaaccgattacttcctctttgcaaaggcaagaggggaatccggatggaccttgattaaaaggcacggtataagaaacattctactacctgcaatcaccttgcagttcttatcattcagtgaactcttcggtggaaccgttcttgtcgaacaggtattcatgtatcctggaatcggtcaggcagccgtttcagcaggtttgagaagcgacgtacctctgctgttgggaatcgttatcttcagtgcgatattcgtttattgcggtaacctgattgcagatattctctataactttgtagatccaagaataagagaaggtgaggaaaatggatga

SEQ ID NO: 1616 - DNA, 1614 bp, Methanobrevibacter ruminantium
  source 1..1614: mol_type = genomic DNA
atggataaaaaaattattatcggtgcagttgttgcacttcttgttataattgttggtgctgctgtcctcatgggaggaggcactactgaaagaggtcctggagaaatcgtagttgcagcttacagtcacggaggagaaccagaagctggtttcgatccaattgcaggttggaactattatgctgagccactcattcaaagtaccttattgaaaatgacccctaacggtacttacgcaaaagatttggctacagactatgagattagcgatgattataagacatacactgtagacttaagaaaagatgtcaaattcactgacggttctgacttgactgctgaagatgtagcattcacatacaacgcagctaaagaatctggcgcaagcttagacttatccgctttagataaggctgaagctcaaggtgattacaaagtcaaattcaccttaaacaaatcagattccactttcttagataagatggcttacattggtattgttccttccgattcttataacaacgaatcatatggtgaaaacccaatcggttctggaccatacaaattcgtacaatgggacaaaggtcaacaagttatcttagagaaaaaccctgattactatggtaaacaacctgaaatcgaaaagataaccattctctttgctcaaaacgaagctgcgttcaacttagctaaaaacggagaagctgatatcgtagctgtacctctcgaatatggtaaagaaaaacttgacggttacacaatgtacttacaagacaccatcgacgttcgtggtgtatctttacctagtgtacctgataccggagaattatctccagatgacaactacacaatcggtaacaatgtaacctgcgatattgcaatcagaaaagcattgaactatggtattaacagaactgctttagctgaaggagcattaaacggattaggttatccttcctatgacggtattgctcaccaattaccatgggctaacaaagaagcagcaattgaagacggtgacgttgcatacgcaaacaaaaccttagaagaagctggttgggttgactctgacggagatggaatcagagagaaaaacggaaccaaagcttcatttaagatctactactctgcaagtgcacctgaaagacaagctttagctgtcggtgctgctgaacaagctaaacaattcggtattgaaatcgaacctgtaggtgctgaatgggacgaaatctatcctaacgaattctcacaaggagttctctggggatacggttccacagatccatctgacatgtatggagaatactacagttcctctgacttcaaccctgcaagagtaaacaacagtgctgttgacaaacacatggatgacgcatttgctgaatcccgtgaagactcttacaaagattggtctgcagtatcctgggacggttctaccggtatttcccctaaaggtgacgcaaactggttatggttaggtgaaatcaaatatggttacttcgtaaacgacagagtggacatttccaatgacaccgctctcttacaacctcacggaggagacttattcagtaacgtatatgattggaccatgactaacgctactgcagaaaaataa

SEQ ID NO: 1617 - DNA, 966 bp, Methanobrevibacter ruminantium
  source 1..966: mol_type = genomic DNA
atggttagtgtcaatttagaagctaaaaaaactgtagatgtaatgattgaaaaggctgacgatcttaacattgctgtttccaaattagaaaacggcgcaactgtcattgactgtggtgtaaatgtcgcaggtagtttcaaagcaggtgaattatatactaaagtatgtcttggaggattagctgatgtaggcatttccattcctggagacttatctgaaaaattcgcattgccttctgtaaaaataaaaacagacttcccagctatttccaccttaggtgcacaaaaagcaggttggtccgtcagtgtaggagacttctttgcattaggttccggtccagctagagcattatccttaaaaccagctgaaacctatgaagaaattgattacaaagatgaagctgatcttgcaattctaactttagaagctgacgtattgcctggtgaagatgtagctcaatacattgcagatgaatgtggcgtagatgttgcaaacgtattcttgcttgtagctcctaccgcttccttagttggatccattcaaattgcaggaagagtcgttgaaaacggtacctacaaaatgttagaattcttaaagttcgatgttaaaaaggttgtacatgcagcaggtattgcaccaatcgctcctatcgacccagacggattaaaggctatgggtaaaaccaacgatgcagtgctctttggcggaagaacttactattatgtcaaatcagaagaaggagatgacattgcagcagttgcagctcaattaccatcctcagcagctgacggatacggcaaaccattctttgacgtatttaaagatgcaggatttgacttctaccaaatcgacaaaggaatgtttgcaccagctgaagttgttatcaacgatttaaccactggtaaattatacaaagaaggtttcgttaacgctgaattgcttaaaaaatcctttggtatagaataa

SEQ ID NO: 1618 - DNA, 957 bp, Methanobrevibacter ruminantium
  source 1..957: mol_type = genomic DNA
ttgattacaactgttgtaggtagttttggaattgacttaaaggagcctaagactctaggcgaaaagataaagtcttcaattggaatgtacgacccatataagatagcaatcgaagaggctgtcaaactgcagcttgactgtggcatagacatcataggggacggtcagccaaggggagatatggtaggctcttttgtaaagcatattccaggattctcttatgaaatgaactcttcagtcattgtatctaagataagggctcctcaagtggatataatgataaaggatttaaaatatgctaaaaaggttcttgaagcggaaataaaagcaagaaacatgagtggggatgaggccaatagaaaaggagtaaagcttatgctgacaggaccttcaaccattgtacactcttcaaggttagaatctttctataaggagcgtaatccggcaatcattgattgtgcctatgcattaaggcgtgaggtcgagtcagcagagaaggcaggagccagttatgtacaaatcgatgatccatttttatccactggaatggttgacttaaaggttgcaaaggaatccattggaatccttacagatggaatcgaaatgcctatggcaatgcatgtctgtggtaatcttgatggctgctttaaggagattgccaagtttccaattgatattttggactgtgagtttgctggaaacaatgtgaatattggaattctagaagaaaacgctagcttgctttcaggtaagaaattaggattcggctgtgtggattctgctatgaatgcagttgacgataaggaagaggtaagagcactcgttcaaagaggaatcgatgcggtaggcaaggaaaacatgcttcttgatccggactgcggacttagaaaagtggatattccaatagctatggaaaagttaaaaatactctctgatttagctcgtgagtttaattag

SEQ ID NO: 1619 - DNA, 309 bp, Methanobrevibacter ruminantium
  source 1..309: mol_type = genomic DNA
atgtctttctgtttagaaacttatttgcaacaaaatgatgattataaaatacttatacaacgttctggggtcaagcaatgctataagctcattgaagataatgcaaaagagattattcatgtaaaccctggagataaagtattaggtgctagattgattggacttcctccaatacctgttggaataaacgaagaggaagggaccattttgattacttataccaagccatgccatggaactgcagctattgagattccaatctctcaggaagagattcaaaacgttagggacatggatattggtgcttaa

SEQ ID NO: 1620 - DNA, 462 bp, Methanobrevibacter ruminantium
  source 1..462: mol_type = genomic DNA
atgaaagcattagttttactcggatgtcctgaagctccttcacagacccccattggattgtatgcttcttataagctaggccaaatgggatatgacgttacagtatcaagcaaccctgcagcgggaaagatattggacatttcagatcctgaaggggtttatgtaaagaagagggtagatattgaaaagtgtttggatgaaatcgaagagggagattatgacctcttggtcggttgtgttcacaaggatgctgcagccaccttctttataacttattatcatatattaaaatgcaaggctcttgcccttgtcttctcaagagatgcagaagaggttgcagagtttgctgatatggttgaatcctctaccgatgcagatatcattgctgtaagggctttccataatccgaatccgatcaaggtaagatttgacaaatatttaaagactttagaggaagaataa

SEQ ID NO: 1621 - DNA, 510 bp, Methanobrevibacter ruminantium
  source 1..510: mol_type = genomic DNA
atgggattaatatcagacacacatataagtgaaaagagaggaaaattgtccaatcaaatattggaatcttttaaaggagtcgatttgatacttcatgcaggagatataagttcacaaaccgttttggataaattgaattcgatagcaccaaccatagcagttgaaggaaataatgacagagctcgaaaaacccttgatttaaatccctctgaaattatagagatcgatgggataagaatacttttaattcatggcgataagcttccaagcagagattttgataaatactgcaaatttgcacttaaagagaatgcagacattctaataagtggacatagccacagaccacatcttgaaagacaagaagatattcttatgattaatcctgggagccctaacagaccaataaaaagcgacgcatcaatagccattttaacaattgatgaagaaaaagagcataaaaataaattagataaggttaaagtagaatttataaaaatagaaaaataa

SEQ ID NO: 1622 - DNA, 117 bp, Methanobrevibacter ruminantium
  source 1..117: mol_type = genomic DNA
atgcttatatgtcctatatgtggctatccattggatagcgatggccgttgttggaactgtggctattgggttgagactcatccattagatccattccagccaggctctggctattaa

SEQ ID NO: 1623 - DNA, 129 bp, Methanobrevibacter ruminantium
  source 1..129: mol_type = genomic DNA
atgttagattgtcctgtttgtggaagtgaattagacgaaaagggtcaatgttgggtttgcggatacaacatggctccatgtgaccatccggatgattatgattatgacgacttcgaaccgcaattgtaa

SEQ ID NO: 1624 - DNA, 504 bp, Methanobrevibacter ruminantium
  source 1..504: mol_type = genomic DNA
atgacttttaaaaaagagaaattcatcaagcttttaatgtttatcatcagcaggtcttcagacaattataatgtaggaaaaacggtcttatcgaacatgctatattttatagactttaattactttgaaacatatggagaatcattaacaaatgaaatatatattaaatcctatttgggagcagttccaagccattttgatgagattgttcgtgaattgatttattataacaagatatacagaagaagggagccatactattaccatcatatcaataaatattatctgacaagccttcacaatattgatttggattataaggaattgattgttgtaggtggtgtcttggataatcttatgggattcagtgcagttgagatagttgattatataagtggagacgcaccatttaagattgcaggctttgatgagcctttggattatagttttgtattctatagggattttgattattctgttaggaatcttgattattattggtga

SEQ ID NO: 1625 - DNA, 1809 bp, Methanobrevibacter ruminantium
  source 1..1809: mol_type = genomic DNA
atgaaaaacataagacaaacactaagcacaataggaaaaatgctcagtcctctaaaaaagagcataccttccatatttctcatcttcatattcctgcttatagacgtttactgtaaccttaccctcccatcatacactgcagacattgtagatgtgggaatacagaatacagacttcaactacataataagcgttggaacaatgatgatgaccatggtattgataggagttctagcaacaatagcgctatcctatttttcaagcaaggtatcagcagcatatggaagggacttaagggaaataagctatgaaaagatacttaaattctccaacttcgaacttaacaagatatcaagatcatccctcataacacgtaatacaaacgatgtataccaaatacagatattcttaggcctgctttttacaaccatcctatttgcacctatattaggaataggaagcatcatcaaggcaatggaacttggaacagacctcctatggattattgtagtgacattcgcctcagttgcaatactcctcggaataatattcataagaacagttccctactttaaggtgatgcaggaacttattgacaagatcaaccagacatcaagggaaatactgatgggaatgccagtaatcaaggcattcataaggcaggattacgaagaggaaaggtttgaaaagacaaatgaggagttcaaggaagtaaatctccatgtattcaaaaccctcttcctaatgattcctgcaatgacaatgatattgaatgtgatgatagtccttatcctatactttggggcatatgatgcaatcaatggaaagatactgactggaaccatcatagcattcatccaatactccacacagattgtaatctcattcctgatgcttggaggatttacaatcatgattccaagaatcctggtatctggaagaagggttggagaagtcctgaatacagagatatcaattagtgacggaccaatagataagatagatgagaatcccacaatagaatttaaaaatgtaggctacagctatccaggaagtgaaaaggaaaccttaaaagacattagctttaagttggaaaagggaaagaccacagcaataatcggaggaaccggaagcggaaaatccacaatcctaaatcttattcctcgccttcaggatgtgacagagggccaaatcctagtaaacgacaaaaacataaaggaatataagctaagcacacttagagagcgaatatcatacactcctcaaaaggcaattcttttccaaggtaccgtaaggtcaaacatgcaagtgggaaaggaagatgcaacagatgaggaaatagaaaaagcactgaatatagcacaagtggactttatagaaagcttggatgacgaggtcacacaaggagcaagcaacttctcaggaggccaaaagcaacgtctttcaattgcaaggtcaataatggacaagcgtgacttttacctatttgatgactgcttctcagcgctggacatgaatacagaggcaaaggttaaggaaaaccttaaggacttgaaggaaagctcttcaatccttataatttcacaaagaatctcaacaatcatggatgcagatgaaataatcgttcttgatgaaggaaagattattgataaaggcggtcatgattatctttataaaaactgtgatatctataaagagattgtatcttcccaaatagaaagatcagaagacttaatctatgataatgaagagactgcaagctttaccatagatagcagttcaattaaaaaagcagcaggaggcaaataa

SEQ ID NO: 1626 - DNA, 1788 bp, Methanobrevibacter ruminantium
  source 1..1788: mol_type = genomic DNA
atggcaccaagaccaagaagattgcctccggaaaagccaacaaatgtaaaggaagccatcaaaaacatatttggactcctaatgggatacaagctaaagctaagcataacagtcatttgcggtatcctatcaactgtattctctgtaataagccctctcttgattggactagctacaactgcaatattcgatggaataaactctggaaacatgaatctggaatatataataaaccttctaatcacagttgtgattctatacatcataagtgcagtcttctcctatctccaaagctatttcctcttggagataacaacagacatcagctataacctaagaaaagagttgattgaaaaaatcacccacctatccatgggagagatggataaaaacacaagaggagacatcttatcaaggataacaaacgatgtagactcactacagacaggacttaatcagacattcaaccaattgctctctggagtgattacaatagttggagtcacaataatgatgctttccatcaatatctggctgacacttgcaacaattgtgcttataccaattgcatttttaatcataacatttgtcacaaagcattctcaagactattatacaaagcagctaacctataggggaagcctgaacggacagattgaagagtcatttacaggccatgaaatcattcgttcatacaatcaggaagagcagtccatggaaacatttagggaagacaatgaaaactggtatgagcaggaatggaaatccaagttctattcaagcctctccgcccctctgatgaacttcatctcaaacttccaatatgtgataattgcagttcttggagcggtattcgtgcttcagaatgcaatagctgttggagacatattggcctttatccaatactctaaaaacttcacaactcctattcagcagataacaagggttatgaacatggtccagactgcaatggcagcaagtgagagaatatttggatttttagagatagaaaacgaagagaacccttcaaaagaaaagatagagaagataaatgactcaatcacctttgaaaatgtcactttcggatatacaaaagatgaacctgtaatcaagaacttgacatttacagctaaaaagggcgaaaagatagccattgtaggtgaaacaggagctggaaagacaaccatcgtaaagcttcttatgagattctatgatgtggatgatggagagataaaaatcgacggagtcaatataaacagctacgataagcacagcgtcagatcccttgtaggaatggtgcttcaagacacttggctctttaatgacacaatctacaacaatatcaaatacggaaagcttgatgccacagaggaagaaatcataagcgcttcaaaggaagctcatgcagaccatttcataaggcaaatacctgaaggataccaaagcgagcttaatgaggatgtggacaatatctcccacggacaaaagcagcttttgacaattgcaagaacaatcatatcaaacaagcaaatcctaatccttgatgaggcaacatcttcagtggatacaagaaccgagaagataattcaaaaggccatggataagctgatggaaaagagaacaagcttcgtcatagcccataggctttcaacagtcagggatgcagacaagataattgtaattgaagatggaagaatcatagagcaaggaagccatgaagaattgctggaacaaaaaggatattactataataccttaaacactcaaagaagggagaatattgtatga

SEQ ID NO: 1627 - DNA, 603 bp, Methanobrevibacter ruminantium
  source 1..603: mol_type = genomic DNA
atgaatggtggaaataacttagataataattgtaaaaaccttggcaatatccttaatcccactgaagtgaacaatcagctattgttccataagttcataatgataaatgagattctggataagcgaaacaagaagcaaaatccagaaatgaaaagcattacaaagggccagggaagattgattgttcttttaaagagaaaggacaaactatccaccaaagagctctctgaaatattgaatgtcagtgtaagctcccttaatgaaactctaaacaagctggagcaaaagaacttcattaaaaaggttccttccgaaaaggacaaaaggattcttcttgtggaattaactgaagagggaagacaactcgaatttaaaaaccatgaagacattgacatctttgacttcttaagcaaagaagaaaaggaaaaccttaacgactatttaaatcaattgacactatcccttcatgagaaattcaaaagggaagaccctgaaaagtatgcaaagatagttaaaaacagaaaggaaatctttgataaatactttaaagatgaaaataacaatgaaacctgctttgaattcattgattgcagtaaaaaatag

SEQ ID NO: 1628 - DNA, 738 bp, Methanobrevibacter ruminantium
  source 1..738: mol_type = genomic DNA
atggcaaatgcaattattactggtggatccagaggaattggtaaagctatggctttaaagttaggtgaattaggttacaatgtagttattaactatcgcagtgactcatccaaacaattaactgaagatgtaatcgcagaaatcaaagataaatatggtgtagaggccattgccgtacaggctgatgtaagtaaatttgaagattgtaaaaaattggttgaagctgctgttgatgcattcggcgaagaaatcgatgcccttgtaaacaatgcaggaattaccaacaactctaacttcattgacttagagcctgaaagatacgaagcggtaatcaacacaaaccttgtaagcatgatgcacatgtgccacttatgtctcccatatatggtagaccgtgacactgctattgtatgcactgcttctgtaggcggtttgactggtgtaattaatcaagcagactactgtgctgctaagactggtgtaattggattatgccgtgcattagcattggaatttgcacctagaaaagtacgtgtcaactcaattgctcctggtatgattatgactgacatgttacgtggagtaaaccaagatgaattgaacgctcttgcagcaacaatccctcttggacacattggtgaagttgaagaaatcgctggtgctcttgaatacattttgactgcaccttacttaaccggacaagtaatctcacctaacggtggatttgttcttcaataa

SEQ ID NO: 1629 - DNA, 1032 bp, Methanobrevibacter ruminantium
  source 1..1032: mol_type = genomic DNA
atgaaaatatggattgatatatcaaatgctcctcatgtaagattttttaaagatgtcattaagtattttgaagatgaaggagatgatgttttagttacagcccgtaaatttggagacattcataagttaatggatatgtatgatatagactttatatctgtaggaaagcatggagtcacattggaagagaagctaaaggaaagtgcagagagagtcgttaacttagcggatttgatttccggtgaaggatttgatgttgccctttcaaagcattccattgagcttccaagggttgcatttggccttggaattccaagcctgtttgttttggataatgagcatgcaatggctgccaataagctgacccttccattatgcagcaaaattattgttccaaacattatagatatgtggaaactaatggagtatggggctaatcctaatgatataattagatataacggaacctctgagcttatgcacttcaataactttgtattcaatgagaatatctttgaggatttgggattggatttgcctcttcaaagaaccatacttatgaggcctgagccatctcttgcgtcctatttgaatacagactgcagaaaatcagttttatcccctgttgtagatgtcttaaaggagtatgcaaatattcttattcttcctaggtttaaggaacaggctgagatatttgaaggaataaagaatgtgacaatccttaagcctccggtagacacttcaagcataattaaggcatgtgaccttgtaattggagctggaggaacaatgaatagggaagctgcaatacttcagacacctgttatctcatgctatcctggagacacattgtctgtagaccagttttatgtgaataatggtcttatgtataggactacagatttagaggacattactaaacaggcacttagctttattgtaaatccacataagcctattgactttaaaacagatgatctctttgatttgattgtgaaaaatacttatgagctgggcggttctaagaaataa

SEQ ID NO: 1630 - DNA, 762 bp, Methanobrevibacter ruminantium
  source 1..762: mol_type = genomic DNA
atgcataaagttgctgatgttgaagtagcaaagaacattatggatgccaatgcaaaattggcacataagaatttacatttattggaagaccacgatatcttttgtgtagactttgtaggagcaatcggatctggtaaaacagctcttattgaagagattattgaaaatgttgatgaaaaaatcggtgtaatcgctggggatgtaatcagcaagtttgatgcaggcagaattgaatctcacaatgttcctgtagtcggattgaacaccggcaaggaatgtcacttggatgcccacttggtgggtcacggattaggtgacttgcctcttgatgatattgattatctattcattgaaaatgtgggaaaccttatctgtcctgtcgactttgaattaggctcacatatgagagttgtggttgtaagcgttactgaaggtgacgacactgtagagaaacaccctcttatcttccaaaactctgaccttgttataatcaataagattgacttggcagaagctgttggagctagcgttgataagatggtatgtgatgcaaaacgtcttaatcctgatgttaaggttattacttcaagcttaaaagaaggaaaaggtttagatgaagtaattgctgctattgaagattgcaaggctcatgtagctgaacatcatcaccatcatgaccatgagcatgagcatgaccacagtcacgaccatgagcacagtcatggccatgaccatagtcacagtcatgaacattcccattaa

SEQ ID NO: 1631 - DNA, 375 bp, Methanobrevibacter ruminantium
  source 1..375: mol_type = genomic DNA
atgcacgaattagctatggctcaaggaattttaaatgcagtgctggaaactgcagaggctaacaatgcaattgaggtaactgaaatagttattgaaattggcaaattggctatgcttaatccggaacaattgaaatttatgttaggtgtcttatgttccgagacaatcgcagagaatgctgaacttattgtagaggatattgatgttgaaatcaagtgccacaactgtgactttgaaggagtcgctaatgttgatgacagcgatcattatgctcctatgattttatgtccaaaatgcgaaagtcatagggtggaagtcaaaaacggcaaggatgtaaccgttagaaacattagtattgaaaaagaggacgaataa

SEQ ID NO: 1632 - DNA, 921 bp, Methanobrevibacter ruminantium
  source 1..921: mol_type = genomic DNA
atgattattggtggttcagcatcacaaaaactagcggctaatgttgcaaaggaattaggggatgttttatgtcctatagaaactaaaaaattccctgacggtgagagatatatcagaattaaatcagaagtggataaggaagttacaattatccaatccactggttttcctcaagatgaaaacttggttgaacttttatttttaatcaggactgtcaaggacttaggtgcagagcatgttaaagtggttgtgccttatttaggatatggcagacaggaattaagatttaaagatggggaagctatttccgctcaattggtagctaacctaattgaggaatcaggtgctgatgagttcatttcaatcaatctccatgaggacagcgttagagacttcttcaacattccaactgcaaatctttcagcaatgcctcctattgcagaatatattgcaaacactgtggaaaatccaataattattgctccggataagggcgctttaggatttgcagaagagatcgctgaaatcttaggatgcaattgcacttatatgagcaaagtcagattaggtcctgataaggtggaaactactattgtagacattcacagcgattttgacagcgaagatttggctaaagtaaagaaagactctaaggtaaatatagattctgtaaaggataaggaagcaatcatcattgacgacatcatagcaaccggaggaacaatcgtcaatgcaattggcatattaaaggagcacggcgctaaatcagtagatgtctattgtgttcacccagttcttgtaaacgatgctgtattgaagatatctgcagctggagctcgtgaattggcaagtacagataccttaaaatcagatgtcagttcaatatccgttgctaagatcattgctgatgtcttaagataa

SEQ ID NO: 1633 - DNA, 1104 bp, Methanobrevibacter ruminantium
  source 1..1104: mol_type = genomic DNA
atgttattgatagctcaaaatcattttcaacttatacttgaagtaggtttgattttacttgctactatgatattcgtaatcaatttggttcctttatcattaagtgtggtaacattcctctcattattcctatctggaggatttacaattctatttggagccgacttggctttcctggtattatcatttggtcagcatgaatttactcaccctttcggtcctattgccctattggctattgtaaccgcattagcgtcgcttaaggttatggaagggtcgggtgttgatatatcaaggcttaaaaatatcgtatatgtttttcttatagcaataaccgtattcggtggagcaatgcacagatcattcctattgctatggttcatcggtctgttcataggttatactatcatttccaaatcctttaggcaaaagtctatccttacaatcagaaggattttaatgtttttccttgcagctttagttgcattcggtttgcttgagcttgtttccaggattttaagcatggaagttttctctccattgttaaggatttcaagacttgctcagaactctttggcaagtctaaaattggtaattggaaatactcaattgataggtcacgatcctgcttcatcctattggtctgacagtactggatttgcagatggttatattagcttgccaatgcaattcattttgatgtttggcttgccattcccattgttctttggtcttttggtaaccaagaaggatacaatcgactatatgcttccaggtatcttcggttatgcatatgactttggatatttgacattcgttatattgcttttattagtcttatttacaatcataataggcctgcttgttcttcgcgaatacagacttaaaagagaaaagaacaataagaaatatttaggtaaggaagttcttttaattggttcccttactggatttattgctcaagcgatcattggtttgttcctctttaacaggacaataaacggtatggcgctgctcacattcctgttcttaggctctttggtcttggctcatgttgtgactattagacgtgatagcaatgaagttttaagccaacaaatttaa

SEQ ID NO: 1634 - DNA, 480 bp, Methanobrevibacter ruminantium
  source 1..480: mol_type = genomic DNA
atggtaaatataaaaactgttgcattagctgttatagcaatcatagttgttttattggctatatttgctgtttccaatgtagtgattttagctcaggatgatactgaagggggaattcctggagttgatatggctgctttatggagtttgaatggtggtttccaatggatatatcctggaagctcttttgaccctgaaggccgtactcttcacaatatctatatgcttgacgacccttatggcgaagttaagacaatcatgcagtacacatataatgtggatcctcatattctggttataataaacgaccaggctgctgcccatatatttggggacaatatattggatacaatccgtcagcatgattgggtcgaaggccattcccgtggagatgccgttggaatgagcataacctctgtaaatcctttgccgataattccagacattttaatgggaaatattaagataatgttcatctaa

SEQ ID NO: 1635 - DNA, 2175 bp, Methanobrevibacter ruminantium
  source 1..2175: mol_type = genomic DNA
atggaagaaaagaaaatagaatctacagatgttgaagtgaatgaatctaaagacttaaacttagattccactgtagagaataatgaaattgacaagactgaagaacttgacgcttcctctgaaattgatgagaatgaagaacttggcacttcctctgaagtaagagaaaccatagtcattgacacagccagtgaagtggttgaagcggatgtggtaagcgaaaccatagacagttctgaatctgtcaaggatgaagaggaggatagcaatcctcttgatgtagaatatgttgaagaagatggaaaacgtaggataaagcctatgcttgattacgaatctctttcaaatacctctgaaattgaagttcctccacttctcatcgaccaggtcataggtcatgaggaatctgtggaaacaattaaaaaagcagcaaagcaaagaagaaatgttcttcttattggtgatccgggtgtaggtaagtcaatgctcgctaaaggaatggctgagttattgcctcctgaagtcttagaagacgtattggtttatccaaacggggaagacagtaattatccattgattaggacagtccctgcaggtcagggcaaaaagatagtcaaggcaaacaaggccaatgcaaaaagcggcgatgagaagaagatgatgatcaccatgtttgcaactgcagctatctttgttcttggaatcctataccaaagaatatttgaagctatcattgctgcattgcttgtaatatttatttccatgcaaatcaagcctaaggcaaataacatgtctcctaaattattggtaaacaacggagataaaagatttgcaccattcatggatgctactggtgctcatgccggcgcattgctcggtgatgtaaggcacgacccttaccaatctggaggtcttggaacccctgcacacgaacgtgttgaaagcggaatgattcacaaggctcataagggagttttatacattgacgaaataggtacaatgagcatgaaaactcaacaagagctattatctgctatgcaagagaagaaatatgcaatcactggtcaaagtgaaaacagcagtggtgctatggtccgttctcaagcagttccatgtgattttgttcttgtagcttctggaaatatccaagttcttgaaggaatgcacattgcaatgcgttcaagaatcagaggatatggttatggggtctttatgaaagattatatggaagacaccgaagaaaaccgtaaaaagcttgtacagtttgtagctcaagaagtcaagaacgacggcagaattcctcactttgcaactgacgctcttgatgaaattattttggaagctaaacgtagagcaggaagaaagaacgctttaactcttagattaagagagttaggtggtttagtacgttcctcaggtgatgttgcaattgaagaaggtgcagatttggtaactgctgaacatgttgtaaccgctaaaagatttgcaagaaccttagagcagcaaattgtagacagatccattatccaaaggaaagaatacagcgtattccattcctcaggtggaaagatcggtatggttaatggtttagctgtaatgggtgatagaagcggtattgtcatgccaattgctgctgaaatggctccggctaacagcaaaaacgaaggtaagatcatcgttaccggtaagcttggagaaatcgctttggattccgttcagaatgtaagtgcaatcattaagaaatacactcaagtggacatttccaatcacgacattcacgttcagttcctccaaagttatgatggagttgaaggggacagcgcaagtgtttcaataactgcagcggttatctctgctgttgaaggcattccgatagaccaatcaattgctttgaccggttccttaagcgtacgtggagatgtcatgcctattggtggtgcaaccgctaagattgaagcggcagctgaagcaggcattaagaaagttctattgcctaagtccaatatggaagatgtcatgcttgagaagaagtatgaggatatgattgagatagttccaatcgaaactatcgaagacgtattggaaaatattctaatcaacggaagcaagaaggaaaaattaattaataaaaatgagagaaatcagtggagcagtcacaagcaaggtctctactga

SEQ ID NO: 1636 - DNA, 1641 bp, Methanobrevibacter ruminantium
  source 1..1641: mol_type = genomic DNA
atgactaaatgtttaatgattcaaggaacagcatcaaatgctggaaaaagtttgattgttgcagcactttgcagaatatacacaaaaagaggatacaaggttgctccattcaagtcacagaatatgtctttaaattcatacactacaaaggaaaataaggaaatagccattgcacaggttttgcaggcaaaggctgcaaatatagagcctacagtagatatgaacccaattctcctaaagccaaagggagaatcatgctcacaagttatcatacaaggagaagcagttggaaacaaggacttctttagaaaatatgataagacaaaggccacccaaagggatatagacaataatctgatggatgatgaggactatagaatcattgcaaaggaagctgtaatagactcattaaacaatctcaaggaagattatgacataatcattatggaaggtgcaggatctcctgcagaaatcaacctaagggaaggagaccttgcaaatatgggagctgcagagattgcagatgcaaatgtacttcttgtaggtgacattgacaagggaggagtctttgcatcaatagctggaacattcctattgcttgacgatgcagaccgctcaagatttaagggagtcattataaacaagttcagaggaaagcaggaattattatgctctggaatcgaaaggctcgaagaaatcattcaggtcccagtccttggaattgttccttatgctgaaaacctccagctaccagaagaggactctgcatccttaaaggagcacaactggacaaaggaatttaagaataatgatgatcacataataattggagttgtaaagcttccaaagattgccaacttcacagacatagacccatttgacacagaagatgatgttgaagtgagaatgattgaagtccataattacaaagacaaaatcaaggacattgatgcattgatcttaccgggtacccgtaactccactgaagacattatggaacttgaaaagaccggtttggcacaagagataaggaaactgtcaaatgaatccaagattccaatcatcggaatctgcggaggataccagatattgggaaacaagatctatgataaaaaccataaggaatccaaacttgatgaagttgaaggattaggtcttttagacattgaaagtgagtttataagggaaagcaaggtcgtaaagcaaagcataggtagaatagaaataaatgataatatcactggtctaaataattccgatgaaaataatatcttttatgaaatattctctaagatcaatggggaaactgtaagcggctatgagttacatgaaggcactacaaatcttataagcgccaagccattatttaaaatagaaaagggaattggaaataatgacaatgaccaatttgatggtgcttacagcaagaatgtatttggaacctatttccatggaatatttaataattataatcttagaagagagtttttaaaccatttaagaaaaaataagggtttggatgaaaaaactggtgaagatccatatgaaacaagcgttgaaaattctcttgaaaaattagcaaatattgtagaagaagctcttgatatggattatattgataaattggtttttgatgaataa

SEQ ID NO: 1637 - DNA, 1161 bp, Methanobrevibacter ruminantium
  source 1..1161: mol_type = genomic DNA
atgagagatgttgcgattattggagcttcccaaacaaaatttggagagttatgggatgtttcatttagagaattaatttcacaagctggtcttggagctattgaagacgctaacctaagcggtgcagacttggaagccatgtttgttggaaacatgtctgcaggtctttttgtaggtcaagagcacattgcctcacttatttcagacagcatgggaatgaaccctgttccatgtacaagagttgaagctgcttgtgcatctggaggattggcacttagacaaggaatcatggctgtagcttccggataccatgatgttgtggtagctgcaggtgtggaaaagatgactgatgtggtggatgcaactccggctattgccacagcatccgatcaggaatgggaagcacagcaaggagccactttcccatcattatacgccatgattgctcaaagacatatgtatgaatatggaaccacaagggaacaattggctatgatgtctgtagttaatcataagaacgcttcaaacaaccctaatgctcaattcccatttgaagttactgtagataaggtattaaattcatctcctgttgcagatcctttaacattgcttgactgttcccctgtatcagacggtgcagcagctatcgttatctgtgcagcagaaaaggctaaggaatacactgacacccctatctatgtaagggcatctgcacagtcttccggaaccattgcgcttcatagcagaaaggacatcactaccttggatgcaaccattgcagcttccagaaaagcttatgatatggcaggagtcactgtaaaggatattgatgcaactgaagtccatgactgtttctcaatcaatggattgcttgcaattgaagaccttggatttgctaagaaaggagaaggcggcaaagtattggaagaaggtcagactaatattgatggtgattgtccgattaacccatctggtggtttaaaggcaagaggccatcctcttggagccactggtattgctcaagctgctgaaattgtatggcaattaagaggagaagcaggcaaacgtcaagtggatggtgctgaaatcggtatgactcataatgttggtggtaccggcggtacttgtgctgttcatatatttggcagagaccttaactaa

SEQ ID NO: 1638 - DNA, 1041 bp, Methanobrevibacter ruminantium
  source 1..1041: mol_type = genomic DNA
atggcaggaattgtaggatatggggctaatgtgccttcatatagaataaaagtagaagaaattgcaaaagtttggggagataacccagaatcaatttccaatggtttaattgttaatgaaaagtcagttccatcttctgatgaagacactgctactattgcagttagctctgcaagatatgcattaagaagagcacaaattgacccacaagatattggagcggtttatgtaggttctgaatcccacccttatgcagtaaagccaactgcaaccatcgtagctgaagcaatcggtgcaactccggatatgactgcagctgacttggagtttgcttgtaaggcaggtactgcaggtattcaagcggtaatgggtttagtggattctggcatgataaaatacggtttggctataggtgccgatacctctcaaggagctcctggagatgctttggaatacactgcatctgccggtggcgctgcttacatcatcggaaataaggacacaatagcagactttggaaccacttacagtttcactactgacactcctgatttctacagaagggaaggtcagccttatccaagtcatggaggaagatttacaggtgaccctgcttacttcaagcatgtcttaggagcagcaaaaggattgcttgaaaagacagattctaaagttgaagattatgattatgctattttccaccagcctaacggtaagttttacctaagggcagctaagaaattaggattcactccagagcaatataaggatgggctcttgactcctaatgttggaaatacctattctggtgcagttcctttagccctttccaatgtattggacaaggcagagcctggagataagatatttattgtatcatatggttcaggtgcaggaagtgacggatttacattgactgtaaacgacagaattgatgaagttaggaatttagctcctacaactgaagagatcctctctaaaaagatttatgttgactatgcagtttatgctaaattcaaaggaaaacttagaatggcatag

SEQ ID NO: 1639 - DNA, 267 bp, Methanobrevibacter ruminantium
  source 1..267: mol_type = genomic DNA
atgagttcaggattaactataggattgctctccttaataatttttgggaatatagaaaacttgattcttgcttcacagggagtagtaaaagccgcaaatccacttaaacttgcaatattcagtttaatatgcgtaagttgttggctaattttaggaacagtatgtacacaacaattacaaaattatggaatttacattgaattcattggcggatttgcaatattcgtattaggacttcaatccatgattgaagcagcgagaggatag

SEQ ID NO: 1640 - DNA, 288 bp, Methanobrevibacter ruminantium
  source 1..288: mol_type = genomic DNA
atgtcatttgcagaatcattaaaagaatataaaccatttttaggtttattgatttttggtaacattgaaaacttagttcttgctgcccaaggtgttattgaaggagcagatccttttcttgttgcaggagcaagtgtttgctttgtaattatttggcaatttataggagtctttggaaccaaatcagcaatgaaatactctagacacattgaattcattggcggatttgcaatattcgtattgggaattcaatccatgcttcctttaatataccaattgcttggataa

SEQ ID NO: 1641 - DNA, 669 bp, Methanobrevibacter ruminantium
  source 1..669: mol_type = genomic DNA
atgtctgatgaaaagatggaaagagtggaagataatgaattattgattaatgcacgtaagcctgaaggagaattaggtgatcaattattggatagaatgaataagagtcacgaatctcttgcacaatggggcgtaagtcatttggatatctctaaagatgatatcattttagatattggatgcggcggaggagtcaacgttgaaagattccttaaaatgactgaaaacaaggtttatggtttggattactcagaagtcgctgtagaaaagtctaaaaaacttaatcaaaaagcaatcgaagaaggcagatgtgaagtcattcaaggctctgtatctgaattgccttttgatgatgaaatattcgacattgtaacaggctttgaaacagtttatttctggccagattttgtcaatgacttaaaagaagtcagaagggtgttaaaggaagatggaataatatttatctgcaatgaagcaattcctagagatggggacgctcgtcaagaggagcttaaagaacttttggatatgaatatttattcagatgatgagttggaccaatcattaaggcaagcaggattctcagatttaattatttttgataagagcagttcaaaagttgaatccaaggacgtaagtggttggatttgtgcaatagctaaaaaatag

SEQ ID NO: 1642 - DNA, 468 bp, Methanobrevibacter ruminantium
  source 1..468: mol_type = genomic DNA
atgacttttggaaacgataaggaaaatatttttgtaaaaaatgtagttgattatggtgatttaagtaaatctgataggagttctaaccttggcaggttttttcccaatcgtcagtcccctaaatctgattttgattctgttccatcttcaattgatgagaagataatcaatatcttgacttttaaggatgaaggtgattcaaatggttctaataatgatggaacttctgacgattctgtggatggtgtggattattctctctttgatgaagaattagaatacatctgcagcttaggcttcaatccatttgaggaaggggggataaatagggattccttggaagagcatttcaatccatatcttgaaaatcatccagaggagcttgctttcctttctgtctttgaggattttactttagtccagatgaactttagcgatatgattaaggaggtctattttgaggaatag

SEQ ID NO: 1643 - DNA, 1611 bp, Methanobrevibacter ruminantium
  source 1..1611: mol_type = genomic DNA
atggcacaaggtcaacctatttttattttacctgaaggaaccaacagattattaggtagagatgctcaaagaaccaatatcttagcaggtaaagtattagcagaaactgtaagaaccactttaggtccaaaaggtatggacaaaatgttagtggacggactcggagacattgtagtaaccaacgacggagttactatcttaaaggaaatggatattgaacatcctgcagctaaaatgctcgttgaagttgcaaaaacccaagaagacgaagtaggagacggaaccacaactgcagtaatcattgcaggagaactccttaagaaatccgaaaccttattggatatggacattcacccaactatcattgctatgggttacagacaagctgctgaaaaggctcaagaaatcttagatgacattgcaatcgaagacatttcccgtgaaatgttagttaaagtagctatgactgcaatgactggtaaaggaactgaaaaagctcgtgaacctttagcaaacttaatcgtagacgctgtacagcaagttgctgatgacggcgtagttgaaaccgatcacattaaaatcgagaagaaagacggtgcagtagttgaagaatccactttaatccaaggtgtaatcgtagacaaggaaaaagtacaccctggtatgccttctgaattaaaagacgctaaagttgttttaatcaactccccactcgaagtcaaggaaactgaagttgacgctgaaattagaatcaccgaccctgctcaaatgcaagcattcattgaacaagaagagcaaatggtcagagacatggttaacaaagttgcagactctggcgcaactgttttattcgcacaaaaaggtatcgatgacttagcacaacactacttagctaaagcaggaatcatggctgtaagaagagtcaaaaaatctgacattgaaaaattagctaaagcaactggtgctactgttgtatccaacttagatgacttaactgaagctgacttaggaagcgctggctctgtaatccagaaaaagatttccggtgatgacatgatctttgtagaagaatgtcaagaacctaaagcagtaacattactcgttagaggaagtaccaaacacatcgtagctgaaatcgacagagctgtagatgacgcaatcggtgtagttgctgctactgtagaagacggtcaagttgtagctggtggaggagctcctgaaatcgctatggctaaaaaacttaaagaatacgctcaatcaatcagcggaagagaacaattagctgtaactgcatttgcagaatccttagaaattgttcctaagaccttagctgaaaacgctggtttagacagcatcgactcccttgtggacttaagagctgctcatgaaaaatccccttacatgggattaaacgtattcactggcgatgttactgacatgaaagaagaaggtgttgtagaacctaaacgtgtcaaaaaacaagctatccaatctgcttcagaagctgctgaaatgattttaagaatcgatgatgtaatcgcttccagcggaaccagtgcaggcgacatgccaatggacccaggtatgggcggcatgcctcctatgatgtaa

SEQ ID NO: 1644 - DNA, 1017 bp, Methanobrevibacter ruminantium
  source 1..1017: mol_type = genomic DNA
atggtagaaagggcaaatattaatccggcaatgatgctatgggctagaaagcgtgcaggatacataaatggctttgaggaagacttgcctaaagacatcaaatcaaaatataagtcttgggaaagtggagaggaaaagcctacttggacacagcttagaaaggcaagcaagaagttttgccttcctagtgcattcttctttttggagaaggtccctgaagatgatgattttccaaaaatgattaattatagaaagttagacgctgatgatatttttgaaaacaactccccaagcctaattaaacaaataagaaaatcccaaagccgaagggaacattatcttgatttattgtatgaattagaggaaaacattccatcatttgaaatatatgaaggctccttaaataaaaagcatgtctcaaattacattagggaaaaattgggaatctctttagagactcaaaagacatggataagaaagaacaagtcaaaagacagcaggcattataatttcttaaataaatggaaggaaatcataacacgaaagattggggttctaatctttgaaagcgaaggagttgcccttaatgaaatgagaggattatgcatattccataaggaagttcctataatcctattgaatggaaaggatagtgtaaatggaaggatattttccctcttccatgaattgacccatcttctattaggccaaagtgcaatctgcggagatgatgagaatattgatgaagagatcttctacaatgcagttgcaggtgagtttcttgttccaaatgaagatttatgcaaaaatacaaatgcagataatatggatactatttccaatggcgccggtggaaattatttgaataatcagataaaatacaacggagagccttactgtgcagttgttttagaggcttatgaaaagggaataatcaatggtggagaattttccagattcactaatctaaataagaaattcattccatttatgtttaatagatatctattttcttaa

SEQ ID NO: 1645 - DNA, 276 bp, Methanobrevibacter ruminantium
  source 1..276: mol_type = genomic DNA
atggaagaattcagacagcaattagtggataaggtagtgttttcattggttaatacaaaacaaatcagcaatgatgatttggacaaaagaaataacagcatttcacttgatgttagaaaattaatcattggcagagttttggacaaggtcaattccaatataaattacgaaggagaaaacttaagttatgctcaaataattgataagcaagctaaaaaaatagttaattacttgataaatggagaaaaatatactggctttagtttaagatggtga

SEQ ID NO: 1646 - DNA, 696 bp, Methanobrevibacter ruminantium
  source 1..696: mol_type = genomic DNA
atgaaaatactgattgagggatacaacaaatcaatccataagagagacaatcaaattctaatcatggaaaaggagggggaattggaaaaaatcaatataaaaaagattgatgatataacaattatcggaaaaggatccatcacatttgatgccttgagactaatctctgaaaataatgtccggctaatgtctatagactactttggaaagataaactatactcttgagtatccgagcaatgaaaacatattcctaagaaagcagcaatataaaacaagtgaaaaccacaaaggtctgattattgcacgggaaatgataatgtctaagatgattaatcaaaaatcgacaattaagacccttaataaaaacaaaaaattagaaaatgttaagatttttgaaagaaacatcaatgaagcaattaaacaaattggcagtttacggtttggagaaaggacagacattgaaaaatcaaaaatgaagatgatgggaattgaaggaagcgcctcagtggactattggcttgctgtaaatgaacttctgcctaaagagataggtttcttctcaagaaataacaggcatcctaatgatattacaaatgcaagccttaactatgcctatgcaatacttgcaagcgaagtaaacaaggcgcttgtcataaatgggcttgattcatattgcggttttcctgcattttga

SEQ ID NO: 1647 - DNA, 276 bp, Methanobrevibacter ruminantium
  source 1..276: mol_type = genomic DNA
atgaaggtcttagtttcatttgaaatcaaattcaaaaccaacaaggaaaagattatatccattctaaagcattttggctttagaaggatgcaagaaaacttatattttggggatgtcgaatatgatgaactatatgctatgcagtccgatattatggagaacattcgagaatatgacagcatactgacaattcccatctgcaaatcctgctatctgaagctgaatgtatttggaagaaatctaagctttaaggacgaattatacaaaatattttaa

SEQ ID NO: 1648 - DNA, 9162 bp, Methanobrevibacter ruminantium
  source 1..9162: mol_type = genomic DNA
atgaataaaagcaaaaaaactatgattatgctgattatggcaattcttgttttattgaccatggccagcgtaagtgccagcgaacttgaagacattcaagtcacagcatccaatggcacatcagatgccgttattgcatctgaagcaaatagtgcatatcctgataatgccattatcacatccgaaaaggaaaatggcgatgagaatattatcgcaacggataatggaaaaatcggatatgaaaatgacgataagactattatcgcaactaatggaaatgggggaaatatcggatatgaagatgacgataatactcttatcacatcagacaaagaacttaacgcattggataaaggaaaataccaatccctatctgtaggagactaccattcctttgaggaattgcagacaattctcaatcaagcggatggcggagagacaatagaactgaactatgactattcccttggagcaggaggatcaaccctaaagcttacaaagggattgaccataaacggaaataaccatacactatatggcgtagggcttgaccgcatactttacataagctccctcaacacccagccaatcatcctgaacgacatcatattcaaagacggcggaaaaaaggacagttacactaacctggaaaccaactggggaggagccatatactacaacccgacaactgaaggcggtgcaatcggcggcgaaccggccgattttatcataaacaattgtacctttgaaaacaatggagcagtcaacggaggaggagccatcttttggaacggatctctcaaaatcatagattccagattcttcaacaatgaaatcgaactgggaagcggaggcgcagtctatgcaaacggcaatttgactgctatcggttgctctttcagcaacaaccgcgtcagacatggacttataggaatggacatgctaaccacaacctttacagatgaaggatattgggcaaaggtaattcaatactacagtttctatagtgtcgatgtaattccccctacaggaggggcaatattctgtaacggaacctgtaagataaacgactcaagttttgacaacaaccaggcaggagaagcgaatgagatgggaaccggtggaggagcaattcattccatgaacgatataaccgtctgcaactccactttcaccaacaacaaggcttacgatcagcatggtggcgcaatcctctgtaacagatccggatttatttacaactccactttcagaaacaatgtagcaaacgtgggaggtgcaataagctgtttctattaccttaatgcagaaggttcaacattctccaacaacggtggcgaaataggcactacatggatggatgaacactcctttgatttccttatagataattttataggcagcatacctatcataggggacatatacggcgccctgcaaaatttccttgatcttttaggcgtagagagtgtcgatgtcctgacaggccaatacttcagcgttggaggcgccctctacactggactcgactgcaatgtcgataaatgtacatttgaaagaaaccatgcagccgaaggcggtggcgcaatatacagcgaacgaaaggtaacagcaaaaaacagcgcattctcatcaaacaaggttttccgtggagacagcgcagtctctgaactcatgagcagtcaaggaaaaaacagagacggcggagcaatccatgcagaaaatgcaacaaccatcagaaactcagaattttcaggcaactccgctccaagcaagggcggtgcagtctactgtgcacatcacctggaaatgagcgattcctcatttttatacaacacagcataccaaaacggaggagccctatatgcagatacaataggaacaatttccaatacaaagttctccggcaattcagtaaccaaaggcagcggtgacggaggagcagtatacatcatcgcccaaagcgatgctcgatttgaatcctgcgaattcagcgcaaacactgcagaaagcgacggaggagctatctatatagcaaattcaaattcacttttaaggctgaacaaatgcacattcattcaaaacattgcccatcttgacggcggagcattcaactgcagaggaaagactgaaatcaaaaattccgtattcaagagaaattcagtcgatggagacggacagaccgaaaacagccagggaggcgcagccttctcaaaaggagatatgagcattagcgattccagcttcgagcaaaacatggcaaaacaccatggaggagcagcatataccgacggaaagatgacagtgaaaaacagcaatttcacagtcaacagcgcaaacaatggaggagcaatatatgcaagcgtgatgaatgacgaagtgacaaattcaatattcaagaagaacactggaaccaatggagacggcggtgcaatctacatcaatgacaaatcttggcctaagttcgattcctgcgtattctcagacaacaagtgcgtagtcaaatcctcagttgaaaattcccaaggaggagcaatctatgtaagaaacgatgactccgagctaaaggtgaccaactcaaacttcacaggcaatgctgcaggccaaggaggagccatattttccggcaaggttaacgaaatcaccaattcagtattcaagaagaacggtgcaagcaaaagcggaggagcagtatacatagaaccaaactgcaatcctaagattcgccaatcagtcttcgaagaaaacgtgggcggcgacaaaggaggagcagtctatcttaattcaaaatactcctacctagaactgaccggctgtaacttcaccaagaacactgcaaaagaaggagggggcgtatatgctcaacaaatgagcgcaaaagtctcatccaacagattcataagcaacaaggccaccgacggtaaaggaggcggaatatacgttagaaactatcacattactgaaacagtaaagagatatacaaccgaattcgtagactgtacattcacaagcaatacatgtacagacaatggaggaggactctgcatggactcaacatattccgtactgaaaataacctcctgtaattttacaagcaacactgcaaagaataacggaggcggagtatgggcccatatgataaactccatccaatggtcaagcttcagcaaaaacaaggcgaccgagggcaaaggtggaggagtccacattaaaaatgactaccctaacagaattgcagataaccctaaaaccgaagtaaagaactgccaattcgattcaaatacatgcaaggatgaagggggaggacttcatgtggaatccgaacacgccaagctaacactgacttcttcaacattcagatttaattctgcaggacgcggaggaggagtctatgcccataaggtcatttcaatcaacagctgcggattccacaacaacagcgcgaattatgtaaagaacaacggtgacggaggagccatatatatagaaaacgacaacgactttgaaatcaagagctgcagattcgaaggaaatacagcaaagagcagaggaggagcaatctatatggattcctatgaaatcaagaccaagatatcctactctacattcgtcgacaactatgccggcagggatgaccattccagcacattatatacattcatggcaggacacagcgtattcaccaagggaacctatacaaacatctccctatgctggttcggatcaaacaatcctagtttcactgaacagcttgttgaccagaacagggtatcaagcgacaaagaaaagaaaccttcagacttcggtgcagaatacctgaagatcaatataaaaatcaataatacccgtcctattgcaggaaatccttataaggtaaccgtctatttcactggaaatgtcaacaacaatgtggtgagcttcagctcaaacaccctctaccattccaccggaaaatttggaggggacggcacatactccaatatcaaagcggacaagaatgacatgactgcagatgtggtcctcactccagaatcaagacagatctggggacagcttgaccatcagaaagtatatctgaatgtcaatccgctaaccaagaattcaactatggtagagataagatcctgcgaggatatcaagtatcctgatgcattggaggtcaactataccctagtcaactataccataagcaatgcggaagcggccacatacataatcaatgacagcgaaggaaacacagtaaagtcaggaaaccttacaagccctgagacattatatgtagaaggattgaagcctggaacctattcaataacaatcacaatccctgaaacatactactatctatcatccaatgcaactgcaagcttcgatgtctttaaaggagacatcgaggaactgagaatcgtggtaaacaacaggacatatcctgaagaggtcaaggccatcgtctatgccagcgtagacgaagactatgaagtgacaataggagaagagacaaagaccgttactgtaattggaggaataggccaagtcaatttcggcagcctagaaaccgacacctatgaagctacagtatccttcggaggaagcgatctctatgagcctatctcaaacgctaccgaatttacagtatatcctgaagaggaaggcaccaatttcgagattgatacaaatgcaagcgaaatcacatacggcgcaagcatcaaagtcactcacaaattgcctgaagatgctacaggaaccatcaaatattacctgaacaacggcactgtccttggagaactgccggtcgaagaaaaactgacactggaccttgatgcaggatactatgtaatatttgcaaactattcaggcgacgaaagcttcgagcctgactgggacagcgcagatgtcctcgtaaagcaagtagaaacagaattccatataggcctccagcagcaggtcatatccggcaaccctgcctatgtcacccatagcatatccgagggcgctacaggcacaatcagctactatctgagcaacggaaccttccttggagaagtgcaggtcggcgagacatatgtttcacctaaatggaaggtcggaatctataacataaccgcaaactattccggagacaggaactttgttccggcatcagacagcatggaattcagaatcaatcctgacttctcgttcgacatataccttgacgaagacgacgtcatatacggccagaccactacagtacgtccaagcttgccttatgacgctacaggcaccgtggaattctactataacgacacatacctgggcaaggtaacaataggccaatatgaaatcataatggttgacggagaggaatactacgaaactccaggagtggagcttcctgaattcgacgtgggagtccatgaaatcgtaggaaaatacttgggagacaagaattatgaccctgcaatcgcaaacgtaaggcttactgtcctaagtaccgaaacagtattcgagatcaatgcaagcccaagcgaaataaaatacggagaagctgcagctgtcatccataaactgccaagccttgcagtaggtaccatcttatattacctgagcgacggaacatccctcggcgaactatactactacgaggaccttgcattgcctaaattggctgtgggaagctatgagattcttgccaactattccggagacgaaaacttcaacaatgcaagcgcaagcacaaccttgacaatcaataaggcagaccctgatttcgaaatctatatcgcattcccttcctatgacttcggagatagccctgtagtcttcgttaacttacctgacgacgctacaggaaatatctcatactacctgagcgacggaaccttccttggagagcttccggtagacgaaaggctgtccttgcctatactgaatgtaggaacacatacaattataggaaactattcaggagacggcaactacaacaatgcaagcgcaagcatgacagtgactgtaaatgaggtatccatggaattcaatcttggaatcagcgcagaagagataagctacggcgaaactgcaacagtcacccacagactgccaagccttgccaaaggaaatataacatattatctgagcgacggaacactcctcggagagcttccggtcagcgaaaacctgaccttgcctaagcttgatgttggaacatacattataatcggaaactactccggtgacgaaaacttcgacggagacagcgcaaatgtaacattgacagtcattcaggcagatcctgcattcgcaatcagcataagcgcagaggaagcggcatacggcgaaacagtcacagtcagcccagcactgccagaagatgcaacaggaacagtaatatactacctaagcaacggaacaatactaggcgaacttgcagcagacgaaaacctgaccctgccaaccttcgatgtagatgtctatgacattttggcaaactattcaggagacaagaactacctcaatgcaagcgcagaaacagcactgattgtaagccaggcagaccctggattcgaaatcagcataagcgcagaggaagcagcatacggcgaaacagtcacagcaagccctgttctgccagaagatgcaacaggaacagtgatatactacctaagcaacggaacaatactgggcgaacttcctgtagacgaaagcctgaccctgccaaccttcgatgtaggcacatacacaatccttgcaaactactcaggagacagcaactacctcgatgcaagtgcagaaaaagagctgaccctaataaaggcagactctacactggaaatcaatgacatagcctttgactacagcaagacaggctcagccgaagcaaagacttcaggcgcagaaggaatcgtcgcttcagtggcgggccatgacgaagccgtcgtcgaggtaaacggaaacgagattacagtatccggacttgatgcaggcagctacaccctaagcgtttcaacaatcgtagacgacaaccacaacagcgcaagcaagaacatcacagtaacagtcaaaaagatcgattcaagcctttcagtcgaaggccttgagctggactatggcgaatcaggcaatgttgatgcagcagctgaaggagctaccggcatcagcgccaagatcggaagcaagagcattggagtaaacggatattccatccctatttccggactggatgcaggcaaatacaacctgacagtgactacaatccctgacaggaaccacaaccctgtaacaaaaacagcccagatcactgtaaacaagatagattccacattggaagcaaatgacatggcattcgactacgagggcaccggcacaagttcagtgacatacaccggcgcaaccggcgtaaaggcttcagtaatcggacagccaaatgcaaaggtcaatgtaaagggcaaggagatttccgtctcaggattggatgccggaaactatactctggaaatcactacaatccctgacaagaaccacaaggctgtaagccaaacagtcaatgtcacagtcaacaagatcgattcaaagcttgacttcaacaaccttgtagactacggatctgcaatgaacgttaccgtaaagaccgaaggggcaagtggaataatggctgaaatcgacggaaaggaactcggcgtcgacaagtacacaatccctatctccgcattggatgcaggggaatacgaccttacagtaacaacaatccctaacagcaaccacaatcctgtcagcaagaccgtcaaggttacaataaccaagcttgactcagaactggctgtcgaagaccttgaattcgactacaacagcactggaactaccaatgcaacattcgaaggcgcaacaggcatcacagccaaagtcgtcggccagccaaacgcaacagtagagataaatggcaattccatatcagtttccggattgaagcctggaagctacaccctggaagtcactacagtccctgacgaaaaccacaaccctgttacagcaaaatctgcaataagggtaaacaagctggagaccgcaatttcagccaatgacataagcacagtccacggcgcagacaagaacctgaccgcaatcataagggacatcaacggcaatcctgtagccaacgccacagtatccgtcagcctcaacggcagcaaaaaatatgtcagcgattcaagcggacagatttcaattcctttgaagagccttgctgcaggcaactacacagctacaatcagctttgcaggcacagagatatacggcaagtcaagcgcaagcatcaaagtggctgtagacaaggagccaacatcaatagctgcaacaaacgtcaatacacagtatggccttgaagactatattacagcagtgctgaaagacggccaaggcaatcctttgggcggagtcaagctgaatgtagatctggacggcaacaggacaatcgttaccgactcaaacggacagatcaagattgctaccaaagacctgacagcaggcaactacattgcgacaatcagctttgcaggaaacggaaactacatggcatccgagtcaaatgcaatcgtcaacatcaacagaacaggcacaaggttcaacttcaagaacatgacaaccaccgcattcgactacagaatcgaaggaaggataggaaaatacttctacttccagctagtcgacgaggatggaaacccattggccaacaagaacgtatgcatcggattcaatggagtcaagtacaaccgtacaaccaatgaaaccggctggaccaagctgcagatcaacctgagatgcgtaaacctgtacacctttgcagtaacattcagcggagacgacaactacacaggcgcattcaatgtagccatgataaacgtgacacatcaaagccctaaattgactgcaggcaacaagagctataaggccagcgcaaatacaaagacattgactgcaaaattcaagagcttcaagggaaccgctattgtaggcaagaagataacctttactgtaaacggcaagaaatactcagccataaccgataaaaaaggaattgcaactgtaaacgtaagccttaacaagaaaggaacttataaatacactgcagcctttgctggagacagcacatacaagaaggtgagtgttacttcaaagctgactataaagtag

SEQ ID NO: 1649 - DNA, 555 bp, Methanobrevibacter ruminantium
  source 1..555: mol_type = genomic DNA
atgacaacaactgcattcgacttcaagatagagggaagaataggaaaatacttctacttccagcttcttgacgaatacggaaacccagtagcaggcaagaacgtttcaatcggattcagcggaaggatatataaccgtacaagcaacgagaccggatgggcaaagctgcagatcaaccttaaatattccggatactacacatttgcagtaaacttcggcggagacgatgaatatgcggcagcattcgatgttgcggcaatcaacgtaaccatccagacccctaagctgaccacaagcagcaagacatacaaggcaagcgccaagaccaagaagcttactgcaacattcaagagctataagggaactccgattccaagcaagaagattacctttaccataaacggcaagaagtacactgcaaagacaaacaagaaaggagtcgctacagttaaggtaagcctatccaagaaaggaacctataagtttacagcctcatttgcaggagacaggacatacaagaaagtcactaaatctgcaaagctgaccataaaatag

SEQ ID NO: 1650 - DNA, 165 bp, Methanobrevibacter ruminantium
  source 1..165: mol_type = genomic DNA
gtggaaatagatgactattttgacattttcggtccaagcggccacgccagtatgatgtacccgggtgaccttgctggtggtgcagagaatgttgccaattgccgttgctgggtacggtacactaatgagagaccaagcaacctaaaaccatatggaaccatataa

SEQ ID NO: 1651 - DNA, 420 bp, Methanobrevibacter ruminantium
  source 1..420: mol_type = genomic DNA
atgtatttgactaagttttgtcctaaatgcggagaagaaaacgaagatgtggctcaattctgcagtaactacggtcatgacttcaaggatgtgaatcaaagaatgaaggaatcgaaaagagagaactcttcattccccttgtctggaacaaagatactgctgtgcattgtgcttcttattgttttaattattgcagcattcctcttcactggcggaaacgctgacaagcctcaaaacattaccatgattaaggagaatacttatggcttcacttttgtcaatagaggggttcttttctataattatcacttagatgaggttttaccaatctgccggatgatttcgagggctatgactttaaggcaagattctacgatgcaaatgacacattggttaaggagtatcatgataactatatga

SEQ ID NO: 1652 - DNA, 810 bp, Methanobrevibacter ruminantium
  source 1..810: mol_type = genomic DNA
ttgaatcagctgaaagaggaagtcgactctcgaatgaaatccattgaagacaatgcaagcgaaaagaccaagcaaaagcttcaaaagaaacagaaaaagatcgatgacatatcagaagctgacatagacgaacagatagaaacactggaaaaggaaaacaagaagcttaagcgctaccaaagaatcttagatgccctgcaagagaaaatggagattgattccggaagggtcatgggcttaactgacggaatattctcaattgtaatgactcttctaatctttggaataacattgcctagcaccgaaatcctaactgatgccggactttcaagtttcattagttccatactgccaaatattggagtcacacttgtaagtttcatcttgcttgcctcattctggatttaccatcatgaatttattaaattaaaatgcttaaacttggtttacctatggcttagcatgttctatttagcgacagtctgcttcattccatttacaacaacccttattggaacatatcctgaattccgcttatcaaccaatatttttggaataaatatattgctagttattatattcttcctattgatgcttaattatgcatctaaaagaggattccttgatgaagaggtaattgagaaagataagaaatatgtccatcacacattatatataatcctaggattggcagtgattattaaccttcttgactttagtgtgaatgaaaacttcatttacttgttcttcctagtgcctattatctctacaataagggatgtacgtttcaaattaaaaaataccgagtaa

SEQ ID NO: 1653 - DNA, 2061 bp, Methanobrevibacter ruminantium
  source 1..2061: mol_type = genomic DNA
atggcaaatgataatgaaagacttcaacaattggtaagatcatcccttttggaaaacaacaaattgaaaatggaaattgtcaagcttaaggagaatgaaaactctcttaagtctgataaggaatttgatgaacttaaaaaggaatatgaagcatccttaagtgaaaaagaccaggaaatccttgacttgaaggactctcaccaaagcgaccttgatgaattgaagcttaaatatgatgatgatttaaagactaaagaaaatgaaatatctgcccttaagattcagcataagcaggatttggaaaataaatctacagagatttccaatattaaagttaagcacaatgatgaattgaagcttaaggatagcgaaatcgaccagttgaagcaaaagcatgatgaggaattgagattaaaggataatgaaatcatagatattgaatatgattttgataataagctaaagcttaaggatagcgaaataaactctcttaaggagcagtttaaccaggaccttaagagcaagagcctagagcttgcagatttccttgaaaagtttgatgaggacatcaagtccaaaaatgatgagattgatcaaatcaaagaggattacaataaggaaatcatatctaaggatatggaaatagaaagccttaccaattcattgaatgccaatattgaagttttaaacaaatcaaaggacctcctttcatcaaaggatgaaacaatcgacaagctaaatgacaaggtcaaggagctatctgatatgaacgattccctttcaaacatgaaggaatcctttgatgctgaacttactaattttaaaaccctagagttaggggagcttaacctaaagctaaggaatgccttaaatgacataacctctaaggacaatgagattcaatccatctcaaatgacctaaagattgcaaataatgacatcgttgacttgaagcgtcagcttaacgagtcaaaaacaaatgcaaatgaattgaatcttaagctggcaactgcacttagttcactcgatgacaagaatattgaaatacaggcattaaacaataggatcgcttcccagaatgagaatatcattgaccttaagaacaatcttgtaaataaggacaatcttgttgcccttcaaagggagcttgattcaagggatgttgcaataagggaaaaggatgttcagatacagttgcttaaggacaagtctgtatcaagggaagagtatgccaaggtcaagaatgagctctctaagaaggacttgcagatcaagcgcctcaatgaggtcaaggatctcttctttgaactttcagacaatagctttatggatagtcagtcctcatctgttgttaacaagacatcttcagatgataagtcattgatggagcttaataatatcaagaaagagctagagcttgcgaaagaaaacaaggtcaagttcaagatagttgaagagaatcttcttgatgatgaaaaggcaagtgccgatttagataaaaaggtaaaattggatgagagcaagctaaatacagatttagaggaattggtaaattcagagatagataacttcgatgatcttgttaagagtagggatgcaaaagctgaagaatctaagtccactgatgcatccagttctaaaggagattatacctcttctcagactaatcttgctggtttagaatcttccaaagctccacaatcagataatgcagagattcaaaagcttaaggaagagttagaatcctataaaaaacaagaggcagaatataaaaagcaacaagaggagctaaacaaatataaggacgtttatgaaaagcttacttctcctcagctaaagaacttaaactctatccaatcccaaatctattatcttcttccggatgaggcaatggacactctttcaatcaaggattatcttaatgaggttgcattcaagaacctttcatttggaaatacaaagaatatcctaaagagtctagagagaaagggatatgtggaagttgttaaaaaggaaaacgacatattcttctggaaaaagcttcctatacctgcagaataa

SEQ ID NO: 1654 - DNA, 156 bp, Methanobrevibacter ruminantium
  source 1..156: mol_type = genomic DNA
atgatttatatgatgaatctgagagaatcattgactcatatgaggagcaatggactgcctctcttaaatcaaatgaaggtaaatctgtctgtggattattataataaatatattttaacacataaaaaaacttatttttctaaatattattcataa

SEQ ID NO: 1655 - DNA, 366 bp, Methanobrevibacter ruminantium
  source 1..366: mol_type = genomic DNA
atgaataacactactaaaatattaattggagttcttatgggactgcttatcgtaggtgctgcagtaatgtttgtatcagcaactgcaataaatgatgtatctgacggaaactcttttatgggacaagtacaaaatactgcaaatcatgtgaagaatgttgcttccaatgacattaaaagtggcagcaacatcataggtggaggatctgaattcaattctcaagaaggaaatgggtatttttatcaaataaattatactgatggaaatttccgccaatatgatacaaaaacaggaaagcttataggttcaggctttaatgaagatcaatcaatccttggcaatgacgatggatttaatttagaataa

SEQ ID NO: 1656 - DNA, 1662 bp, Methanobrevibacter ruminantium
  source 1..1662: mol_type = genomic DNA
atgcaagaaaaaattgacttggtttcactgcctaaaaaatcattttggaaattgagcattcctataatagctttctgcatcttcgatgcaatctacggcatcgttgatatgctatgggtatcaaggataagtgtagaggcattttatgcaataggagtgtcaataccaatcacatctctcattttctcattcggtgattcaataggccagggaaccaattcaatgatgtctcgttttataggtacgggagactatgaaagcgcatacaatacattgatacatgggattctaatcgcaaatatcatatggctcatccttgtgctttgtcttatattcgcacaggggatactgttcaaagtggatgatgccgattcatacatattgatctttgattatatggtccctatgataatttttgcatatgtattcatcttaaacaatctgttttctgaaacctttcaggcagaagggaattcccatactccaactatcctgattatcggttcaaatatcctaaacatcatattggaccctatctttatttttgacttgaatttgggaattaagggagccgcttacgccagcgtcctatcctcccttataacattctcagtcctgatgtttttatacactcatggaaggaccaagattcctttaagccgaaagtacttcaagttccgcagctacatacttgttgaaatatttaaggttacctttccaaacttcctggatgatgcaatctggagctttacaatgtctttcattaatgtcatattgattgggacaatgggagagatcggaccgatattatactccgtgtcaaacaagataaggtcattgctcaatgcccctaccaaaggctatggaaggggattgatgagcgtaacagggcatttgtttggagcggagcaattcgataagctgaaggaaatgtataagtatgtgcttaagatagcagtctgcacatcactcgttataatgattgtcttcttcttcgttagaaactgggcatttggcctattttcaattacaggaatggacaatgaaatattttggatagctgtcggcggaatcattatgatgaccatactgccattttccacaatctcatcaaagatgctggacggatttggtaaaagtctctattccctgctcattacaataatcaaggtcgcaattgaaattgcattgatatccctcttgacacaatacttgaaggatggctcttcagtcttgattggaattatactttctgaaatcatctcttctatagtatattataaattcttaggatacctattcgaccacttcgataagaaatatgaattcaagtacactgtaaaggcatttacaataaaaaggaaagataaaagagaaaaaagaagagaaagaatcagacaaaatattgaagagaaaaagttgagaaaggaagagaaaaaggaagagtttagacagaatattgaagagaaaaagttgagaaaggaagagaaaaaggaagagtttagacagaatattgaagagaaaaagatgagaaaggaagagaaaaaggaagagtttagacagaatattgaagagaaaaaggcgagaaaggaagagaaaaaagaggaatttagacaaggtcttgaagagagaaaagaaaaaagaaaagagaaaatagattaa

SEQ ID NO: 1657 - DNA, 1197 bp, Methanobrevibacter ruminantium
  source 1..1197: mol_type = genomic DNA
atgggttcaaaaaattttcaatatctggatgaattgattcacagcagtgcaaatgagattattttggattcagatattgtattagattttgatgaagaatctgaatatgatgatggaatcaaactggatgttgatgacttaactattgatggaaatgggcatgtcattgatgccaaggatgggctgtgcagattaaaaaatcatgcgaaaaacatcacatttaagaatctttgctttaaaaatttcaaatccaagtttccaatatcaaatcaatctggtgatttgatatttgagaattgcagatttattcacaatcaaggtacaatctataattattttggaaacatatggctaaagaattgttgtttttatagaaattacttatcaaggtcctcttcaggatattcagtatgcatctataatgcaaaggattccaaggcattcgttagcgattctcatttttatcaaaatgaggttaactatccccattatgggctgattttaaatgacgggcttattgaagtcaagaactctatctttcatgagaacaagggtgaagattgtgaaatttgtgtgatttttaaccgaaagggggaattgcttgtggataactgcaaatttaaagacaataaaaatgtatattgcagttatgattttgcagaattgattgtttccattttaaatgaggcaggaaaggtttccttaagcaattccacttttgaaaatgaaaacagaatccttggttcaattaaaaatatgggcatttgccgtataatcgattgcaaattcaaagatagtctgatatataatagtcagtggtattctagcgtttcccgtcctgatgaacttgattttggcccatatctggaagttgaagattcaagtttcgccaataaatatgatgagggagtcattgcaaacagcggactttgtaaaatagcttcatgcaatattgatggaagatcatatttgaacaatgatgatgttctattcattgatgaaaaggactttaatttattaaaggataatattattaattctggagagattgtttttgattatgatagggatgttcctatctatgaatcctttaaaggtcatggcaaatctaatggcacaaattccaatcttgaagatgatttggataatgacaagagcgatgatggttatcctccattgggtgcgttgtttagatag

SEQ ID NO: 1658 - DNA, 642 bp, Methanobrevibacter ruminantium
  source 1..642: mol_type = genomic DNA
atggctatggatttgacagatattggaattgaagaaggacagaaatatgaagggatttacactaccatgagcaaggacggtgtaaaaaatgcagcgccaataggaattgtatgcaaaggcaaggacaaacttggatgcagattatttgtcggtaccaaaaccctcaaaaacattatggaaaccaggaaatatgttgtaaatataacctttgatcctataaattttgtaaattcaaccatcggaaacttggatattgaagagtttacagatgatgaggacattgcaatattaaaaaatgcggaagcatatgtcatttgtgaggtcacagacattaggaaaatggatccgattaaggaccatataacatcaaacggggaagcttatatcataagcagtgatgttgtcaaaatcgtcaaaaacaatccatgtgcaaaggctttaaacaggggagtattcgcacttctggaatgccttacaaactatacccgacttgaccttgtaagcaaagagcagcaggattatttcatcggaaggttcaatgaaaacaatcgcatgattaagagggtttcaggacctgatacgataaaagccatggagattcttaaaaacagcatgatagaaaagggttttgatgttgaatag

SEQ ID NO: 1659 - DNA, 1071 bp, Methanobrevibacter ruminantium
  source 1..1071: mol_type = genomic DNA
atgtcacgtaattttaaatatcttgatgatttgattctaagaaaggataaaaaaatagttttggattttgatatagaattaactgaggatgaggagcttgaatattgggatggaattaaattagataaagatgttcttattgatggtaaaggccataggattgatgcatgtgggaaagcaagaatatttgattgttccggcaaacatatcagacttaaaaacataatattgaaaaatggaaaagcaataaatggcggggcaataaagatttctaaggactctaatttggaaattatagaatccaaatttatttataacattgcaaatggaacatgcaatgaaggaaatggcggagcaatattcaataaaggaaatttaaaactattgaaatccacatttgagaataatatggctaaaggagagggtggagcaataagaaattacggtaagttaaatattgcagaatcaatatttaataaaaacaaagcaaaaagaggcgccgcaataatcaatcgtaatgatttgacaatatccaaaaccatatttgatgataacactgcagaatggtatggtggagcaatatttcataattggggccaagcaagcattttggaatctgaattcattaacaattcagttacagaagatcatggcaatggtggggccatatgcaattggatgcgatctcaattgaacataaccaaatcctcttttaagcaaaacatttcaggatctgctggagcaatttacaatgctagtgattgtaagttgaatataagccagtctgcctttaaagaaaattcagctagatatgctggtgcaatagttaattatggcaaggcaagcattcaaaaatccgtatttggggcaaataaatcaaataagtttgaaggtggtgcaatcttcaattattctgaagggaacctcattatttcacaatctgtgtttgaatcaaacatatccgaaagggttggcggagcaatatattcagaaaatgataattctttaaaattgaataattgtaaatttaaacacaacaagccagataattttaatgtaggttctaaataa

SEQ ID NO: 1660 - DNA, 966 bp, Methanobrevibacter ruminantium
  source 1..966: mol_type = genomic DNA
atgaagcatagattaaatttagataataaagacccaaattatattttgttgaaagaaatatttaaaattatggattctagaaaatccaaaagtatattagcatcctatggatttaaaaacttaaatagaacaatatttacttttaaaattatatttataagtatgttctttggaattgacattccattcattttaaacgagcttaaatccaaaaaagaacttcgcaaatactttaatatttctgaagttttgactgcagatcaagtttataaaattttttcagaaataaactctgaaaaacttataaaatgtttaaacagaatcttaaactcaagaaatatggtcaaaaggagaggaaaaaagactttcattgtcgatgcgactccagtggacttggatatcaatttccgcagaaataaaaagagcaaagaacatctcagaaaattgaatctcaaatggagttattcttcctctaaaggctattatattggatttaaagcgactgttgtgatggattacgattctatgaatcctgtttgcattttaatccattctggagctccaaatgatgcaggactttttgaagagattttagaaaaccttcaaaaaagacgaataatcagaaaaggagatacattaatctttgataaaggatattacggctataaaaactaccaaataggaattggcaagtataaaatcgttcctttcatttttccgaaagaaaaattcaacagaacaagacttgatgatattttaacctatccattagccgtatttaacaaaacaaagaaaataatggaagaaaaaagattatacaacaaattaaaaaaggaattattagaaaaattagattcatgggagaaatttaaaccaataaggggcaaaatcgaagatttttttcaaattattgaaacaaggcttgaatatgagagaaatccacaaatatactccaaaatcagttga

SEQ ID NO: 1661 - DNA, 303 bp, Methanobrevibacter ruminantium
  source 1..303: mol_type = genomic DNA
atgtcacaagaaagatataaacacattcgcgaaagtctttttgattatatcaatgcatttttaatcaacaagtatgatgaattatattattttaatatgtacgaatccgctgaaaatatgaattgggatgtagaatacatattcaaattaaaatattcattaacattccatgaaaaaaagaatctagagattagaataagaaaagacttgaagaaatttttaaaagaaaaatttgaaatgaacatttatgaacttgctattttaattattctagaggataatgaattgcattccaaaatttag

SEQ ID NO: 1662 - DNA, 240 bp, Methanobrevibacter ruminantium
  source 1..240: mol_type = genomic DNA
atgttttatattgaaggagaaaatataaaatatgaaattttaccatataaaaaagggaaaaaagtaattatttaccttaaaaaaactgaaaacggatttgttagaaaaaacaaatgttttggaacacattatttagaacagatttttgattataacaataaattattaaaagaaacaatatatgaaaatccaaattttgtagacttaacaaattttccaattgacctagattacgattaa

SEQ ID NO: 1663 - DNA, 150 bp, Methanobrevibacter ruminantium
  source 1..150: mol_type = genomic DNA
atgaatttggaggtttttaagatggctagaatattaattccaaattatgaattcgttaaaaattggtctgaagatgaattaaacgattttttaaccacacctgcaggtatcccacatgaacttatgcatatagttcgtaaagttgtttaa

SEQ ID NO: 1664 - DNA, 735 bp, Methanobrevibacter ruminantium
  source 1..735: mol_type = genomic DNA
atggaatgttatcatttgcttcgtaaagagaattattctttagtaaggaaaaaaatagagaattttttagaaaaatatcctctaaaaatatctgaagagaattatttttattttaataataaatttgaagaaaatttttattttatcttttttattcactcaaaatatgtgaatgtttcccaaaaagaagatgtattgaaaaattataaaatcttaaaatatgactatccatttattttagctgcttatggagaaacattaatcgaatttgatgagttttctaaagcaaaatactttttagaattagctaataaaataagtccatttgatattgggattttaagacaattactaagaatttactgtatagaattagatagggagaaaattgaagaaatttttaattatgcattagacattgtttatgatgaatattaccttttttatatttatgagtttttatcagaatattatttacaaataaatcaaatagaaattggtaatttattatctcaaattgctaaagaagagtcatttaatgtagctgaaaagcactacataaaagatttatttaataaatatgatataaatttggggtttaatgaagaattaatttctcatatggaatatattgtgaatcttttaaataaaaaaggggacttcactgaatcttatcttttaaatcaggattgtgctgatttaaaaaggtttaatagaaaatttaaatattattga

SEQ ID NO: 1665 - DNA, 405 bp, Methanobrevibacter ruminantium
  source 1..405: mol_type = genomic DNA
atgtcaaatattgaaaaaatcaattcagaaataaaagattatgtcaattatgtccaaaaaggaggtaaattagaacctttttttgaagatatttgtttagtaactactgaattagttggatttagaaaaatcagtaatttcgaagatcttttttcacaatttaaaaagggagattatttagcattatttagggatacacaaaatgaattagatgaattagctattgttgttaaatggaataatttaatgataggttatgttcctagaaaacacattcctatattgtctagtttaatggattctggaaaagaaatctatgctataattgatgatttaatattagatgaactatttaaagatcttttttttgagacagtcaaaataaaaatctttttaaaagagtaa

SEQ ID NO: 1666 - DNA, 759 bp, Methanobrevibacter ruminantium
  source 1..759: mol_type = genomic DNA
atgtcaatgattgttcattcagagtataaaaaattaaaggaccatttatatgatttagtttatgaatatgaagatttaataaatcatatctgtccaaatatagaaatggaatatctccttaaatttggaatatatgaatatgaattatataagaaagagttagaattaaataaacttaaatttaagttaaaattacttcaaactgaaattaatcatcaaaatgaattagatttaaacgaaatagataaaaaagttatagataaatatacggagtatgcaaataatcttaaaaactctatgaatgaacttgaaaacattataaaacataaagataactattttcaattagatgaagaagatgaaaaagaacttaaaaggatttataaaatacttataaaaaaattacatcctgatttaaattttcatcaagaaaattttaaaaaagaattatttatcaaagttactaatgcatataaaaatggtgatttggaggaattaaaagcattatatgctatgctacctgatgaagatattgaagaaaaatccagtttaaatgaattaaaagaattaatacattcatttgaaataaagattgaaaaaattaaaaatgaatatccttataataagttagatctactttcaaatgaaaaagaaattggggagtataaaattaatattcaatatttaatagattcatgcaatgaggaaatagaagaatatagtaataagataaatgaaattattgaaaatcagcattaa

SEQ ID NO: 1667 - DNA, 1050 bp, Methanobrevibacter ruminantium
  source 1..1050: mol_type = genomic DNA
atggtaaaagtaggtgtacttggtgcaactggaatggtaggtcaaagatttatccaattattggctgatcatcctgattttgaaatagctgctcttgcagcatcctcaagatctgcaggcaaaaaatatgaagacgctaccacttggtatatgaatgatgaaatgccggaatctgtaagggacattaaagtaattgaaactgaccctgcacatatggataaggatgtggaaattgtattctcctcacttcctgctgattttgctgcaaaagtcgagccagaatatgcaaaggattttgtagtggcttcaaatgctagtgcaatgcgtatgaaaaaggacatacctttagtcattccagaagtcaacccacaattcttggacatgattgaagcacaacagaaaaacaacaactgggacggtttcattgtaacaaaccctaactgttcaaccattgctttgactttaactttaaaaccgatttatgacaacttcaacattaatagaatctatgtttcaaccatgcaagctgtttcaggagcaggctataatggtgttccttcaatggctatcttagacaacttggttccatacattggcggtgaagaagagaaaatggaaagtgaaactttgcatcttttaggttcccttgatggtgatgaagttgttcctgcaaacttttctctaagcgcatcatgccacagagtgcctgtcattgacggtcacactgaagcggtatttgtagagttggatgaagaggcagacattgacaagatcaaaaagaccatggctgacttcagaggacttccacaggaattaggtcttcattctgctccagaacaacctgttatcgtaaaagaagaagatgacagacctcaaccaagaatggacagaatggcttatggcggtatggctgcaaccgttggtaggctcagaaaagatcaagcatttgataacagcttcaaatatgttcttgtaggacataatacaattagaggcgctgctggtgcttctattttgaatgctgaattgattaataaacaaatattataa

SEQ ID NO: 1668 - DNA, 819 bp, Methanobrevibacter ruminantium
  source 1..819: mol_type = genomic DNA
atgataaaagttgctgtaactggagcctctggaagaatgggctctggaattataagaaaaatctctgaacaagatgatatggaagtagtggctgctatcgaaatgccaaacactcctttagctggtgtagacgctggtgaaaaagcaggcattggcaaaatcggagtgccaattgtaggttcagaggatttggaaaaagctttggaagaatctggagctgaagtattagttgatttcactatcgctcctgctgctgttgaaactattaaaagagctgccgattgcggagtaaaccttgttgttggaaccaccggatttactgaagagcaagctcaaggaaatgcagatgtaatcaaggaaaaaaacatcaaagcagtaatttcctctaacttctccattggagtaaatgtattcttcaaagttctaaaggacttgactcctattttaaatgactttgacattgaaatcattgaagctcaccacaaccaaaaggcagacgctccttctggaactgctatgactgcatttgaagttgttgcaggtgctttaggaagaaacccagaagaagttggcgtttatggtagacaaggtcaagtaggcaaaagaaccaaagaggaaatcggtatgcatgcagtccgtggaggagacattgtaggagaccacactgtattgtatgtcggtgatggtgaaagacttgaagtaaaacacatggcacataccagggaagtgttcattgccggtgttatcagagccttaagattcgtaggttccgcagaacctggaaaagtaaatgatatgactgatgttttaggaatttaa

SEQ ID NO: 1669 - DNA, 894 bp, Methanobrevibacter ruminantium
  source 1..894: mol_type = genomic DNA
atgcgttttgaaggaacagctgttgctatggtaactcctttccatgaggacggatccatagacgaagaaggatacagacaaaatattaactggttgattgacaacgatgtagacggtttggttgctgtaggaactacaggagaatctgctaccttgacccatgatgaacacagaaaagttcttgacatcttgattgatgaggttgacggcagagtcaccacaatagccggtaccggaagcaatgcaacaagtgaagcattggacttgactaaatatgcagatgatgcaggggcagacatggctcttctaatcactccatactataacaaaccacaacaacatggagtaattgagcattatacccaaattgcaaactctgtagacattgacttgattgcttacaatgtcccatcccgtaccagccttgacatggctcctcaaaccattgtcgagcttgcaaaagtggataacattgctgcattgaaagaggcttcatctgatgttgataaagcatcaaaaaccatgaaactcttaagggacgaaggtttggaagatgaaatcgtaatcctctccggtagtgatgaattgacccttcctcttatgtcaatcggtgcaagaggtgtaatcagtgcttctgcaaacatcgatcctagaaccatggttcaaatggtaaacaacattttggatggaaactatgacaaggctatggaattgcattaccaacaatatgacttaatcaaagccttattcattgaaaccagcccagcacctgcaaaagaagcattgaacatgatgggaatgcctgcaggtccattaagattgcctttagttcctatgttagaggaaaacaaagcaatcctaagaaaagcattggaagatgctggaatattatag

SEQ ID NO: 1670 - DNA, 1218 bp, Methanobrevibacter ruminantium
  source 1..1218: mol_type = genomic DNA
atgggattaattgtagccaaatttggcggtacttcgattggaaatggtaaaaggattaggaaagctgcacaatctgttgttaatgagtatatggatggcaagaaggttgtcgttgttgtttcagctatcaataagactactgatgaattagtggctattgctgatgagtccattggaaaagaagttaccgaaaagcaattggcggaaattttatccctgggtgagagaaccagcataagagtattttcctcagtccttgaatccttgggagtgaaatccgaatacattgacccaagccatgaattatggccagtcataactgatgacaactatggaaaggctcaaatcgactttgaaagaactgaagagcaagctcaaggtcttttatcacttttggagcaaggtatcattccagtggtatgcggattcttaggaagaactgaaaatggggaagtgacaaccctcggaagaggcggaagcgatgtcactgcattccttttaggccactgccttaaagcagataatgtaatcattgttaccgatgttgacggagtcatgtcaactgacccaaggaagatagatgaggctgaaaagcttgattacatttcagttgaagagatgagggatttagctacacacggcgctcaagtattgcatccacatgccttaagatttaaagatcctgaaataaaagcaaagattatcagttttgaaaaaggagacttatcagaccctggaacagagattgtcggcccttttgaagattcaatgggcaaaaaagtatgcctacaccatgagcctatttctgtagtggctgtagtgggagaggacttgcttaatcaaataggacttcttgcaaagatgaccagcttagttgctgatgcaaacatcaacatctacggcatctcagcaggccagaactcaatcacattgttcctcgataaggaggaagcggatgacgcttatcatttattgcatgatttggtcattgcagaggataacttaagctccatctccttaggaagggacattgcaatgctcaccatgatcaatcctgattttattgaaactccaggagtaatcactgaaattaccaatcctctaaaggaaaatcatattaatattgttgaaatttcatcatcccagactgcaattgttttattcatcaattgggaagatggaaaggcagcatatgatcttataaaggaagttttataa

SEQ ID NO: 1671 - DNA, 198 bp, Methanobrevibacter ruminantium
  source 1..198: mol_type = genomic DNA
atgggaaatattagaacttcatttgtaaaacgtatatctaaagaattaattgaaactcacaaaggtaaatttaccaccgattttgaagaaaacaagattttagtagctgaatactctaccgtaagcactaaacatttaagaaacaaaattgctggttacattaccagattagtcagacaagaagcaaacaaagcttaa

SEQ ID NO: 1672 - DNA, 324 bp, Methanobrevibacter ruminantium
  source 1..324: mol_type = genomic DNA
gtggacgaaaaggaattgatgagtatatatgaaactgaagaagaagctcgcaatgttcttttaaagtctagaaaaagaatcgatgaaattgataatgatttagttaacttaattagtgaaagaacttcacttgctaaggatatagtttcagctaaggtttttttaggcatggaaatttatgacaaatccagagaagatgaagtccatgccaaggtaagtaaattagctcaagaaaaaaatatagatgatgatattcttagcgatattatgaacatgctaacaattttaagtaaaaataaacagagagaatttttggaggaatga

SEQ ID NO: 1673 - DNA, 870 bp, Methanobrevibacter ruminantium
  source 1..870: mol_type = genomic DNA
atgcattacataaacgccaagacaatattatcaagcaaaaacggaatgaacctatataggggatgctcccatggctgcatctactgcgattcaagaagcaagatatacaatatgaaccatgactttgaagacattgaagtaaaggaaaacggaatcagactccttaagaatgccttaaagagaaaaagggaaaaggtcatgattggaacaggatcaatgacagacccatacattcctcttgagagcaatctaaagtttatgagagaatcattggaactcatttacaaatacggccatggatttacctgcataaccaaatcagacctcatccttagagacctggacctaatcaagaaaataaatgaaaatacaaaggcagttgttcagatgaccctgacaacagctgatgatgagctatgcaagatacttgaacctaacgtctgcacaacaaaggaaagagtcaatgtcctaaagaccttaaacgaaaacaatatccctacaatcgtttggctatgcccaatcctaccttatataaacgatacagaggaaaacattaatcaaatattggattactgcattgatgcaaatgtaaaaggaattttatgctttgggatgggaatgaccctaagagaaggaaacagagaatatttttataaaaaactagatgagcatttccctggactaaaagaaagatatagaaggacttataggaatagctatgggataaaaagccctaataataaaaaactaatgaagatattcctccaaaggactgatgaacatggcattatgaacaatatagaggatatatttgaatatcttcatgagtttccaagccatgagagcacaaagcagactactttgatgtaa

SEQ ID NO: 1674 - DNA, 918 bp, Methanobrevibacter ruminantium
  source 1..918: mol_type = genomic DNA
gtgattgatttggcaaaaatagtaaagtctccaggttctgctacagttataaatgcaatatcaaccggttttggttctgcatttggaattgatttgaatataacttgtgaagcggaattctcttcacaaggcattgactgttcatctgacttgggagtggaccccaatttaatgaacatatgtgtaaaaagtgttttaagtcattataatattggaaaagacttgtctcaggatgatcttttaaatgatttggattttggaaatggtgaaggaattaaaattagaacaaaatccaatcttcctttaggctctggcctttcaagtagcagtgccttatctaattctgttgttatggcaactgcaggcttgatttcagatgaatttttcttaaagcctttaagcgattttgaaatgattaatcttggaattgacgcatctcttgaggctggagtaaccataaccggagcttttgatgatgcttctgcatccttttttggaggacttaccataactgataatatggaaaggaagattttgcatcaggagaaattgcctgaatatgatattttggtttttatgcctgataaggagtcattaagcggttcatctgatgtaaataggatgaaattggtagggtcatatgttaagatggcttttgaagaggctatgaataagaggtatcttaaggcattgactttgaatggtcttttgtatggaactgcacttaattttgataataatattgccttggatgcccttagtgcaggggctttagcttctggattatctggaacaggatcctcttttgttgctattgttgaagaggatacaattgatgatgttaaggatgcttgggcttcatttgatggaaatgttattgaaacaaaagtaaataatgaaggaactaggtttatttag

SEQ ID NO: 1675 - DNA, 858 bp, Methanobrevibacter ruminantium
  source 1..858: mol_type = genomic DNA
atgagcgaaaataatagaactttgattacaataggaatcggcgcttttattataattgccatattattattaatagcccttgttttaccattcagtaatttggcagttgacaatgatgaaatagcagtaatcaccataagcgacacaatcacctatggagacaatagcacttctgcccatacaagcaaaaaggaaattgaaagcgaacttaacgatgcctactcaaatccaaagattaaaggaattgttttggatatagacagtggaggaggaagcttggtggctagcgatgaaatttcagacttaataaagaaatctcctaaaccaattgtaagctatattggagataaaggatttgatgaagcttatcaaatagcaagtgccactgattatattttcgcaagctcctcatcatctcttggaggaatcggccttagctatataaatacagacagatactccgatgaaaaagtcacaggagtctttaatgaaaagtatctaaaaaacaataaaacaaaaagcaattctaaagtcaaaagtgcaaatgacttagcaaatgctcaaaagatggttgatcaggactatactttattcattaagaaaatcgctgaaaacagaaacttaacagcagattatgttgcggaactggcacatggcaaaaaatataatggaaatgaagctaaaaaactaggattgattgatgaaatcggctctaaaagccaatcaatagaaaaagcagctaaattgtcaaatgcaactaattatacagtaatcacttatccagagcctcaaaagaaattaactgagattttaggtgaaaatgatatttttaaccttaaagagttaattaaaatctaa

SEQ ID NO: 1676 - DNA, 252 bp, Methanobrevibacter ruminantium
  source 1..252: mol_type = genomic DNA
atggtatataaagtagaagtatttacttccccaacctgccctcattgtccaggagctgtaagactcgtagaaaaagcaaaagaagaattaggagatgctcttgatgtaaccatttacaatacagcagaagctgaagctatggaaattgctagaaaataccacatcatgtatgttcctacaatcattattgatggtgaaatcaaattccaaggagctcctagctacgatgaattaatggcagaattaaaataa

SEQ ID NO: 1677 - DNA, 1107 bp, Methanobrevibacter ruminantium
  source 1..1107: mol_type = genomic DNA
atgaaaatagcaatggtaggtcaattcccaccccatatcggaggagttggagtacatatacacagcctagcaaagcaactaatcagggaaggccatgaagtatatgtgattacataccctcacaaggacattaaggacattgacggaattcatgtcattggaacaaaaggaataaatataccaggccttagaggattgatgtttggaattaatgccaaaaaagaattaaaaaagcttataaatgaagaaaacattgatataatccacggccattacctattccctgcaggatgggccagcgttaaggctggaaaatcaacaaataccaaaacctatgtgactgcacatggatcagatatctttgaaatgtataaaaaacaaaaatttatgaggccctttataaagaaagtgctctctgatgcagatatagtccttgcagtaagcaatgcattgaaagatgaaataataaagattgatgttccaggcataaaggaaaagattaagattcattggaattcagtagacattgaaaaatacaaaactacagaagagaataaggataagtttaaaaaggaactggttaatgaatacaatctagacccaaataagccaatgattctttttgtaggaaatataattaaaagaaaaaatgtgaatctccttgttgaagccaaaagactaattaaaaccgatgcaaatcttgtaattgttggagaaggttctgaattaggaaagttaaaggaaaaagtaaagaatgatgataaaatcaatgacgtttactttacaggagctagaagagatgtggaagacatctatccaagctgtgacttgcttgtactgccttcctttagcgaaagtttcggacttgttttaatagaagcattagcatgtggaaatgcagtcattggaagcaatataggcggaataaaagagataatcacagaagacgttggattattgattaatccaaatgatagccaagacctagccaatgcaattgataagatacttcaggatgaagaattgttgaataaatttaaatcaaatgcaagaaatcgagccaaagacttttctaaaactgaattgccttatgatgagctgaaataa

SEQ ID NO: 1678 - DNA, 471 bp, Methanobrevibacter ruminantium
  source 1..471: mol_type = genomic DNA
atgggagaaaaagaatttactcatttaacagaaagtggagttcatatggttgaagttggtgcaaaagcccaacagagaagaactgcaatagctagcggaaaaatccatcttcaaaaagaaacaatcagaatgatagaaaatgccgaaatcaagaagggaaatgtattaactacagcccaaatcgctggaattcaagcagttaaaaagacatcagaccttatccctctttgccatccgttgaatcttagtggaatagacatagaatttgaagttgaagaagaggaaatcactgcaatctgcgaatgcagattaactggccaaactggagtggaaatggaagccataacaggagtaagcgtagcccttcttacaatatgggatatgacaaaagctgtagaaaaagatgaaaacggacagtatcctaatacaagaatttcagacattaaagtccttaaaaaagaaaaaatataa

SEQ ID NO: 1679 - DNA, 2073 bp, Methanobrevibacter ruminantium
  source 1..2073: mol_type = genomic DNA
atgaaaaacattcccactaatattaaacaaataataaatgattgttatccatacattaaagagttcaatcccgcccaaaaggctgtaattgaatctggataccttgaaaatgataagaattacatcatagccattccaactgcaagcggtaagactgtgcttggagtcatggctgcacttcaatcaatcctatctggaggaaaggcagtatacgctgcccctctcatatccatacagaatgagaaggtcaaggaattcaagaaatttgaagagcatgggatttcagttggaaagcatccatcatcctctgacttgtcaatcatggtctttgaatcatttgatgtcctgacacgattttcctgggatgtattaagagatgttgacacaataattatcgacgaattccatatgattggagaatattccagggggcctacaatcgaatgtgcaataacaagggctaaaatcataaatccaaacttaagaatcattgcattatctgcaacattggaaaatatgtctgaaattgaaaattggcttgatgctacagttatagaacacgattataggccagttccattgaataaagacgtattggatacagaaatgttcaacactaaaaataaaaatgatgtagtggtaaaagttattgaaaaagcaattgaagatgattcacaggcattaagcttcgtatcaacaagaaggttcacagaaagccttgcaaactatgttgctgaaaagctaaagaaaaaaaccacagatgaacaaaagaaaaggtttaaggaagttgcagacaagattcttgaagttccagagaaaaaaggctcaagacctacctccacctgcttgaaacttgctgaaagctgtgagaacggtgcagttttccaccatgcaggactcttttccgaacagaaggaaatcattgaagaggaatttagaaatggaaacatcctaatgattgcagcaacaccaagtttgatgtatggagttaacctcccttccaaatatgttgttatacgagattacactagatggacctcccaaggacctcaagcgattccagtatttgactacgagcagatgtccggaagagctggaaggccacaatacgacaatgcaggatattcctatttgattgcaaaatcaatggaggaagcttcaaccctggaagagcgatacatctatggagacatagagcctacaaactccaaactgattgaaaataaggatgcagtattcaggcaaatcatagcccaagtggcttccaccatatcaaagacacctgaagacttagaagatttctttaagaaaacattctatggctatcagatgacaaataacagttcaatgagctttttcgcagaggaaagcctaaaattcgaaatacagaatgcattggaatttctgcttcaaaatcagatattgcaggctacaccaagtggacttaaaacaacagcacttggaaacttaatagccaaatccaactatacagtggaaactgcagtaaaggttaaggaatatgcgaacttggttgaccaattcagtgcagaggaacttatctatcatttagcgcagactcctgatatgcctctcatttcatttaagggcagacgctctaaagacccagtgcgagaaaagcttgctaattatggcctatttgcattggagatagcaaatccagaggcaactgccgtgtcccttatcgaatggatcgatgagagaaacgaatatgagatagaaaatgcctataatgtctatgcgtcatctacaagacgggctgcatatgaagcgtccctacttgtcagattcactaaaaacacattggaagttcttggaaaatacaattattcaaaggatttggacttcctatcagcaagactctattacggagtaaaggaggacataattcctcttgtgattggagtaaaacgcttaggaagaaaacgtgcaagagcattggtaaacacattcggagaggatttaagacctgtttcagaaaatgaacttcaaaaagtagatggaatcggacctaaattagctaaaagcataagaaactttgcagacaattattga

SEQ ID NO: 1680 - DNA, 303 bp, Methanobrevibacter ruminantium
  source 1..303: mol_type = genomic DNA
atgagtttttgtgacattcgtggtgaaactatagatatcggcgcttttattagatacactggaacaggtaccataagcaaagttgttgatttaaaggaagaagataaacagcaatgggttaaattggatgaacctgctttatggtatgctgcagattctttagaagtggtcgatgaaaaagatctcattaatgttgagactgtggatagagatactcttgaaaaagttaaagacattaaagaaggctacgaagaacttaatgctaatttaaatgatattcaaggctgtgaaggtggaggttaa

SEQ ID NO: 1681 - DNA, 456 bp, Methanobrevibacter ruminantium
  source 1..456: mol_type = genomic DNA
atgaaaattaaacaactattaggtatgttagttttagacgataacgcaaacgaaattggtaaaattattgacgcagattttgaacctgaaactggtgcaattacaaaaattgtagtcagccttaagaaaaatttcctcacttccgaccaattggatgtagagtataatgatgtaaaaagcattggagattacgtattattgaaaattacaattgataaggaaactaaaataaaagaagctgaagaagctaagaaagctgaaaaagaagctaagaaagaagctaaaaaggctgaaagagaagccaaaaaagcagctaaagaagctgaaaaagaagaagcagtagctgaacaaatcgaaaaacaagtggaagttgttgaagctgaaattgttgacgatgctgaagaagctgaggaagcagtagaagctgaagaaactaccgatgttaaagtagaatag

SEQ ID NO: 1682 - DNA, 1707 bp, Methanobrevibacter ruminantium
  source 1..1707: mol_type = genomic DNA
atggataaagcatgcagaatcatcatagaagacattatgaatggaaaaataactactcgacgtgaattggaagtagaaaaaagacagctatgcagagatagaaaattaaaaaagttcatgagcaattcagttatcctagagcatgcaagccttgaagagaaaaagatcgtatcaaacctattaaggaaaaagccaactagaactatctctggagtggctatagtggctgtcatgtgccatccacaccaatgtcctcatggaagatgtttctattgccctgaaagtgatattgcacctccaagttataccggagaagagcctgctgcattaaggggcagaatgttcaagttccacccttatgtacaatgctataaccgattaaagcaacttcataaggtaggccatcctatcgacaaggtggaacttatcatcatgggaggaacattcccttcaaaggatatctgctatcaggaatggttcgtttcacaatgtctaaaggctatgtgcgattttggaattatccttgaaaacatcagccaaatcgatgatatcgaatcaataaagagagaaggccttttaaaataccatccttattcaaacaatgaattgaagacttatccccctaacgactatgtcctaatagatgacattcaaaggataaatgaaaattcaaaggtcagatgcattggaatgacctttgagactcgtccagactactgtaaagagccccatgtagatagaatgcttgacatgggagttacaagagtagaattaggagttcagacaatctataatcacatctacgaaaagataaaaagaggccataaggtagaggatgtgattgaggcaaacagaatcctaagggattccggagtaaaggtagccatgcatatgatgccagggctatttccacttgcaagggagaatccaagaatagaacaatgtccagaacaggacctaaagatgtttaaggaaatcttcaacaatgaaaactttaagccagatatgcttaaaatctatccttgccttgtaactgaaggaagcgaacttcacaagctttataaggaaggcaaatacaggccttacactgatgaagaggctgtagaattgatagttcaaatcaagaagatccttcccaaatgggttagaaccatgagaatccaaagggacattccatctaccttgattgaagcaggagtcaagaaatcaaaccttggcgaattggtctataaccgacttgaagaggaaaaaataaactgccaatgcataagatgcagggaaataggccataagaaaacagaacaggactattcaattgatgattacagattattccaagaagattacactgcagtgggaggtaaggaacacttcctatccatagaagataagaatgaggaaagcttagcaggattcttaaggcttagaatgcctacagaacaagcccatagagaagagattagagacaatactgcaatagtaagagaactccatgtctatgggaacatgattaagataggccataagggaaacgccataggtcagcataccggatttggagaaagacttcttaagaaagctgaagagataagcatcgaccaaaacaaggaagagcttttaataatcagtggtatcggagcacgaaactattatcgtaagtttggttatgaacgtaaaggtccttatatggctaaaaaactaatctaa

SEQ ID NO: 1683 - DNA, 723 bp, Methanobrevibacter ruminantium
  source 1..723: mol_type = genomic DNA
atgattacagcagaagaattagctcaatatatcgaatttactaatttagataatactgcaactgaagaacaaatgaaagcattctttgataaggcaaaagaatataacttttatgcagtagtagtccttccacactatgttaaattagcaaaagaagaattaaaagacactgatatgaaagttgtaactgttgtcgacttcccattaggtgctggaaccactgaaagcaaagttgcagaggcaaaagatgcaatcaaaaacggcgccgatgagattgacatgatggcaaacatccctgcaatcaaggagcacaactttaaggcagttaaagaagacatcattgcagttaaagaggcagttggagatcatatcctaaaagtcatcattgaaaatgcccttcttactgttgatgaaaaggcaggagcttctgcaatgtgtgaagcgggaggtgcagactttgtcaagacctcaagcggattcaatggaaatgaacatttctatgctttaatggaaagcttaagaatcatgaaaaagaacgctccacataaggaaatcaaggcagctggcggaattaacaattataaattagtaaataatgtcattgcagcaggagttactaaaatcggaacttcctcaggacacattattatggaccagttcaatcatgtgatggacaatcaaaaggtaagtccagaacagaaaacaggcccaaggcttatttag

SEQ ID NO: 1684 - DNA, 201 bp, Methanobrevibacter ruminantium
  source 1..201: mol_type = genomic DNA
atgagtgaattaccaatcgcacctgtcggtcgtatcttaaaaaatgctggcgcacaaagaattagcgatgatgcaaaagttgcattagctgaagctttagaagaaaaaggtgacgaattagctaaaaaagcagttaatttcgcacgccacgctggtagaaaaaccgtaaaagctgaagatatcaaattagcaattaaataa

SEQ ID NO: 1685 - DNA, 1287 bp, Methanobrevibacter ruminantium
  source 1..1287: mol_type = genomic DNA
gtggataatatgaaagtatttatagaaacctatggatgtacatttaatcaagcggattctgaaattatggcagggatattgaatgaaaacaatatcgggcttgtctccactgaagaggaggctgatgccattattgtaaacacctgctatgtaaaattgcctactgaaagcaaggtaataaacagaatcaaaaaccttcaaaagcagtaccctgataagaagattatcgttggaggatgcatggttgaagtggatcctaaaaagcttgaggcaatcggacctaattgctcatggattggtcctcaccaattaaacaagactgcagatgtagtcaaatctacaatcggcggtgaaattgttagggaatttggtttttccgatgaacctaaagtctgcgttcctaaaatacgaaaagatccatacattcatgttatccaaatatgtgagggctgcttaggtgcttgcacatattgctgcactagatttgcccgcggccatttaaacagctatcctataaaggatattgtggaggaagcaagattggccattgaagatggctgcgttgagattgagcttactgcacaggacacttcagcatttggtaaggatacaggcgaaaagctctctgatttaattaaggaagttgcaagcttagatggggactttagagttcgtgttggaatgatgcaccctagaaacattggaaatgatttggataatcttattgaagcatttaagatggaaaaagtatatgatttcattcatttgcctatacagtctggcagtgacaaggtcttaagggaaatgggaagaaaccatactgtagatgattataagaatattgtctatagcttcaaacaggctattccagatattactatagccactgacatcattatcggatatccgacagagactgaagaggattttatgaagacagcagagcttattagagaaatcaaattcaatcttattcatctctccaaatatcagcatagggagggagccatatcatcttccctggataatattccttttgatgatatgaaaagaagatcaaagtatttatctgagattaagtttgaaatgcttgaagaggaaaataagttcttgcaggatagggagatggatgctttggttgtggaaaagggctctaaaggaggattcattgcaaagaccaattcatatattcctgttgtggttcaggatgtgaacttaggagagtttattaaggttcatattgataagacaactggaacctatctcattgggcataaaatcgattga

SEQ ID NO: 1686 - DNA, 633 bp, Methanobrevibacter ruminantium
  source 1..633: mol_type = genomic DNA
atggtatgtccagtttgtgggtctgatgatgcaatcgtattaaaaaataaactaatcgacgctaaatctaaggaaattcgcgagcttttacttaagtgtggcgaatgcggctctgtatataaggaaagattaactcaagataagccaaaaccattcagattgattatcagcgagcatgaagacacccataaggtgtcaattgacttgtatcctgatgaagaacttcgtgttggagattttttgatgtctgaacttggagaagtgaagatcacttccttagagcttccagatgaaaagcgtgttcaaaaagctattgccagtgaagtaaagactatttgggcatcttctgaagagattcctgcacgttttggtgtttcaattgaccttcatggaaaggtcgcttcattcaaatgcgaaacagaccgtgactttaagatagcggtagatgacattattaaaattgacaagtatgtggcaagagttcatgtgataaagactgaagagagaaagactactaaaggttatgcaaaagcaagagtaattaagagagtttatgcaaaacctgttaaattcaatcatttcgattatgatttaagtaaatttattgtttcttttaagccattgaataagtag

SEQ ID NO: 1687 - DNA, 486 bp, Methanobrevibacter ruminantium
  source 1..486: mol_type = genomic DNA
atggctgaaattaaaggaaaagtttggaattttggagataacattgacactgatgtaattatccctggaagatacttaagaacattcaatcctaatgacttagcccttcatgtccttgaaggggaaagacctgattttacaaaaaacgttgaaaagggagatgtcattctagctggtgaaaacttcggatgtggttcctctagagagcaagctccagtagccatcaaggcagcaggagttgatgtcataattgcaaagtcatttgcccgtatcttctatagaaatgcaatcaacataggacttcctgttgttgttgcagacattgaagcagatgatggtgatattgtttcagttgatttggaaaatggaattatcatcaatgagactaaagacactaaagttgaattccaagcttttaaagaattcatggtaaatatattatctgatggtggtctagttaaacattatcttaaaactaaagaataa

SEQ ID NO: 1688 - DNA, 981 bp, Methanobrevibacter ruminantium
  source 1..981: mol_type = genomic DNA
atgattattagagcaccttcaagactccatatgtctttaattgatttaaatggatcttataagagaattgatggtggtataggtcttgcacttaaagaccctcaatttgtattgcaaagtgaagaaacaaatgaaaaaggatacactttagagtttgcagattctatttctgaagattcaagggaagaatgtattgaaaagattccaaaagctgctgaaaagatagcagaactttgtgatattgaatcaggattccactttaaggttttagaagcatatcctcctcactctggattaggctctggaactcaaatttcagtctgtaccgctcacttgatgactgagactgttggtcaaaaatataccagcagggaattaagtacaatggtaggcagaggaggaacctctggtatcggaacttttgcccacgacttaggtggtttcattgttgacggtggacacagcttagaggaaaaacctggattcttgccatcttccgcttcaaaggcaaaacctgctacattaatagcaaggtacgatttccctgaagaatgggatattttgcttgcacttccggaagttaaagagcatatgcatgaccaacaggaagtaaatgttttccaaacctattgtcctattccaaaaacagaggttgaacaagtttcccacttgattctaatgaaccttcttcctttcttgcttgaaaaggacattgtcaactttggttgggcaatcaaggagcttcaaaaagttggtttcaataagcttgaacacagtttggatgctagtttcttgcctactatggaagcgattgatgaagccggtgcttatggtactggtatcagttcattcggtcctaccctttacactgtctttgataagaacaataaagacatagttaaagcagcaggtgagatcgtaggtgaagaccgtgtaaaagttgtaaaagctcaaaaccacggttatgttttagaaaaataa

SEQ ID NO: 1689 - DNA, 1530 bp, Methanobrevibacter ruminantium
  source 1..1530: mol_type = genomic DNA
atgttcattaagaaaacaactagtttatgtcctcactgccttaagcctttagaagctgaggtttaccaagaggatggaaaggtctggattgaaaaggaatgtccagaacatggtgtctttaaaaatacttattggagtgatgcagagttatatgacagggttgaccaagttgattcaatcactcaggatttagaaaaccctatggttaataaggttgcaaaatgtcctcaaaactgtggtatctgttctgaacatgaatcctacactgttttaggattgattgacgttacaaacagatgtaatctaaaatgtcctatctgttttgcaaatgcagcaacctctaaaaagctctttgagcctactcaagaagagattcgtcagatgcttagaaacttaagaggagaaaagcctgttcctacccctgcgattcaatacgctggcggggagcctactgtaagaaaagacttgcctgacttgattagaatggcaagggaagaaggattttcacatactcaaattgctacaaatggtattagaattgctaagaaggaaggctatgctcaagaattaaaggatgcaggattaaacactgtttacttgcaatttgacggtgtcactgaagagccttatcttgtagcaagaaacaaaaacctcttggatgtcaaattggaagccattgaaaaatgtagagaggtcggattaggtgttgtaattgtacctactgttgttaaaggagtaaatgaccaacaggtgggagacatcatcagatttgcaattcaaaacattgacattattcacggcgtaaacttccagccagtctcattctctggaaggactccatctgaccaggtggaagagcaaagaatcacaatccctgacttcttgaatttggttgaggagcagacagacggccaaatatcaaaggacgatttctattctgcaacttctgttcagccagtatcaaaattcatcggtgctttaagaaatgaagagccaccagtaactctaaactgccaccagcactgtggttcagcaacctatatatttatggataatgataagatcattcctattacacgtttcatggatattgataagttcctaacattcctcaataaatatactgaaaagttagaggatggtggatttgctataaaatcaagagtattggctagcgctgctaaaaaccttcctaaggttttaaatgaggatgaagctcctacaggattggatatgaagagaatattattggacatcttcaaaacccagtcttatgatgctttaggtgaattccacattaattcattgcttatttcttgcatgcactttatggatccttttaactttgacacagacagagttaaggactgtgttattcactatgcagttccagacggaagggttatcccattctgtactatgaactccatctataggcaaggaatagaagatgagttctccactccattaaatcagaaaatgactgaatttaatgataagactggagaagaagaggaagatgctgattag

SEQ ID NO: 1690 - DNA, 303 bp, Methanobrevibacter ruminantium
  source 1..303: mol_type = genomic DNA
atgaaattaagtgaatggattataataaataagataccgaacaataagatcttgactattctcgaagaatatgaaaatattgaagcaattgagtttaacgaccctgaagatgtaaaagcggaagtggaagagcatgggcttcgatatgttgcccataagtatggagtcaatgaaaaagcgctaaaggaatatggctggagatttaaaaaacgagacgccaaaggcaaaaaacgagaggaaactcctattataaaaacagatgaacaaaaaccattggtagatatctttggtgatgaagagtag

SEQ ID NO: 1691 - DNA, 576 bp, Methanobrevibacter ruminantium
  source 1..576: mol_type = genomic DNA
atggcattagaacttatgaatttattgatttccatcttaggagctgtttattttatgctacctgcttatgtggctaacttaagtggtcttgcttttggagggggaactccaattgatggcggagcgaattaccgagatgggaatagaataattggaaacggagtaacatggaaaggttgcattaatggaaccattattggaactcttgttggtgtggttttaggcatagtcggaatgtactatggtgatttaagcactttaactggaggagtcatcgatctccatgtttatggaagcctattctctggtcttatattaggattcttaatggcattcggcgctttattcggtgatgcagttggaagtttcataaaaaggagaatgaatcttcaaagtggccagcctgctccgataatggatcaattagattttgttcttggagcccttatatttagccttttagttgttagaataagttggagcttttttattataatttgtctgcttagtattttacttcatttaagtagtaatactatagcatatttgcttggaattaaggatgtttggtattaa

SEQ ID NO: 1692 - DNA, 690 bp, Methanobrevibacter ruminantium
  source 1..690: mol_type = genomic DNA
atgggaaagatatttaaaattgttacaatcatattgattgtcattgcattggctatacttggtgttttcatctattctgatggacattctgaaaagattggtgaaaataatcttggtgtggtgtataaggttacatatggtcattctaatgaccctaatgtgacaatcggaattgtttcaggcatgcattcaagggaaaagcttcatcaatatgtattgccatatgtttcaaaggcctttgcgtttttacatcctgatgtgaagattgtaaattatattgttaatgtaacgaaagatcctgaagactttacgaaaggccgtgccaatggagaatctttagttcatgattatgttgtaaaagatgttaaaaaagaggactttgatgttgtaatcattggacatgaccatgagccaggctatggtgaggcatattatatagcaactcctgttatggataatgcttctgtaaagctggctaaaaaggttactaaagatattggcttcaatcattacactaggaataaatctcaacctactacaagcacatccattttaaaagtggataagccaattgttgatgctggcacaagggtattcgtttatgagattcctgaagttgatggtaaggtaaatgcattttataagtcttatcagttagttaatgctacttataaccgattgaaaaaataa

SEQ ID NO: 1693 - DNA, 1023 bp, Methanobrevibacter ruminantium
  source 1..1023: mol_type = genomic DNA
gtgaaagtagcaggatttgacatcggtggtgcaaacactgacttagcaattattgattttgaaaatgatgaaattaaggaaatcaaaacagatttcgagtatcttcctatgtggtcagacaataaccgacttggaaatgttttaattgacttaatagaaaagatatgtcccctagaagaaatcgatgcagttggaatatccatgactgcagagcttgtggatgcatttgaaacaaagactgaaggtgtcttggatattgcaaccacttgtgaaaagctatttgaatgtcctgttgcttatattggcgttgataaagtcctatctcttgcagaacttgtacaaaaccctattgaagttgcagctgcaaactggattgcaacctctcaaatcattgctgaaattgaaaaggactgcatatttgtagatacaggaagcacaaccacagacattatcccaatcaaggatgggcgtgaatgtgctaagggcagaaccgattttgaacgctcagcaactggagagcttgtctatacaggcacattaagaaccaatcttacaagctttgtcgattcagttccactgaatggaaaccaatatagggtagcttccgagctatttgcttcaactgcagatgtctataatgttttaggcctaatctctgaagatgatttcacttgcgctacctgtgacggtgcaggcaagtcaaaggaagactctgcaagaagaatatcaagaatcctatgtgcagacttggatatcctatctaaagaggatattttagaaattgccgattatattcataaggaacaggtcaagcagattgcttcaggccttaaagatgtttcagatagggaaggattaactaaagttgttgtgactggtttgggcaaggatattttatgtgctgaggcagctcgactccttggtcttgaagttaagtccatgggagattattacactgatgatgagtgtactgttgctccagctatcggtacagcaatcatgatgaagaattatctaaaatag

SEQ ID NO: 1694 - DNA, 1167 bp, Methanobrevibacter ruminantium
  source 1..1167: mol_type = genomic DNA
atggatttaaaagatgtaacagatgattctatattagtattcgaattattcacagcctctggtatagaagacttgtcaatagtttcagaagctgtagagcttataagatcacttgtaaatgatttaaaagatgaagacacttatgttctaattgcagagccattcaaaaacatattcgatgactttgatttcgatgtaaaaacaataacaatagataatctagaggaatggcttgaggaaaatgcttatatatttgatagggcaatgttcattgcagctgaaaacgacatgaacctctacaatcttacaaagctattggaaaacaaggctgtaaaggtttatggctctgactcatatgcagtcaaattatgttctgacaagtatgaaacctttgattatttaatcaaccgtgtaaatcagccaatgacctataatattcttctaaataaaaagacatattggaaaagggctatccaaatcttctttgataagatcaatggagactatggggatggaagcgataatggtgcagttccaatcatgcaaaagcctaaggacattccagtattggataattcagatagggatgaggttaaaaagtacaagcttattgcaaagccacgctttggagtggactgtgaaagcctaaagatcatctcatcaaaaagggatattgacgagcttgaagaaatctatcctgaaggttccagattcattgtgcaggagttcatcccaggggatgtttgcagtgtcactttaataagcgatggcaagaacgccattccaatcagtcttaataaacagattgttgaaatcgatgagaatggaggaaaatatcttggaggatatgttccatatgagcatgaaatgaaagaaaaagcttttgaagttgctaaaaaggcttgtgaatcaatccctggaataaaaggatgtgtaggtgttgatttgattatagcagatgatgtctatttgattgaaatcaattctagattcacaacttcctatgttggactttccaaggttgcaaatataaatattggaaagacaattgtagatttgattgataagaagatatctattgaagagcttggtgaaattgaatacaaggataaggtaagtttctacaaggatgaaaatggaattttagatataaaaattggtgaatag

SEQ ID NO: 1695 - DNA, 1329 bp, Methanobrevibacter ruminantium
  source 1..1329: mol_type = genomic DNA
atgaaaatagctattgtacttggaacaaggccggaaataatcaagatggcttctgttatggatgaaattgaaaacagaggtcatgaattgttattaatccacacaggccagcattatgataaggaaatgtctgaaaacttcttcattgacttgaaactacctaccccaaattataacattcatgtaggctccggctctcatggagctcagacaggcaagatgatggaaggaatagaagaggttcttcttgatgaaaagccagatatattgcttgttcaaggagatacaaatgcagtgcttgcaggcgcacttgtcgcaagcaaattgcacattccagtaggtcatgtggaagcaggcttaagatcatttgatgagactatgcctgaagagatcaaccgccttgcagcagacatctgctccaaattatactttgttccaacagaagaatcagcaatcaaccttgctatggaagggatttccagaaaaagaatcttcataaccggtaatactgtagtggatgcttgcttcaggaacctagaaatatccaagtctagagataaagaccaatatgatgaaggccttcaggaattggatattgacaatatggataatatcctcaccctaacaatgcatagggctgaaaccgttgacgataaggaacgcctaaccaatataattgaagctcttgaggaattaagcgacatgaacattatcttcccaatacatcctagaactaaaaagacaatggagaacttcaatctctttgacagattaaacgatctccctcatgttcatataatcaagcctgtaggctatttggactttttgcttctcatatccaagtctacaatcatcctaacagattccggcggacttcaggaggaggcaatcacccttgatgttcctgcactgaccctcagatacaatacagagcgtcctgaaacagtaactgccggagggaacatccttgtaggttccgataaggaagtgatacttgaaaatgcaagaaagatcttagatgatgaggactttgcaaataggatgaaatctgctaaaaacccttatggaatgggaaatgctgcagaactgatgataaagataatagaggaatcagataagaatgacacccttaagatggtggctccagatgaggttatggcaagtttcactcgccatatgaaagcagttgatgaggacataactgttgtggactttgaagaaaaaaataattcattaataaaaatagcattccaaggggaagatattaaatacccatatgatgagcttaatttaaatggattaaccatcatttatgaagattatagttaa

SEQ ID NO: 1696 - DNA, 642 bp, Methanobrevibacter ruminantium
  source 1..642: mol_type = genomic DNA
atgtttgaatttacaaaaaacgaattaagagatttagtgattgcatttatcgtgctttcaattgcttttgcaatagcaaatgtcaaattcgatttgcatgcattcatttcaattctacctattgtaatgtttggagtaggagtgggattcctattgcatgagcttggacacaaatatgtggcaaataaatacggttacaaagcggaatttaaattatggcctataggattattaattgcacttattacatcacttataggatgggtatttgcactgcctggtgaagccaagattacagcagagaatattgatgaagagaccactggaaagattgcaatcgctggaccgatggctaatatagggcttggattgctatttatagtaatagcagctataacatatccattaaaaagctcatttacactttttgaattaatttacctagtcagcactgttggcttctctgtaaacgcatttttagctacatttaacatattgcctttctatacattggatggaactaaagtgatgaagtggagtgttaaagcatttattgttgcattcgcaatagctgcaatcatgatgttatcatctatgtttataggggctgaaaatatgattttaatgcttataggaagttaa

SEQ ID NO: 1697 - DNA, 678 bp, Methanobrevibacter ruminantium
  source 1..678: mol_type = genomic DNA
atgaaccaagaactaataataaacaataaggaatatagaaagacagagcccttagaatctttgaatatgtttaaaggacaattatatgaaaccattgtcaccacccaaagcaatgagcatattaaaaatgcagcccctattggagttatctgtaaagattcaaatcatatagtcattcatttggacaattgcgtccatacacacagaaacattatagaaaatggagaattgattgtaaacattacaaaagatccacttatttttacatattcaaccattggagagttggatgatgaatattttgatgaattcaatggcttccctttaattaaggattctcttggatttttcaaggcccatgtaataaagaaaataaacaagaaaagagaaaatgacttcaatgatggaatcggccatgtagtcacctgtgaagtggaggacatttttattagggagtataatgagattgttcctctgaatagggctatgaatgcagttattgaaagccttgtctattattgcagatttgatgcaaagtacaagcatatgcaaaaagagatttggacccatatgaaagagctgaatagagttgctcaaaaggtgggcaatgagaaagaaaagaaatcaatgaaggccatcctagataaaatgagagaaaatcatgattatttggactaa

SEQ ID NO: 1698 - DNA, 465 bp, Methanobrevibacter ruminantium
  source 1..465: mol_type = genomic DNA
atggaagatgtatctgaatttaaaggaattaacggacaattggtaagctttaaaaatgaagttgaaggagcagataaaatcacttttataggctctcctggtgtttgcaccccatttgcagagctattgtcctatgctgtaagaaataaggaaaatcatttcattcccttgcttgacattgatgacgctcatcagtttgagtttaagccatacggcatggttctaaaggatgaagtttcaaatcctcgtgatgctgatgttgttgtcttgttaggaggccttacaatgcctaaatatgaagtggcctttgatgacttgaatgcattgattggtgatgtcttaaaagaagatggtaagatcgttggtgtatgctttatggacatgtttgctaaggcaggttggttggataaggttgattttgactctgtcattgatgcaagcatattaggtgttgttaaaaagtaa

SEQ ID NO: 1699 - DNA, 807 bp, Methanobrevibacter ruminantium
  source 1..807: mol_type = genomic DNA
atggcagataaggataagatctttgaagataatgcttatgatgattctgaatacatttataatgacacctatgagggctctagaaatgattatgatgtagaatatgatgaatcagaagattatgaatatgaagaacctctaattagcctgtttgacattgtaaaggagtatgataagggaaaggttatcgctttaaacaaggtaaacctagacatctatgaaggggaattcgtatcaattataggtccttcaggttcaggtaaatcaactcttttaaacatgctaggggcattggatgttcctacaagcggggaaatattcattgatggattaaacattggaaaggaaaaggatttaagtgatttcagaagagaaacaatcggttttgttttccaacttcataatctgattccaaatctctctgtatgggataatgtacagattccattggtaggaacaggacttcctgaaaaggaaatgaaaaagagagcaaatgagatgattgatgcagtaggattgtctgataagaaaaagcaaaagcctaataagctttccggaggagagcgtcaaagggtggctattgcacgtgcacttgtaaataagccatcaatcattttagctgatgagccaacaggttcccttgatacaaaaacaggttctatggttttaaatctcttaagggcaatgcatgatgtttataatgttaccttgatagttgttactcacgatatggaagttgctagaatggctgataggatgattacaatcaaagatggccagatagtcaaagatgttgataatttttaa

SEQ ID NO: 1700 - DNA, 1137 bp, Methanobrevibacter ruminantium
  source 1..1137: mol_type = genomic DNA
atgagatttataagcttaatcataaaaaatccatttaggaataagactagaagcttcctatccattgtaggaattgcaatcggaattgccaccatagttgctttgggccttattacaacaggtatggaacagtccgttcaaacaacaatgaacgaaggtgctgcagagataactgtaaccaatataacctcaattggtgcagggactattgattccagtctggtggatgagttaaagaacataactaatgtttcacggactgcggggattttgtctgccacagatcaaaactttgttgatatggcctcatcgaacgatatgtcttctatggaatcctctacaaggctttatggaataaatcgggcagaccttgaccttgaaggaataaaagacataaatggaagcttttttgaagaaggcactaagcaggccataattggcaagcaatatgctcaaatgaataatatgtctattggagataatatttccgctttaggagaggaatttgaaattgtaggggtttttgaaaccggtggagtccttgcagatagtggagtttatgtttccttagaaaccttggatgaggtaacaggtgctgaaggaaaggtaaatcaggttatagtcaagacagatgaaggagtaaacgacactgttgtggcagatgcgatagaggataaatatgagaatctgacaacaataaccagcgaagagatgtctcagatgctggataatgttatcggtattcttgatgctgtttccgttgctgtttccgctcttgcaattattgtaggtgcaataggaatcgtaaatacaatggtcatgtctgtttatgagagaactaaggaaataggtgttttaaagtctgtaggatggaaaagcagaaagattctaaagatgattattggagaaaccttggttttaacaatcctttcaggtattgtaggctcagcattcggtattctcattgcagaggtcggtgtcaggctgatgggagatacagattttgctttgggatacagtccaagcactttcatcatggcatttggaataaccattgttgttggattgattggaggaatttatcctgcttataaggcaagtaaattagctcctacagaagcattgaggtatgaatag

SEQ ID NO: 1701 - DNA, 873 bp, Methanobrevibacter ruminantium
  source 1..873: mol_type = genomic DNA
atgaaacgaactgctttaaagattgcttatatcggcacccattttcatggatttcaaagacagccggatgtaaggactgtagaagaggaattaatttatcatcttaggaaactggaatatatagatgatttaaaggcttcccgatttaggatagctggaagaaccgatgcaggtgtccatagcttgggaaatgtgataagctttcaaagcgaaaaggaagttcgtgtcaatcagataaataatagcctgccagatgatattcaaataatcgcttgggctccagttcgatttggattcaagccaagatttgcaaagaggcgctggtatagatatattctctttgaagaggacttggatattgatcttctaaggaaaacagcagaagtctttaaggggacccatgactttaccaatttcacaaaaagaaagcagaagaccactgttagaaccattgaagatataagaatcaccaagccaatcattgatgaagaagacaagaacaaaaaaagtgattttgctcatctaaacaaaagctacagccctatctttgttgatatctatggagaaagcttcttatggaacatggttcgaaagatgatgagaatattcttggatgtaaattatggcaagctcactctagatgatgtggaaagactcctaaatccagaagaaggcgagccaagggcttatatcaaggtggttgatgcagagaatcttattcttatggatatagaatatgaggggataagattcagatatgatgactatgcatgcgaaaggtttaggagatatttgattgataatttgtttgaattgcagaagacatattcgataactgagtctatgttgaactgcttagacgatttaatttaa

SEQ ID NO: 1702 - DNA, 897 bp, Methanobrevibacter ruminantium
  source 1..897: mol_type = genomic DNA
atgagaaaagagaaagaatcaaaagaatccattagcatttatgataattataaaatagatatggaacttaaacacactgacaagcagtattattttatcttttataaaagaaggctttttctaataaataacaaaattccgttagttaaagacttaatatcacttaatattaatgattctgatgtgaaaaactccatttacattggacaattccattctaaggactgctttgcagttgaattggatgaagaatttgactgtgaacattatattaaagccaatgatgattcccaattcattgaattgtattttgtttttgatattgacgaagagacataccttgtggcaggcagagccatacaaataatcgattgggaaaacactcaccaatactgcggaagatgcggagcaaaaacagtaacttccgatattgaaatggcaaaggtatgtcctgaatgtggatttacttcttttacaaggatttgccctgcaataatcacttccatcattaaaaaagatgagtctgagcttgaccaagagggaagacctataaataaggttttaatggcaagacactcctatcacacagctccaagatatgcattgattgcaggatttctggaagctggagaatctgtagaggaagcggttaaaagggaggttatggaagaggtaggaattgaagtgaaggacattgaatactttggaagccaatcctggccatttccaaactcattgatgatcggttgcatatgcaaatacaagtctggtgaaatcaaggtagatgaaaatgaaatcctaaaagcaaaatggtttaaaaaagaagatattgaaagaccggcatcggagatttctatattttcaaaattactcaagaatttcattgaaaactactaa

SEQ ID NO: 1703 - DNA, 615 bp, Methanobrevibacter ruminantium
  source 1..615: mol_type = genomic DNA
atggaacttatagcaaagaatatttcatttaaatacccatcagctaaagactacctattaaaggatgtaagtattgaattagacaataagaagattgtaggtttgattggagatagtggtagtggaaaatcaacattatgtaaaatcttatccggttatatcactaaatatgagggtgaagtaacatttgatggtcagccattccataaaaaaggatttaaaccagttcaattaatttatcaacatccagaaaaggttatgaatcctaaatggaaaatggatcaggttttatctgaatcttgggatgttgatgatgccacattatctgaattcggtattcagaagtcctggcttaccagattcccacaggaattgtctggtggagaacttcaaaggttttcagtggtaaggtcccttaatcctaatacaaagttcctaatagcagatgaaatgactacaatgcttgatgcaattacacaggcacaaatcatagattctgttttaaaaatagtaaaggaacgtaaaatgggattcttattggtaagtcacgatatggatttggtagaaactgtctgtgatgaaaaaatatactttaaagatcttaataaggcttaa

SEQ ID NO: 1704 - DNA, 1341 bp, Methanobrevibacter ruminantium
  source 1..1341: mol_type = genomic DNA
atggataaattattggatgttgaaaatgtttcaatttcatttatacaatacacaaagggattaaatcaaagggatttaaaagttataactgatttgacattagatatatctgaaggtgaaattttagcagtattaggttcaagcggttctggaaaaagtttgcttgcccatgcaatatttggaattttgcctgaaaatgcaagacttaatggaaaaatcaaatttaaaggcaaggaattgtctcaagcagataaggaagaaatcagaggtaaaggaatagtgcttgtgcctcagtctgttaacttcttggatcccttaatgaagatatcagatattgcaatagggcactgtgatagcgaagaggagaaaaaggaaaagaaaataaagcaaagagaaattttcgaacattataatttaggtcctgaagtggatgagatgtatcctttccaattgtctggaggaatggcaaggagagttctagtttcaactgcacttcttgcagaccctgaccttgttgtagcggatgagcctactcctggacttgatgagaagactgtagaagagacattgaatcactttaagcatatgaaagatgatggaataggtgttcttttaataacacacgatattcatgctgcattagaggttgcagacaggataggaatattctattcaggatatgtaattgagattgcacttaaggaagacttctcaggagatggggaaaacttattgcatccatatacaaaggccctctacaaggcactccctgcaaatggatttgaagtcattaagggacatcagccattgcatggggagatagtcaaaggctgtccttactatgacagatgtgactggagatttgacagatgtaaggaagagcgtcctgaattgatggacattggtcttaagaagattagatgctttaaatatgatggtgtcactgaagatatgattaaggacggtgctattgaggagactgctgaagccaatatcgaagatgctgctaatgaagtagttgaaaaagctgctgaacttgtggatgaatccaacattgaagaaagcgctgaagctgttgaaggtgctgaagaggctgttagtgaaactgaagatgcaattgaggaagaagtagctgaagctgttgaaggtgctgaagaagctgttgaaggtgctgaagaagcagttgaggtcccagaagaagcagtagaagaaggcactgaagaagcagttgaggaatcttctgaagaagcagttgaggaatcttctgaagaagcagttgaggaatcttctgaagaaacagttgaggaatcttctgaagaggcagtagaagaaggtgcataa

SEQ ID NO: 1705 - DNA, 507 bp, Methanobrevibacter ruminantium
  source 1..507: mol_type = genomic DNA
atggatataaaaatcaaagaaatagaaaacgatgagtctcaaataaagtctgttcaagagtttttatatgctcaaataaaaatagaatatggtattggtccaatgcctgaatttcattatgatattgatggattgaaagactattacatattgcctaaaagaaatgccttctttgcagcatatgatggggataagatagttgcaacagcaggtgttagggcatatgataaggattatgaattctttaaaggtcaatacaatgaagagaatacagcaagcatttggagactgatggtagatgagcagtatcgaagaaatggacttgcacgcattcttgttaaaaaaatagaagagtttgcaaaggaagaaggatataaagaaatttatttaaacactcatagatatctggaagcggctttgccattttggaactctcttggttatactgtaactatagaagaagatgactatgatgaaacaaatcatatgataaaggttttagtttag

SEQ ID NO: 1706 - DNA, 855 bp, Methanobrevibacter ruminantium
  source 1..855: mol_type = genomic DNA
atgattaagaagaaaactaatgataaggagcaatggtttatataccgtgcaaatcttaggacaaagacacttgtaattattggacttgcagcattgattatcataagcattttcgtatgcggatatttcataagggacatccctacaaatttcgcttcagctaatcagatgccttcccttgaacaccttttcggtacagattggatgggaagggacatgttccaaagaaccattgccggtcttggattaagcattatggtaggtttcatcgcatcagttctcagtaccatcatttcaattgtcttaggattgttctcaagctttaataagtttgcagatgaggctgttgctggaatcattgaccttttcggttccattccacacattcttctaatcattatcgtttcaataatgtttggtggaggagtatggggtgtaatcatgggcgtaggtcttacacactggacacctcttgcaagggttctaaggtctgaagtcaaggagattaagaccaaggaatacattgcattatctgaaaatcttggaaggaataaggtttggatagctataaagcacattttcccattgattatctctcaaataattgtaggagtaatcctaatgttccctcatgcaatcatgcacgaggcagcaatcactttcttaggattcggtctgccacctcatgagcctgcaattggagttatattagctgaatcaatgcactatctttctgctggatactggtggttggcattctaccctggtctatccttgctgatagttgtattgctatttgatcttattggagagaatgttgaaaagctcctcaatcctgaaacagcacaaagttaa

SEQ ID NO: 1707 - DNA, 990 bp, Methanobrevibacter ruminantium
  source 1..990: mol_type = genomic DNA
atgaataaacaaaaaatagcaaaatattttggttggaaattagtacgatttgtcgtattaatgattgcagttgcaatatttagttttgtattattagatttatcccctattgacccagttaatgcttatttaaaaggtgctgcagtaactgaagctcaaagagcaattttacagcaatactttggtaccaatgttccattgcctgagaagattttccattggcttatggatttgcttcaaggaaatctgggaacttccttaatctaccgtagaccagttatggatgttattattgacaaattcatggcttctcttgcattgatgacaatatcctggattttaagcggtatcatcggttttgctttaggagttgtagccggtaaaaacaaaggttcctggattgataaggcagtgaaggtctactgttatgccatccaatccgctccatccttttgggtgggtatgcttatatcgatggtattctctgtttatctgggatggttcccaataggattcggagttcctattggagtaaggagtacggatgcaacctttattgagtgggcaaccaggctggttcttcctacgctgacattaagccttgtaggtcttgctcctattgcaatgtatacacgaaatgaattggttcaggtcctatcctctgactatgtattgtttgcaaagtccagaggggaaaagggctgggcactgataaaggatcatggtttaagaaatattatgcttccggcaatcacacttcaattcttatcattcagtgagctcttcggaggggctgtcatggtggaacaggtattctcataccctggaataggacagactgcagttgcagcgggtcttcaaaacgacgttccactatttttaggaattgtggtcataagtgcaatatttgtatttgtaggtaacttgcttgcagatatttcttattacttcatagatccaagaattaaggagaatgagttcaatgattaa

SEQ ID NO: 1708 - DNA, 1620 bp, Methanobrevibacter ruminantium
  source 1..1620: mol_type = genomic DNA
atggataagaaaacaatcattatagctgcagtagctattctcgttattgctggaattgccgttttcgcatttggaggcggcggaagcagcgatagcgatccgacccacttgacagtagctacacacagcaatatggcagaacctgaagcaggtttcaacccgcttacaggttggggttgcggacacatgaactataacccattggtacaaagctgtctctttaagacagacaagaatggagacatagttccagaccttgcaaccaactattcaattagtgctgacggtttaaaatggactgtaaaggttagagatgacgtcaaattctcagataactccacttttgacgcaaaagacgtagcatttacattcaacactgcaaaagacactgaaactgatttagatttaaccaatcttaagaaagttacagctaaggatgacaagactgtcgtatttgaattggaagaaccaagatccacattcatctatgacttaaggtatgtaggtatcgtacctgaagagtatgacaacgctacctacggcgaacacccaatcggtaccggaccttatgtattggaccactgggataaaggtcaacaagctatctttaaggcaaatgacaactggtatggtgacaaaccttacttcactcaaatcaccatgttattccctgaagaagctacctggctagagttagctaaatccggtcaagttgacattgctcctgttgcaacctctgcacttaacgaatctgtagacggatacaactttgttgaaaagtctgcaggtagggcacaaggtatctccttgccatatcttgaagatactggaaaaaccagcccagcaggtgcaaagatcggtaacaatgtaactgctgacaagtccatcagagaagcattgaacataggtgtcaaccgtgataaaatctgtgaagaagtattctctggtcacgcttcacctgaatataccagcgtagataccagaagctttgcaaaccctaacgctaaagtaaaagatggtgatgtagcaaaagctaaacaaatcctcaaagaaggaggatgggaagacacagacggtgacggaatcgttgaaaaagatggcgtaaaagcatcctttgacttatactacccacctgattaccttgacagacaatctttagcaacagtatttgctgaacaagctaaagacttaggcattcaagtaaacctccaaggtgctgactgggataccatctatgctaacatgtattcctctgcttctgtaatgcaacagacctcaccggacccatataaatccatctatcaacaatatcactctaaggaagctgatgacttctatatgaaccctaacttatataacaatactgcttccgatatgttgatggaacaagcaatgcactccaatgacttcaaactagcagactccttatgggctcaatctgcccttgtaaacggcggaggctggggacctgctggagatgctccatgggtatggcttgctaactacaactacaactacttcgtaaaagaagatattgatatgggtgaccaacctgacggtttaggaaatgacttcttgattaatgttgttgattggactagaaccaattcaactgcataa

SEQ ID NO: 1709 - DNA, 693 bp, Methanobrevibacter ruminantium
  source 1..693: mol_type = genomic DNA
atgtccttatcaatagaactggaaaaatacctgaaaggcaatggcgcaatagaagtaggatatgcagacatcaccaatttcactccaaagaaaggattgaacacaggagtagtctttttcatcacctaccctaaggaagtgatacgaaacatggcgaatgctccaacattagagtacctttatgaattgattgatctaaacaccagactggatgcccttggaatgatctgtgaggagtttcttataaataaaggatataaggcatatgcacagacaaaaaagagattaggaggaaactttggagagttcaattcatttgagcttccacataagaccatagctacaagagcaggcatgggatggattggaaagtcagcactctttacaacattcaagtacggatccgctttaagattatgctcagtgctgacagatgcccctttagagataggagagccaataattaagtccagatgcggaaagtgcatgatatgtaaggaggcatgtcctggaggagcaataagcggaagaaactgggattatactcttaaaagaaatgatttttatgatgataagaagtgtgagaagtatgcgcttatagtctctgaggagaatctgggaaaacctgatacagtctgtggcaaatgtatttatgcctgccctcatactcagaagtatgtgaaaagaacttga

SEQ ID NO: 1710 - DNA, 561 bp, Methanobrevibacter ruminantium
  source 1..561: mol_type = genomic DNA
atgaatgttaatattaaagagttaggaaacgacccagaggaaataaaaaatgttcaaaactttttatttcacatgataaaacttgaatttggctatgattatgtcccagagtggcatcaggacattgtgaatatggaggactattatataaatccagaacgcaatgcatttttcgttgcttattccgaaagcggtgaaattattgctacaataggtctgagggcttatgataagaattttgaaaaatttgaaggcatatattccaatgacactacatcaagcatttggagactttttgtcgataggagatacagacgttgcggtttggcttctaaaatgtttagcgtagctgaaaactttgcaaaagacagggactataaaaatatttatttgcatactcataggacattagagggggctcttcagttttggatgaaaatgggctttatcattaccttggatgaaggtgatgagcttgaaactgtccatatggaaaaattcattcaaaaattaaagatttcaccacaagcaggtatcttaacttatgcaattaagttataa

SEQ ID NO: 1711 - DNA, 726 bp, Methanobrevibacter ruminantium
  source 1..726: mol_type = genomic DNA
atgcttacttttattcaaatggaatttttaaaattaaaaagatcaaaaatatttttattaagcgttcttatggctgtgcttccagcccttctgatgtacatagcaacatttgcttttgatgaagtccaggcctttgacgctctatttaccaatgtaaacatgtatatgtctgtattgtttgctgttcttatctttgcaatcattatggcatatctctttggaagggaatacaatgaacataccttaaagatgatgcttaccattccaatttcaaggggaaagttcctgatgtctaaatatctcatgttccttatttggattttgattctaacagttattacaagcctatcaactatgatatttggttttgctgcaggactaagcggatttactgtaaacttgctaattaacagctttgcacagcttctatttgcaaatctattgctctttttgacattctctccgtttgtatttatttcattgtttgttacaaatatggtgcctgctatggttggcggagctagtctaactcttgttaatatgcttgtttacggacaaacctgggctccatatgtcccttgggtatgtccttatcttattgcatctggagagatagcagaatatggaataaatatgctattgccttatggattggtttttgctactttcatagttggaatagtcatttcttatctttactttactaaaaaggacgttcctctttag

SEQ ID NO: 1712 - DNA, 1068 bp, Methanobrevibacter ruminantium
  source 1..1068: mol_type = genomic DNA
atgagtcaactcattaactattattttattattaaaggtgattttgtgactgattacgttatagagacaacaaatctatcaaaaaagtattcaaaaaaatatgttgtcgattctattgatatgcatgttgaaaggggaaagatctatggtcttttaggcaaaaacggagccggcaagaccactaccatgtgcatgcttttaaacctggttgctccaagtgatggagatatccttctatttggaatgaatccaaaggagcattccaaggaagtctattcaaacataggatctatcatagagactcctggattctatgagaatctgactgcatatgaaaatctggagatagtttctaagctgagaggcaagtataatcctctaatcattaagatggttcttgagatggtcaatcttgaccatgagaagacaaagaaattcaaggactattcattggggatgaagcagagattgggaattgcagctgcaatcatgcataaccctgagcttctcattcttgatgagcctataaacggtcttgatccattcggtatcaaggagataagagaccttcttaaaaggctatcaagggagtatggagttaccattctcatatcaagccatatcttaagcgagatagaaaacattgcagatgtcataggatttatggatgaaggatgtttgattgatgagataacaaaagaagagcttcatacaagactgaataagtttgtagagtttgaggtttcagacattgaccttgctgttgatcttctaaaggacacaggatttgaggaaaacggtgactttacatttgcaagaaacattggcaattatattgaagatatgaattctcttaaatcttttgagtctgatggatatgtgaattctgaagatggctttgaatctagtgaaaatgccatcggaggaaccatccatttattgaccaatcttgatttaagagaccaattcaataagctatttgtaagctctggaatcgatgttagaaaggtaaatctatgtgaagagaacttggaagagttttttacaaggattgtttcttctgcttaa

SEQ ID NO: 1713 - DNA, 756 bp, Methanobrevibacter ruminantium
  source 1..756: mol_type = genomic DNA
atgaagaatgagaaaacagaaaatgaaaataataaaaatacttcctcaccactagtcaaatacctgttccaaacaagatttttcctttttggattaactaaaaagtcaaagacaataaaaaagatatttaacaaagtcttttttgaagacaatgaacttttcattcttccaaataaaagcacagtgaacaaaagcaacaccaaaatcactgcaaacattgaaattaaggagagctttcaaaaggatgactctgagtttctgccaagtgaaatccttaaggaaataataaaagaagcaaataatatctttattatgaataaatgcatttgcagaagctcttcaaactgcaaagactatccccacgactttggatgtatctttttaggtcctgcaagcaagaaaatatcttcaaaatatggcaaagcagccacagtcgaggaagcattggaacatgttgatatggcagacaagctaggattaagccatttgattggaagaaataaattcgatagccttttgatgaatgtgggaccaaaagaggaattgcttacaatttgccattgctgtccatgctgctgcctatggaaaatcattccagatttggatgatgaaatcagcaataagataaaaagacttgaagatgtggaagtaaatgcattagatgacaagtgcaagatgtgtaaaaaatgtttagaggaaaatgtctgcatttctaatgcaataagtcttgaagatgataagataactattgattaa

SEQ ID NO: 1714 - DNA, 120 bp, Methanobrevibacter ruminantium
  source 1..120: mol_type = genomic DNA
gtgggctgtggccattgtgttcaagcatgcaaatttgatgcaatccgattaaactatagcagaaaatctgtagattctgttattaatagaattgaagaattagtcgactataaaaattaa

SEQ ID NO: 1715 - DNA, 741 bp, Methanobrevibacter ruminantium
  source 1..741: mol_type = genomic DNA
atgtcatttcaagataataaaatgttaattatgcctgctgtagacattagaggtggaaaatgcgtacagctagtgcaaggaaaacctggaagcgagcaagtagtcatagaaaacccagagaaggttgctaaaaaatgggaagatgcaggggctgaagtggtccatgtaatcgaccttgacggagcccttgaaagcgttacaaatatagaaacaatcaaaaagatactgaatgaagtttctgttcccattcagcttggaggaggcataagaagcatagaatatgcagaggagctattgaatcttgatattgatagattgataataggcactatgggaataaagaaccctgagataataagcaaattatctaacgagtatggcagcgaaagggtgatgatctctcttgacagcaaagacaataaggtagtcataaaaggctggcaggaaaagatagacaagtctgcaagtgaaataagcaaggagtttcaagaactgggagccggaagcatattgtttacaaatgttgatgttgagggcctgcttggaggattctatgtagacccagtaatagaccttgtagactctgtagatattccagttgtctattctggaggagtgacaagcctagatgacctaaaacaattgcagacaacaggtgcaaaaggagttgtaattggttctgcattgtataaggataaaataaagctagaagatgctttgaaatatcaaaacattgaataa

SEQ ID NO: 1716 - DNA, 453 bp, Methanobrevibacter ruminantium
  source 1..453: mol_type = genomic DNA
atgaaagtaatggcaacaggagcatttgacatattgcatccaggacatggattgtatcttgaaaaggcaaaggaattaggtggagaagatgcagtccttgcagttgtaatagctagagactcaacagttaaaaagaaaaaaagaattcctgttattgatgaaaaccaaagattagaaatgatcaagtacctaaagccagttgatgaggcatatataggccatgatggagacatgtttgaaatcgtagaggaaatcaagcctgacataatcgcaatcggattcgaccaaggccatgatgtaaacaagcttcaggaagagctggataaaaggggaataaaggccaaggcaatgagggttgaagcccataggattgcagatttggacagtacttgtaaaatcatcaagaagatacgtaattcagactttgaagaggattatgtaaactgtgactag

SEQ ID NO: 1717 - DNA, 1017 bp, Methanobrevibacter ruminantium
  source 1..1017: mol_type = genomic DNA
atggtaagtatagcaattgtaggcggaagcggatacacaggaggggaattaatcagaattctttctgctcaccctgaagcagagatagtggacattacttcaagacagtttgaaggaactccagtccacaaggtccatccacatatcagaggaacagatttagtatttagaaacaagaagccaagcgaattggatgcagacatcatatttacagcaactcctcatggagcttctatgaagatagtacctgatctcattgaaaccggagctaaggtcattgacctaagcggagactacagattcaatgacattgacgtttatgaaaaatggtatggaatcgaacatacctcagacctaaaaggagttttcggacttccagagattcacagggaagaaatcaagaaaaccacactccttgcaaacccaggatgctttgtaactggagctatcctttcaggatacccattgtcaaaggcaaaacttgcagagagaatgatattcgattccaagactggagtaagcggagctggagtaaatccaacaacttccacacactatccaaacattggagacaatgtaaacccatataaggtaacaagccataggcatatgcctgaaatccaacaggagcttggtgcgttctctgatgttaagatatcattcactccacatcttgtgccagtgataagaggaatattgaccacaaatcactgtttcctagttgacggtgcagacatcacaagcgaagaggtattggatatctataaggaaacctataagggagagccattcatacagattttagaggatggggagattccaagactcagcagcgtaagaggatccaactatgctcaaataggatgctttgaaattgatgaaaccggcagacttgtcatcatttcagccattgacaaccttgtcaaaggggcatcaggccaagcggtccataacatgaacataatgtgcggatttgatgagaagactggattggacttctttggaatgcacccataa

SEQ ID NO: 1718 - DNA, 489 bp, Methanobrevibacter ruminantium
  source 1..489: mol_type = genomic DNA
atgaacagaataattctatactattcagagggaggaactactcagcaggttgcagaaacattagcaattaacctaagatgcgacatctgcagaataagagatttgaaaagtagggacggctataaaaacagattgttttcaacctttgatgcattcagagaatccaagacagaaatctatcctcctagattagacttaagcgagtatgacaccatctatataggaactccaatctgggccaacaatccaacccctgcaataattaccttgattgacaggtataacttccttggaaaggacgtagtcctctttacaacatccaccaactctgaaggagaaaacacatttaataaaatggatatgaaattaagggcaagaggagcaagagtagttcaggaattcaatatcaaaaccaaggacaagagcttggaaatgattagcgaagatactgaaaaagccataaaaaacttagatttagaattatattaa

SEQ ID NO: 1719 - DNA, 1158 bp, Methanobrevibacter ruminantium
  source 1..1158: mol_type = genomic DNA
atgtttgacaaaattatggaaaatcataaagccttaattgccatacctattatacttgcacttttatcacttgctcttatctcctttaatggaatagaacaaggagttgaacttaaaggaggatcacttgctgaactgcaactgacaggttcaacaagcgtaaatgaccttgaaagtcaattaactaaagaattgaatacaaacaacataaaagtgacaagcaatggcgaaaataaggttactgtagaactggaaaataatgttaattcaagtacattttcaaaggccatagatggaaaggcaaaggtgatcagctataatgagataggtcctgttttatctgaagaggcaatgggacaaatatatatcgctatgctatttgcatttttatttatggcagttactgtttttattgtatttagagagcctgtaccttcagtagctattatcctagcagcattatgtgatatactcattgctcttggaggtatgtccattcttcacatacccttgtcaattgcatctgtaggtgcattattaatgcttattgggtacagtgtggatacagatattcttcttactacaagacttcttaaaagaagggaaggaactgttgatgaaagagctagaaacgctatgcacacaggtttgaccatgtcctgtgcagctatcgctgcaatgggaattctttacatagtcactgtaattatcatgcctgaagcaactaccttaagcaatatttcagcagttctggttattggattaattggagatattctttcaacctggcttatgaaccttggaatcttgaagacttatattgattggagacagtctaaaaagcaagataagtttaatatagatgctcctaagtctaatgagtctaaatccaaatctaaagaagaagatggcaagtctgaatccaaatcatttaaggacagatttaaaaggtccaaggatgatgattctaaagattctgaatctgaagactcttctaaagattctgaatctaaagactcttccaatgacatagacagttcagaagaagaaaaatcttcaggtaaagataaaaaatcttccaagaagactaaatccaataaaaaaggaaacaaacgtaaaactaaaaaaagcaaaaagaaagggaaaggaggtaaatag

SEQ ID NO: 1720 - DNA, 1224 bp, Methanobrevibacter ruminantium
  source 1..1224: mol_type = genomic DNA
atggctagtaatttatccaaattcttcaaggatagacaagtaatcatcctaattatttgcctcataatcagtatcataagcataagtttccttggagtagaacaaggacttgacctaaagggcggttcctccatccaattgcaattggaacatcctgtaaacgactctacaatgaaagtggtcacctctgtactggacaaaaggcttaacttatatggtgtaaccgatgtaaaggtccgttcaagcggagaccagatggtcatagttgagatggctggaaagagccccgaagaggtggagcggctgattggtaacccaggtatttttgaagcaaaaatagacaataagacagttctagtaggcagtgacgttgcaactgtagacgctcctgttgttggagagtctggagaatggcaagttccatttacattaactacagaaggagctaagaaatttgcagagcttgcaaagggaaaaggcggacatgaagtggtaatgtatcttgacggaaagcagatagatgaccaccctcctgcattggctgaagagcttgcaagcggagaggctgtaactgaagttcaggttacaggtggtgccgaagatgttgaaacagcaaaagcagagtcaaatgaagtattcactgtattaaagacaggttcacttccggtaaagattcacactgtaggttccaatacagtttccccagagttaggtcagcagtttgcacaaggagcattgattgcaggtcttcttgcaatccttggtatttcagcagttgtatatatcagatatagaagagccttcctagctatccctatactcattacaacattatctgagataatcattatcctaggggtcgcttcaataatccattggaacatagaccttgcagcgattgcaggtttgattgcatctgtaggtactggggtagacgaccagatcatcattacggatgaggtgctgcaccacgacgatgaaaacaccaggcatagaagaacaagaactcaaatgaatgtgaagaatgctcttttcatcatatttgcatcagcaggtaccttgattgcagctatgcttccattagcctatgtaggatttgcaagaggaagcagtggaatcggtacaattgctggatttgcattcactacaatcattggtgtattgattggtgtattcattaccagaccagcttatgctaagtttattgaattgtttgtttcttaa

SEQ ID NO: 1721 - DNA, 1242 bp, Methanobrevibacter ruminantium
  source 1..1242: mol_type = genomic DNA
atggttatagttgtaggaactggtgccggaggagcaataattgccatgaagcttgcaaaggcaaatattccagttacaataattgaaagaggcccatatatagcaagcaaagacgcatatgaaacatatgacatgaaatattatgacaagagatttgaaagcgaacaaagcctagaccttcttaagaccacctgtgtaggaggatctacaatagtggcagcaggaaacggcgtaagggttcttgaagaggaattcaaggacctaggcatagaccttagcaaggaatacgaaacaatagaagagctaatcggcgtccatcaaatggatgacgaccatataggtgaaggaacaaggctatttttggaatctgcaaaggaatgcggattcgatgcaatcaagatgcctaaattcatcagggatgaggactgcaagccatgcggcaaatgttcattcggatgtcctagagatgcaaaatggagcggaaaggactttatagacatagcaatcgaaaacggagcagagcttattgaaaacgcagaagtcactaagatacttactgcccacaaatcagcaagcggtgtcgaatacatacaggatggccaagttaagaccatcgaatcagaccttgttatccttgcagccggtgcaatcgatacagcagtcatccttcaaaagactggaatagacgctggaaacaagctattctttgatccattcataagcgttggaggagtcttaaaagacataaaatacaacacagaggtacagatgaacggacttgcaataggaaatgaatatatccttgccccacatttctcctcattcatttcaaaatatatcaaagaaacataccctgaagttgaggataaggacattttaagcattatggttaaggttcaagatgatatggtaggatctgtagacattgatggaaatgttaagaaattcaatacaataggcgatataagaaggcttggacaaggagctgcagctgcaggctcaatccttcaaaaggcaggagtcgatgcaacaaccatgacttcaacagtattcaggggagcccatccaggaggaacagcagcaattggagaggttgttgataagaatctgaaaacagaaatcgatggcctttaccttggagatgcaagcgttattcctatctctccaggcaagccacctattttgcttatccttgcattagcggaaagattagcaaaccatttaattgaagaggttatttaa

SEQ ID NO: 1722 - DNA, 429 bp, Methanobrevibacter ruminantium
  source 1..429: mol_type = genomic DNA
atgtgggagatggtttggcctattttgcttgtcattttatctaatacgatttataatatttgtaccaagtcaactccagggaatgtgaatgcctttggaacattgatgataacttatataactgcagctattttaactgctatcatctttgtatttctggtaaagcctgagaatgttatggtggaactttctcatgttaattggacatctgttgtgcttggaatagctattgtgggattggagcttgcttatatttttgcattccgtgccggttggaaggtcagttctgcttcaattgttgcaaatattggacttgccattgttcttgtattcgttggggcgattctttatggtgagaatataacacttaagcagcttggcggcatatttatttgtgctgttggattatttttgattaatatgggttaa

SEQ ID NO: 1723 - DNA, 462 bp, Methanobrevibacter ruminantium
  source 1..462: mol_type = genomic DNA
atgactaaggtagagttaaaggttaagccaattgaaaacggcactgtgattgaccatattccagcaaataaggcgcttcaggtattaaagattctagggcttccaaagaaaggaaccaatgttacacttgctatgaatgtccattccagattaggatataaggatattgtcaagtttgaaaatagggaattggctcatactgaaatagataagatatcattgattgcacctgatgcaaccatcaatataatcagggattatgagattgtatctaaaaataaggtaagaaaggtaaatgagttgaatggaataatcaaatgcaccaatcctaaatgcatatcaaatactgaagagcctctagagactaagttttatcttgttgactctaatccgattacagtaaggtgccattattgtgaaagattggttcagtatgatgagatatataatcagtttgaatag

SEQ ID NO: 1724 - DNA, 6768 bp, Methanobrevibacter ruminantium
  source 1..6768: mol_type = genomic DNA
atgaaattaaataaattcttcattatcagcataatattgattatatttctatcaattagtgcaataagtgcagaaaatactgataatgcactctcaacagatacacactcaaatgacaatgtactctcaacagattcacgatcaaatgagaatgcactcacaaacgagaacacactcttaacagatacacactcaaatgagaatgcactcacaacagacccactcacaaaggagaacacacattcttataaggattcagaaaagtctctttcatcagatgcttttaataagaccatttatgtaaataaaaccggaagcgatgagggagatggaagcgaagcaaatccttacgctacactaaaaaagtccatttcacaacttgatgactctgacaatgctgtcatctacatcggtccaggcaattacacaggtgaaaataattctgccttggagataaacttagaccataaagatcatgacggatcccttagcattattggagattcaaatggaggaactgtttttgatggggaaaacttaaatccaataataatatcaatcagtgaggattcaatagtgaccttaataaatatcacattcactcacggcaaaaataatatgggctctgccattagaagttctggaaatctcactattgacaattgcatattcacggaaaactatgcaacaaatcttgctgcactttatgttgataaacatagccctttaacagtaatgaactcaaaatttttagaaaatagggccaaacaatgtgcagatatctatttttcacaaaactcagaaataattttattaaataatctctttgaaggttcaactgcagaatattcctatgcctatagcccatccgtatccctgcaaacaggaaaaagtttagtcaaaggaaatacttttaagaatctgacaggcgcttattataaaggtgcattgtatattgcctataacaatgggataaatatagccaacattactgataatacattcatcaactgtaattatacagggacagatggagcaatcctatttttccaaaatgcctatttgaagaacaataaattcatagactgccattcttccactgcatttctatactccaacactgagtttaatgcatacctaagttttgaagatgcagaaattgatggcaccaccttctttttaaaagccaatgtaaccgacgacatgggaaataaagttaaaaatgcaaaggtcatattttacttgaatggagaaaatgtgggttctgctagttctgataataacggcgtagcaatgataagcattaaaaaattgctggaaaatggagaatatgtaatttcaggtactcagtcatactctgaaatcaatccttttggggtaaacgtaaaaaatgcaactgcaagagttaattacgaccacagctctcttgaagtgtgggtatcaactgatggagatgatggctctggcaacggcagtgaagacaatccattcaagactcttagaaaagcattggattatggaacagcatctgctgtcaatttgactgtgcacgttaaaaacggaatttacaatggggatgacaatagagatttgtcctattccactctcggcaaaatcaccatcgttggagaatcctactccaatgtagtgattgatggagaaaatataacaaagagcatatttgctttctcttcaaccttagacgttacactgattaatctgaccttaatcaactgtccttccactcttataaacgcatacacattaagcatgatggacaacattgtcataaattcaggtaccatacgtgcccaaacaggtaacaatggagtaacaattgataatttaagagtaatcaacggtacagatcaggccataactggctataatctgagattaaccaattccagatttgaaaattgtgatggtctcactcacaccggtttaatatggctatccaccaataataataaggtcacctatttagaaaacaataccttttttaataatacaattgcaggatccgccggcggcggcgccgcatactatatccaaagtgacttaataagcatcaataacactttcgactcaaattggattacggaaagtaggggagaaaatgttgcttatgcagggggcagacatataatttccatcaatgacaaattcatcaataacgaggttcccaaatatgttgcccaatatcgaagcattggaaacgaagaatgtgaaataattgtggaaaacattactttcatcaacaacaaggcatctggaaatggtgcaggtttagcgaccactggagccatagtcaaaggagggaaattcatcaataacagcgcctctggaaacggcggcgcaatatatctcttaaatcatgacaatacaagttcatattgtcaaatgagccttgaagatgtcatttttgaaaacaattcagccacttgcggaaaggacattttcatcgaagggagttctggaaacaatatatttacctatttaaataatctgacaatagttgccaatgatttgaatgtaactagtttgtctgataatttaaccgtcagcgtatttcacccttccggcgccataatcggaggaggggaaataagtttctatcttgatggtgaatacattggaaaatccactctggtcaatcaaaatgcaagtttagaatatgtaggatttaaaaacaataccatatacgaattcacaagcatttatgaatacgcctctttaaatgacacttacattgacggcatagtttccaccaaaatcccttacgccttggaaaacattgaactttatgtatccgatggcagtggcgatgatgaaaatggaaacggcagcataagcaatccatttaaatcaatttccaaggcattgagcgaaggatatcaaaaatcaacaaatattacagtgcatattttggaaggcacttatacaggaagtttaaacagcaatttaagaattccaacaactgttaacatattgcttatcggcgaaggggcagccaagaccataataagtgacagctcctcagactatttcattacagcattaaaaggcaaatgcgaattaagaatatcccagatgacattgaatagggcggcccgtgacacacaatcagccatctatattgaagaggaatccaatgtggccattgacaatgtcacattcattggcggccaaggaaattacggcggagccatcaatactgcaggaaacctttccataagaaattcatatttccatgacaatggatatgcagatagaactttacgtgcaaatgcctattacggaggagccatttgcaatgacggcaccctaatcattgacaatacaatatttgaaagcgaccatgcaggcagactaagtgaaattgcgaatcaaggcacattatacatgaacaattcaaaagtgattgacagcataaacgcatatagcataaacatggatttggttgctatcggcgcttatggtggccaaaagggcgaaattacaatagaaaatagccaattcatagttagctccaagaccatcaatgaattgaatgacagaatctatgatcctacaagggcattgacctgcttgggcattggttcatgccaacatgcaatcctcatcaactccacattcattggcgaaggggcagtattctccccttatgtatttggcggaattaactcaaataatcttgcaagtggaggatgtaccatgattccaggagatttggaagtctacaattcaacatttagaaatgtccaagctgtaaatataatatattcaagaacagataatgtgagatatcactcccaaagggtctttgaaggatgcctattcgataatgtcgaatatataatagctgttttgaatacaggcaatttttcagttgagatgcatgactgcgttattttatcagatgatcttgctaaaataggatttggaagtgaaaaaaccatgaaaatggacatttccaataactggtggtcctccaacgatggaagctatgacaatgccaccctaggaactaccaattacatttcaaattgtgttgtaaaactcaaggaaataagttcagagactgttcatcctgaaagctatctgatcctaactctaaattcaagcaatagaaccggtctgctacaggatgcaatcctggcattcaaggcatacgacggcgaaaacataagcgattacgatggagctttatatcctcgaaatttcgaaatgtctgccataaatgccactttagatgacctggagggcacaataattaacaaggccatcaatccatttgagggtgtagaaaacagcggatattacattgaagccattgtagacaatcaaaaggtcaatctgacagtccatgacagcctatctatcggcaacgcatacattttagctgagaacatttcaatcaactacaatgaaacacaaataaatgtcactgttttggaagagaacggcaaaagagcggatggaggaaacgtttcattgaaattgcatgataaaacctatatatccgaaatcattaacggcactgccatattcgatatagatgtccttcctaaaggggattacctattaaattattcattaaatcgtcctaaggtttatcacagcatttccaactcatcaaatttaactgtcattccatttaaaataaatgcttacgccaatgccagcaatatcaaagtgggagaggatgcaattgtcatagcctatctagataaggatgccggaggcaacgtcactttaggtgaggaaatccaaaaagtcaatgatggaactgccactttcatcatttccaatttggccaaaggggattacacttaccaactaagttattccggagatgaaaaatacgataatgaaacattccatgtttcattctctgttaacttgaaggatgctagcatcagcgttgagaatgacactttggacttgtttgttggctccaatgaaaccattgttgccactatctctccaataggacttgccgtaaattacagttgcagcaatgaatctgtagcaatggttgatgaaaatggtgtcgtcagtgcagttggtgcgggaatggctgtaattaccttgactgtcggtgatgatgtaacttatagcaaaaactctagctctgtcactgtcattgtcagtaaaatcccaaccatcattgagatagttaatgataccattagcttagaagtcacagacagccttgattccattgcaagtttaaatccagaggagggaggcaatttaaactatgcaataagcgatgacttgattgctaagattgacaatggccaaattactgcattaagtgaaggcagtgccattataaccgtttcatttgatggcaatgacaagtatacaaaagctcaaaacaaaagcatcaagattattgttaatcttaaagaggccagcgttagcgcattcagcaatattgacttgctggtgggtgaaaatgataccctttctccaaaaacctcccctgaaggattagatgtgagatatgaatctaacgatacatctgttgtgcttgttgataatggccaagccattgctgttggcgagggcaatgccaccattacattgactgtcggcggcgatggagtatatgcagaaaatacaacaacagtgaaagtcagcgtaagcagaatagctaccatgattgaaattgaaaaagataccattgaattaaaagtcaatgaggaatccccaatcggagctatattggagccggatgttggcaatttaacttacagcataagtgatgaaagcattgctaaagttgaaaacggcaagataattgctttagctgaaggaaatgcaagcctaagcatttcatttgcaggagatgaaagatacattggaacaaatgcaagtgtggagattagagtaaataagataaacacaatattgactgaaacagacataacaacaacctacaaagaggagggctaccttatagcaacactgaaagacagccaaaataatccaataagcggagctgtactgactgttgacttggatggaatcaaaaactatacaactgattccaatgggcaaatcaagatagcgacaaataatctgattccagacacttatactgcaagaatcagctttgcaggcaatgaaaactacagctcatctaatggaaatgcaagtgttaccgttaaaaggataggtacaaagcttaatttcaatgacatgaacactaccgcctttgattccaatatagaaggaagaataggagaatatttctatttccaattagttgactgcgatggaaatccactagccaacaaaaaagttatcataggattcaatggagtcaaatacaataggcaaaccaatgaaacaggatgggcaaagatacagatcaacttgaaatatgccaattcttacacctttgcaatagcattcctaggagatgacaactatagcggatcattcaactttgcagtaatacgcgttagccaacagacccctaaattaactgcaagtagcaagacctataagtcaagcgcaaagaccaagacactgactgccacactcaaatcctctagcggaaaagccattgcaggtaaaaaaataagctttagactaaatggtaaagtctatacagcaaataccaattcattgggagtggctactgtaaaggtctctttaaacaagaagggaacctatagctttacagcgcaattcagtggtgacagcacctataagaaggttactaaaactgcaaagctaacaataaaatag

SEQ ID NO: 1725 - DNA, 1371 bp, Methanobrevibacter ruminantium
  source 1..1371: mol_type = genomic DNA
atggaagaacacatagacttatttaaaagcatactaaacaagatagaagataaagtggattatgcagacataagggctggaactggaaacaacacaagcataaccatgaaagacaatcagattcaagacattaacacaggactgtcaactgttgcaagaataagagtattaaacaatggagcttggggctttgcaacaaccaatgacttttccaaacttgaagagataagcgaaaaagccataaagatatcaaactcactgaaaggagacatcactcttgcagaatgcgacatcatagaggatgctgttgcaattgaacagaagataaagctaagcgatgtaagcatagaagagaaaaaggaaataatacaagatgcaaacaaggcaagcaatgttggcaatgtaataagcacaactgtaagatatggggatgcagagtcaaagactgcatttctaagcagcgaaggaagctgcatactaacagacaatgcaagggtcagcctatcacttaatgcagttgcatcaaatggggagcttatccaattccatcatgacagcttaggcggagtcaagggatttgaagtattgaagaatgcagatatcgaatcctttggaagaaaagttggagaaaaggccactgaacttctagatgccaagccagcaccatcaggaagatttacaatcattgcagacaatagcttaacaggagtatttatccacgaggcagtaggccatgccgtagaggcagaccttgtgcttcaggatgattccatacttcatgaccagatgaataaaaagataggttcagatattgttaatatctatgacgactcaagcaataaggatggattcggctattatccatatgatgttgaaggggttaaaacaagaaagaaccagatagtcaaggatggagatctaatttcatacctatcatcaagggaaagtgcaggtaagcttgacattccgcttacaggtaatgcacgttcatcaatcagcgatcagcctattgtaagaatgagcaatacctatctccagccaggagacttaagctttgatgagcttattgaagacattaaggacggaatatatcttaaaggctcaaggggaggtcaagtggatacaggaaaaggaatcttccaattcaatgcttccgaagcatataagatagaaaacggagagttaaaggaccacttcagagacgtttccttatctggaaacatacttgaaaccttaaaatgtgttgatgcaataggatctgactttaagctaagcgttggattctgtggcaaaggtggacagactgcaccagttggagatggaggtcctcatactaggatattgaatgcaatggtaggtggaagtagttaa

SEQ ID NO: 1726 - DNA, 558 bp, Methanobrevibacter ruminantium
  source 1..558: mol_type = genomic DNA
atgttaagtgaagacgacggcaaatatttacttgaattagcaaaagatgcaattgaaacctatgtaaaagagcatgataagattgatgtgccttcagattgtccagaacatcttagggaaaagcttggagtatttgtaaccctaaacaagaacaacaacctaaggggatgcataggctatccagaacctatctttccattggttgaagcgactatagagtctgcaatatctgctgcagtaagagatcctcgttttccagaagttggtgaaagcgaacttgacagtcttgaatatgaaataacagtactcactaagccagagcttattgaagtggataagcctatagattatttggataatataataattggagaggatgggcttattgtagagaaaggattctatagaggattattattgccgcaggtagcacctgaacacaatatggataaggaagaatttttatcacatacttgtcttaaggcaggtttaaggccagatacatggttaaataaggatacaaaggtgtttaagttccaagggcaaatatttaaataa

SEQ ID NO: 1727 - DNA, 1056 bp, Methanobrevibacter ruminantium
  source 1..1056: mol_type = genomic DNA
atgatgttaccaactataccaactccagatgagttattggataaaggatttagaagaggaaagaaggcagctgatttaagaagaggagaaaagatgcctaagcgcctgaaagggaagcgaattgaagagaccagagttatcactgcctgtcaggtaatcaaggaccgtcttaagatgattcttgatcggactcctgaaattgaagagcttccggaattctatcaggattatatagacattacagttggggttgacgactttaagcaagctctcggtgcagtcaactgggcttacggaatcatcacacagcttgaaaaggaatatggggcaaagattaggaaagctccttctgaacgtgccaccggtcttcgaaagcaagcctatggccgtatatcatctgttgtacataagattgaaaaggaccttgactttttggactttgcaaagcaaagccttagaaacatgcctactgtagactttgatgcaataagcattgtaattgcaggatttccaaatgttggaaagtcaacattactaacccacattacagatgctgagcctcaagttgcaaactatccatttacaaccaaaggtattcagattgggcattttgaaaaaagatggcagcactatcaaatcattgacactcccggtcttctagacaggcctattggagacatgaatgatattgagcttaatgctatggtggctcttgagcatctggctgatgcaatactctttatctttgatgcatctgaaacatgtggatatgcccttgagaatcagtacaatcttctggaggaaatcaagaatgtctttgatgcccctatcatatatttatttaataagatggacatttcagactatgatggagcaaggcatgactatgttcaggagtatattgataagactgagaatccattgcttatctctgcagctgaaggtgaaggattggaagagatcattcagttaattcagcaggttgaaaaaagagagatagctgaagaagatgaagatgaatatgaagatgatgaaaactattttgatttgacttaa

SEQ ID NO: 1728 - DNA, 594 bp, Methanobrevibacter ruminantium
  source 1..594: mol_type = genomic DNA
atggctgaagatatgagcgaaaatattgaaaccaaatctgactttaaagacaaagctgaagaattcaaagcaaaagctgaagcaagaactgaagctaacaaagaaaaatgggatgaaacctacaacaaaggtaaagacgtagcaggaaaagttggtgaaaacctatcaaaaaccattgatgacaccatcattgcaatgaaagctatgcaaaagaactttgatgacaaataccaatcctataaggaaacctctgcaaccaacaaaatcagcgttgaccttgcagaaactaaagacttctactacttacaagcttacctagcaggtgtagctaaagaagacatctcaattgaagcaactgacagttccatctccatcaacgcagaacttaaaaacattctctgcagcattgaagaagatgaagaaaacccagcaaacctaattatcactggagtaaaaactggagttgctgaaaggaccattaaattaggagctgaaatagttaaagaggaaatttctgcaaaacaagacaatggtatattatttataaccattcctaaaaaagaaattcctacaactaaaattgatatagaataa

SEQ ID NO: 1729 - DNA, 204 bp, Methanobrevibacter ruminantium
  source 1..204: mol_type = genomic DNA
atggcaattcctaaagctcctgttaataggattattaaagatgctggtgctgaaagagtaagtgctgaagcagtagatgcattagtagcatacttagaagaagacgcagctgctatctctaaaaaagcaattgaatatgcaaaaatcgctaaaagacaaactgtaaaagctgacgatattgcattagctattaaaaacgaataa

SEQ ID NO: 1730 - DNA, 672 bp, Methanobrevibacter ruminantium
  source 1..672: mol_type = genomic DNA
atggaattttatatcataaacggcgggccaagaaagaaatacaacactgcagagcttcttaaaaaagcatctgaaggaattaaggatgagttaaaggacattgatgaggatgtaaacattcatcaaatccatttatatgacttgaactttaagggatgcaaatcctgcttccattgcaaaagaataggaggcaaatactatgcacaatgtccaattaaggatgaccttttggaattgcttcctaaggttcagaattcagatggaataatctttggcagccctatctactttggtgaaatcacaggagagttaaggtcctttttagaaagattccttttttcaatacttgtttatggaggagagtccaatgctcctaaaagaatgcctatggcaatgatctataccatgaatgttacagaagagggatttaatcttttctatggagataagtttgatatcttggaaaatgccatggctaatttaatctcaaagccatattccttaaaggtctatgacacttttcagttttcagactattccaaatatgagaactatgcctttgatccagaacttaaggccaaacgaaaagaagagcattttccaatagatcttgataatgcttataatttaggcaaaaaaatagctcaagatagtttaaaactcaatgaatag

SEQ ID NO: 1731 - DNA, 1011 bp, Methanobrevibacter ruminantium
  source 1..1011: mol_type = genomic DNA
atgagatataagatgtatgatgaaatgatggagcagccggaggctttaagaagaacatttgcctctgaaagtgaaaacatggcaaatatatctaaaatcgctggaagcgttgagaccatttatctaatcggttgcggaagttccatttcaacatgttactccgttagggatgcattggcatctgtcagtgacttaagaatagaagtgtttacaggttatgaattcgtttacaataaaaaactaaatgatggcgaaaactcattattcattgcaacttcccaatctggggaaactgcagatacattgactgctttaaaaagagcaaatgaatttaatattgatacagtttcaatttccaatgagccagagagctccatgattaaggaagccaaatatcctattgtaactttaggaaatactgaaactgcaattttaggaactaaaacctatataacccaattggcttgcctttatcagatattgttccctgcatcaggatatgaaaagacagatgagattatggaacaattagccaacatgccagacttggttcaagagctattggaatcaactgaagaggacaataaaaacttagcagaagaactaaaggatgaagaaggattctattgcttaggaagtggagtcaattacggccttgcatataaattggctatgaccatgcttatggaaggagctataaagcatgcttgcccattatattccgcagaatacagacacggactaattgaaagggcagaggaaggagttcctttaatcttcttggatgcagatcttgaatcagatgagctaaccaaaagagcaatagcaaatgcaagggatgaattgaaggcaaattgcataatctataatttaagggattatgctgatataaacccattgcttgcaccatttgtctttgtagtgcctttagaatggtttgtctattatttggcacacttcaatggagaagatccaggtagtaccagacatattggtaaggttagatattaa

SEQ ID NO: 1732 - DNA, 546 bp, Methanobrevibacter ruminantium
  source 1..546: mol_type = genomic DNA
atgaatgttgatttaagcaaggcatcaatgaatgtaggacagcaatacgaagcgattctcactacaataaacaatgaaggcaagacaaatgcagctcctttcggagtgaggataatagaagaagataaagtcatgctaaagatatttgaaggtggaaacacaattaaaaacataaaggataacggagaatttattgtaaacataacaaatgaccctatcatgttttcatatgccacaaccacaagcatccccgatgaatatttaagtagaataaactatgatgaccatgaatttgcacatataagcaatgcagatgcttattttatctgtaaagtctatagcattaaggaaggaatgagaaaggataatattaaagatagtgaagcgaatgtgattaaggcagatgttcttgaacttaaaataaatagcccttgcgttaggccaatgaatagaggaatccatgcacttatggagtctcttgttaactattcaagaataaatattgttgataaagatacacaggactttttttatagaaagatttaa

SEQ ID NO: 1733 - DNA, 1371 bp, Methanobrevibacter ruminantium
  source 1..1371: mol_type = genomic DNA
ttgcaagaggcaaacgaagacatagatttaatcgtaaaccatccaaagcaggcaattaacaagcttgcacttccaatcattttcagcaacttcttcatggttttaaacaatatcatagatggaatatgggttgctggattaggatccaattccttggcagcagttggctttgtaactccattgttctttgccatggtcggttttgcaaacggattgggagcaggtgccaacagcctaatatcaaggtgtatcggtgctgaaaactatcagggggctggaaacagcgccatccattcgatgatgttaagcataattgtcacaatctttgcaacaatcgtccttttggtgtttttaaatcctctccttatgctgatgggtgccggtgaaatcatagaggaaacttcaaattatggttatataatccttgttggagcatattctatctttttacctgcaatgatggctgcaatattccgttctgaaggggaaatcaatagggcttcctatcctttgatgcttaatgcaataatcaatatgatcttagatcctatctttatatatgtccttggatggggagtcaagggtgctgcatttgcaactgttcttgctggaacctttgcaacacttccaatggtctattggatgtttatcaagcaggacagtttcctaaaaatcaagctaagcgaatataagaccaatctaaagatttataaggacattcttgtagtgggaattccagcaagcattgagcagtttataatctcttttgtgtctatccttatgaattattggctaaccctcttggctggaaccctggctgttgcagcatatactgcaacatggagattggtgtcaattggagtctctccaatcattggtattggagttgcagcacttaccgttggcggtgctgcctatggggcaaagaatctaaagaattttaagacagctctaaattacagtgcgattctaggaattatttcatcaataatcatatgttcaattttctttgtatttgcagagcagctatcattcatattctcttattcagcagatagtgcaatacttgctccaagggttgtggatgcattaagaatcctttgtttctttattctccttatgcctttaggggtcatatcaggtaatctcttccaggcaatgggaaaaggaactatttcattagttcttaccattcttagatcattcattctagaggttatatttgcaggcatatttgcatttgtattcgattgggcagatatagggatttatacaggtctggtttgtggtatgatgtgtggttctattgtttcttatctttatataaattattatcttaaaaagcatgaagactattttatagttaaatag

SEQ ID NO: 1734 - DNA, 1875 bp, Methanobrevibacter ruminantium
  source 1..1875: mol_type = genomic DNA
atggatgaaaaaactattgactatgagggaaacataatcacagtaagcgcagaaggacttgatgaggatatcgaaataggagatatcaccattacagatgcagaacctccagagggagacctagtcataactgcaaggatccttgaagttgaaataaaggaagtctatcctgctgaaattgtcatagaaaacggtctttttaaggatgccattccaataatcactgatgatgactcactacttgatttagattatgatggagttctaattccaggattcatagattcccattgccatattgaaagttccaagctatccccatctaattttgcaaaggttgcattgacccatggaaccacttcagttgtagctgaccctcatgagatagcaaatgttcttggaatagatggtgtaaggttcatgattgaagatggaaataaagttccatttgacttttattatggggctccatcctgtgttccagcaactccatttgaaagttcaggagccattattgacagcaaggacgttgcagagcttttaagccatgatgagatagttgcccttggggaaatgatgaatttcccaggtgtattggctgaggatgaagaggttatagctaaaatcaaggcagctcatgactttggaaagccaattgacggccatgccccacttctttcaggagatgacttaaaaaagtatatctcatatggaatatcaacagatcacgaatgcagcaattttgctgaagccgctgaaaagaaaagagcaggcatgaagattatggttcgtgaaggctcatctgcaaaggatatggataatctttttgatgcagatgaaaggtttaactatatcatagaggaagagatgagaggaaacattattgcagatagtactgatgaggcaatggcagttcctccatttgactttttggtatgtgatgatgtcgatgcaagggacctatccaaaggccatttgaataaattggttaaaaaggcaatttccatgggaatcaatcctaaggaagcaattgcaatggccacatttaaccctgcagagcattatggattaaactgtggatcaatagacccgggaaagatagctaattttgtattggtcgatgacttgaaaaaccttaacatttccaaggtctgggttcatggagagcttgtagttgacgatggagaggttctctttgatgtggaagctcctgaaataatcaataattttgatttagatgaagtcaagccttcagactttgacgctacaatggaaatgggttatgtaagctctttaatggatgagacaaccaatgtatttgttattgaagcatatgatggcgagctaataactggaaaactggaagaaagccttcttataaaaaataaggtaattcagccagacattgataaggacattataaaaatcgctgtaatcaacagatatggcggtaacaatatcaccaatggattcataaaaggatttaacattaaaaaaggagcaatagccacaacagtttcacatgactcccataatattgttgcaataggcacaaattcagaggaaatggcagatgctgtaaatctgattaggcagcatcaaggaggccttgcagtggtatgcaaggaagatggcattcaagacatacttgaccttccgattgcaggtcttatgtctgataaggatgcagagtatgtggcatctaagttagtcgagctctttaatctggtccgtggattgggatgcactttgacttccccattcatgacattgtcatttatggcattgcttgttattccagcattcaagataagtgacttaggattgtttgactttgaaaaattcgatttcattgatttaatacacaatatttaa

SEQ ID NO: 1735 - DNA, 1218 bp, Methanobrevibacter ruminantium
  source 1..1218: mol_type = genomic DNA
atgtataaaagagaaatagaactgtccggtcatatcattgattctttaactcttcctaaaaccatggacattatcatggataatggtggagactttgatatactggaatttgatataggaaagcgtaaatctgacactagtaaagctaagattatggtttcagctgaatctcccgatattttaaattctatacttgatgaacttaattttattggagtttctatatctgaaatcgaagaggttaatttagtcccttctccaaaggataaagtagctcctgaaggcttttattcaacaagccatcatgttactcatatttattacaaaggcaaatggattttagtggataaaatcgaaatggattgtctgattgtcattgatgaagagaatgagacagcatcctgcaagccaattgcagaccttaagaaaggagacctaattgtagttggaagagaaggggtaaagattacacctcctcaaaggtcaagaggaaagcaaggggtatttgagtttatgaacagtgatgtatcctctgaaaagccaatgatgagcatcataaacgatgttgcaactgaaataaagaatgtcaaggctaatggcggaaagatagctcttgtaggaggtccagctattgtccatactggatctgcaccaatcgttgcaaagctaattaaggaaggcattattgatgttatctttgctggaaatgcattggctacccacgatattgaatgcgatcagtttggaacttcccttggtgtaaagatagaaaccggagaggtagtagctcacggtcacactcaccatatgagggcaatcaacaggatcaataagtcaggctcaatcaaggcagctgtagaggatggaaccttaaagagtggaataatgtatgaatgcattaaaaatgatgttccatttgttcttgcagggtcaattcgtgatgacggaccacttccagatgttattacagacactgcagagagtcagaagcttatgcgtcattatgctcaagaggttgatatggtcattatgatttcaacaatgctccattcaattgcaactggtaacttgctcccttcaagagttaagagtatttgtgtagatattaatccatctacagtaacaaagcttgcagataggggaagcgctcaagttgtgggaattgtgacagacgtaggggctttcttgcctgttttatataatgcattacatgattaa

SEQ ID NO: 1736 - DNA, 726 bp, Methanobrevibacter ruminantium
  source 1..726: mol_type = genomic DNA
atgtttataggtcttttggctccggctattgtgtctacagttttcattatgctgtcaggctcagacttgcttaagaaggactttaagaataaaatgatcggcttttataaggtaaaatggctgaatgtgatttgggctgtgattgtatttgcgattgtaatagtctgttccattttgctttcacttctttttggacagccaattgaccagttttcctttactgaaagcttttcctttacaggtgttggaattgctggagcatttatcacaattacacttgcttctataattgaggaagtgggatggaaaggatactgtgaggattcaatcggtaactatatgaactggttttgggaatccatgatttttggagtgctatggtctttctggcattttcctttaatctttatttcaggaacctatcaggcaggacttatggtaaatcctctttatgtgattaacttttttgtcagcggaatccctatgggatttgtcattacttgggtctatcttgaaagtgaccgttcaatattggcttgcatgatattccatttcttcgttaatttcatgcaggagaaaatagcgttgactccagagacaaagtgcctggagacaatagtgataacagtggttgcaattcttatagtcatggctaaaaaggatatgttctttgaaacccgtcatgttggaagactgcttgaatacaatagcagccagcagcaataa

SEQ ID NO: 1737 - DNA, 615 bp, Methanobrevibacter ruminantium
  source 1..615: mol_type = genomic DNA
atgaaaaaaggtgaaaaaaggaaacaagagctattaaagatagcttatgatatgtttcttacaaggggatacgagaataccagcgttgacgaaatcatagaaaaggcacagatagccaaaggcacatactactaccatttccaaagcaaagagcagatgctcgaagaagtcatagatatgatgattgatagtgagatcgaaactgcaaagcagattatcggaatggatatttctgtacctcaaaaaatagtggggataattgcatcaatgaaacctaccgaagtagaacagcctataaaggacactcttttccagccggagaatgtgttgatgcaccataaggtccgaaagcaattgattgatgttcttactccacttttatccgaagttatacaagagggagtggatgaagggatctttgaatgcgacaatatccctgaacgtgttaagatgctccttatcatcagcgatggtacctttaatgagggcacatttagcgagcgagatatttcagtatttatagacatgactgaaaagcttcttggagcagagaacggaactatgagcttcatttatgatctaattgacaagagtgagatggagggggcccagtga

SEQ ID NO: 1738 - DNA, 210 bp, Methanobrevibacter ruminantium
  source 1..210: mol_type = genomic DNA
atgggtcttattttattttttttatcatattttttactatttttattttcacaaatccatcactccttttatgatatcattattattgctagtcctatatgccatagtaaatctcaagggatatatttatatatgatgatgtttaaattattattaaaaaacaaaaaccgaccaatagtcgaaaaattatttagaagaatattgggctaa

SEQ ID NO: 1739 - DNA, 975 bp, Methanobrevibacter ruminantium
  source 1..975: mol_type = genomic DNA
atgcttttcaatacttatgaaccgggcaaatttgctttttcacatgaatctgttgattattatgatttaattaactcagaagataatttaaatggttcttctgatttttcaaagtcaaaaaaatggggaataatcggagttccttttgacagcacctgttcttatcaccatgggtcccgttatgctcctacaatcataagagaagcctcttttggccttgaacaatacaacagcgaattcgataagcttttagatggcgaattttatgactgcggtgacttgaatgttgttcatggaaactgcaaaaggacttgtgaaatcctggaagattctgtaaatgacttgattgaagcaaacatcaagcctatcattatagggggagagcatagtgtcactttaggttcagttaatgcattatctgctttagaagataaaaacaatttaaatgacatcactgtcattcatttggatgctcatagagacatcattgatgaatatatcggtgaaaagtattcacatgccaccattatgaaaagaatctatgatttggagcctaaggaactgattcaaataggaataagatcattctctgaggaagaaagggattttgtagaggataaggaaaatataatcagtttttatgcaaaggacattaagaatcagaatattcatctaaacgaagacgtttccacatttgaagacttattgtctaaattggattcaatcgaaggtaaagtctacatttcaattgatatggatgtatttgacccttcagttgctccatctgttggaaatccaactcctaatggtctgtttttagctgatgttcaagctatctttgaagcactaagctttaatgaagagatagatattattggatttgacttggtagagcttgcaagcgacagattgggagatattagtggagtccttgcagctaaagttatttatgactttttgactctctttgcttga

SEQ ID NO: 1740 - DNA, 408 bp, Methanobrevibacter ruminantium
  source 1..408: mol_type = genomic DNA
atgtcaacaaaagttgtagaacttaaaaccgtaaaagtcggaaaatatattgttttagatggtgaagcttctaaagtaactagcttaactacttcatctccgggtaaacacggagctgcaaaagcaagattagaagctgtcggtatttttgatggtcaaaaaagaagtttagtaaaacctgtagacactaaagttgaagtacctattcttgataagagagtcggtcaaattttagctgttatgggcgatcaagttcaaatcatggacttagaaagctatgaaacctttgaattacctatacctgctgaattcgaagatgaaatcagaggcgctgtaggtactgacttaggtgtagaatatatcattgctttaggcaatatgaaaatcatgagaactaaaaaagtataa

SEQ ID NO: 1741 - DNA, 462 bp, Methanobrevibacter ruminantium
  source 1..462: mol_type = genomic DNA
atgagaattgctattgtttccggaaatgcagaaggccctacagaattaaatgcttttgataatgctttatatgaagcaaaaataggtgatgtaaacctaattaaagtatcaagcatgttagaagctaatacaaaaatagaaaaattgcctaaattaaaagcagggtctatggtgaattgtgtcttatcaagcatagtttcatctaatcctggcgaaaacttaactgcatgtgtggcagtagcaatcggagatgaattagggtgcgctgttgaagttgatggaattgacaaagatccagaagacttaaaggatgaggcaaccaagatggtcaaatatatgatggataaaagaaatgtaaaaatcaatgagctgattgttgaagaggctcatcacacagttaaaaacattggatctgcaattgcagcagtcatttacattacagacgacatcttagaagaataa

SEQ ID NO: 1742 - DNA, 1866 bp, Methanobrevibacter ruminantium
  source 1..1866: mol_type = genomic DNA
atgaatcaagacgatatacaaatttgtaaagagatagcaactacagttttcaaaaatgtagagaatctccttgatggccaagtaggaaacccaaaagcaggagaatttgttaagataggcgcagacggaacccctacttcacatatcgacatcatagcagaagatgaagtaatcaaacttctaaaagacgctgattttgaatcttaccttatcagcgaagaaatcggagaactacgacttgggaaagggaaacaacaatctgtaagcctctctgaagaattgcttaacaacactccggaaaataaaaaagaagaagaagaaatacctcgctatattttcttaatcgatccccttgacggaacaagcaatgctgttaaaaacatcccagcatacggaatgtccattgcagttgcaaatgttccaatcggaagggaagcaacccttgaggacgtccaacttggattcgtaaaaaactactcaaacggtaacttctatgaagcagtcaaaggaaatggagcaaaggaaaacggtcaaccattgactccaagcaaagaaaccgatataaccaaaatcaccttaggaggattcacaaaaagcaaaaccctctctgtttccaaactagtggacactgcaagaaggatgagagtactcggttctgtagtattggaattggcatatattgcaaacggaaaatatgatgcattccttgacttaaggggaagtagaatcatcgatattgcagcatccaaacttattgtagaggaagcaggagcaatcgtcacaaataaatacggagaaaagctaaacaacagactaagcatctatgaaaaggcagttgtagtaagcgctggaaatgaagatctccacaaacaaatcattaaaatcataaacaacgatgaattggataaggtaacaagcgttgctatagtcagcagagtggatgagtataaatcagtcttattctcacttaaaatctttgaaacattgattgaaaagaatattgaaaccgtccttgagacctcccttgctgaaaagcttgaggaaataaaggaagacccagagcttcacaagatcattgcaaaaacaatgaacgagacccctgaaatcgcaatgcatattgaaagcctgaatttcaactatgagtttatggattatgccaagcaattgaatgaacttagaacagacattgcaatcattctaggaggagacggaacactccttagaacccaaaaccaattgacaaaggaaatccctatctttggaatcaatatgggcactgtaggtttccttaccgaaattgaagtggaaaacaccttcaaggcccttgatgcaatcctagatggagaatggtctaaggagaaaaggacacagcttatcatatcccacgaaaacgagtctttccgtgcattaaacgaagtcgttataatgactgcaagacctgcaaagatgctccattatgaagtttcagtggacggggaagttgtagaggagctaagagcagacggacttatcatttcaaccccaagtggttcaactgcatattcaatgtctgccggaggcccaattgttgaccctaaagtgggagcattcatcattattccaatctgcccatacaagcttggagtaagaccatttgtagtgtccgatacaagtgagattagaatcaagcttttaagacagggcaaaaaggcaatctttgtaatggatggacagattcaaaaagaagtaaactatttagaggagcttgtaatcaaaaagtctgaaaaagacgtttactttatgagaatcaataagaagtacttctataagaaggttaaggataaattaaatgaaggcggacttgaatccattaatagagttctataa

SEQ ID NO: 1743 - DNA, 1635 bp, Methanobrevibacter ruminantium
  source 1..1635: mol_type = genomic DNA
atgaatgtatttttagttgatttaacccatggaggagtaaaaatatcctctgaactttcaaaatccaaaagatttgaaaaggtatttgcatacgacttatacagcacattaaaagaggaagacgagcatcttttaaaaacctatgatgtgaccatattaaaggatttcgactcatttaaagaggaattaaaagaaaacagcaaagaacttttaaaatcagaaaaggaaaaagaaaataattctaaagacttaataatcaacccaattcactcttcattaaacattaaagacttattaaatcaaatcactgaagaaattaatccaaacaatgatttaacccatctctacgaaataattaaccaccaccaagctacaaaacttgttctagaaaactggaaagaagaaactaaaaaacatgacataaaaactatcgaaataacaggagtaaaaggaaagacaagtacagctttccttctaaaagagatatttttagaaaataatcaaaacacacttctactatccagtttaggagcatatctatttagaaaaaaccaagataaagaaatggaacttattttacaaaagaatatcagcataacccctgcaaacataataaacacaatacagcttgcaaaaaagatagcaaacccaaaatgcagttatttcccaaaatgcgctgcaaacaaaaacaagcaagaggaaaatgaactgtttgaagaatataacaataacccataccacaatctaaactatgatattgctatttttgaaaactcattaggagtatgtggccttggagatattggaatacttacaaatcttgttgagaattatccaatagctaaaggatcatccaatgcaatggaagctaaaagacaggtattcgattgctcattagtaatcatagaatatgaaactctaaatgaattctacaaaggggaatcagaggaatataaggataaaatcaatagcttttcattaaataacaataaggcaaatgtattttgtaaaaatatagattttgatatagacaatactcaaataaaaatcacatatcaagatttcaaaacaagaaataagaatacaataaatggagaattcactcttaattgcttcgcaccaggaccgcatcatgttttaaatatcctaacagctgtttcaactgcattggcattggaaatagatgaaaaaaccattatagctggaatatctaaattcaacggcatcgatggaagaacacaggttaaaacagttgaaaattcaataataatagaggaaataaacccgggaattaatacaaaagccatagaaagctcaataaatatgataaaagatatagataattattatatcattatcggaggaaaatatggagttacctgcgaagaaatagatgaggaaaaactatccaattatttgaacaattaccttacagataacccaaatacaaagctaatactaactgatgaagttggtaaaagtctaaaagagaaattagatttattgaatgataaagatgaatacgaaataatgtttattgagaattatgaagaagctagagatcttgccataaatgaaaataaaaatatattatttatttatagatccaattattcacaagtttctaaacgttga

SEQ ID NO: 1744 - DNA, 870 bp, Methanobrevibacter ruminantium
  source 1..870: mol_type = genomic DNA
atgattgttggaactagaggaagtaaattagcacttgtacaaacagattacataagacaatgtttatacaatatcaccggagaagaagtggaaaagaatattataaagacaaaaggggataagattacaaactcccaattatataatatggattccaaaggactttttacaagagaactggacaatgctcttctagatgaagaagtagactttgcagttcacagtctaaaggatgttcctaccgaattgaatgaagatttggagattgtagcagtccctataagagaaagccctaacgaagtgcttatttctaactacagctggagcgagcttgaagaaggctccacccttggtacaagcagccttagaagagaagcattctgcaaacaccataataaggactttgaacttaagccgatcagaggaaatgttgaaaccagaatagaaaaggtcatggatgggcaagtggatgcaacaatcatggcagaagccggtttaaatagattaggacttcaaaaatacataaaggccaagtttccaaccgattatatcatgcctgcagcaggtcaaggcgccttagcggtaatgacccgaaaagactcagagcacaaggaaacaatcagaaagctaaatcactatttttcccatcaggaagtcttagctgaaaagaccatcctagaagagattggagtaggatgtcaatggcctattggagcaatatctggaattaaaaacaaccaattggaactaaaatccatccttcttgataagaatggagagatcctttaccaaaaaacccttagcggaagcattagagaggctaaggagatgggtgttcaaataggtaaggaaatgattgagtttatctaa

SEQ ID NO: 1745 - DNA, 948 bp, Methanobrevibacter ruminantium
  source 1..948: mol_type = genomic DNA
ttgagaactataaatgttggagttataggtgtaggagcaatgggatataaccatgctcgagtatattcaaaattggaaaatgccaatctggtagcggtggctgatgtagtaaagccgacccttgataaggtatgcaaaaagtacaatacaaaaggatactctgaaattgaagacttattgaaaaaccctgaaattgaagctgtaagcgtatgtgtgcctacaactttccaccacgaagttgttatgcaagcaataaaatacggaaagcacgttttagttgaaaagccaattgcttttacagctgaagaagctcaggaaatgattgatgcagcaaaggaagctggagtaaagcttgcaacaggacacgtagaaagattcaatcctgctgtgcagaaagctaaggaactgattaaaaatgaagtaattggtgacttggtagcaatctcagctaaaagggtaggtcctttcccaccaagaataaaggatgtaggagttgcaattgaccttgcaattcacgacttggatgttatgaacttcctaattgaagagcctgtaaaacaggtctatgctacaatgagcagcagattggatcaatctgactttgaagaccatgcagaaatcatggtaagctttgaagaggacattacaggaatccttgaagtaaactggttaactccatataaacgaagacaaatcgagattaccggaactgatggaataatcacagtagattatatcgaccaaagcattgaagtctatggtaaatttgctcaagacattcaaataaagccggtagaacctttaagcgaagagctaaattcattcctaactaagattggaaatgatgaaactccagagattactggtgaagatggtcttaaagcacttaagatggtgcttgcagctaataaatcatctaaagaacacagcccaatcaattttagataa

SEQ ID NO: 1746 - DNA, 615 bp, Methanobrevibacter ruminantium
  source 1..615: mol_type = genomic DNA
atgaatcaagaactcattaacagagctcaagaacttagaaaccacggatttaccactggtgaaatagctgatgagcttaatgtatcaatggatactgcaagatggttgactttacagaaaacagaagagcctgtggaaacagaagctcctgtagacattgcaattaactggaacagcttaggaggaagcgcaaccagactcagatatgtttcagctgccttaagtgacattgcattaaagcatggtgacattgaccttgttgtaggaatcgcaaccagcggaattccatttgcaacaatcatggcagatgtaattgaagaattaaccggaacaactacctgcgtatctattttccaccctaaaaaacacagaaccaatccaaccaacagcgacgaaggagcaataagcagcaatttcggaactgtggaaggaaaaagaatagttgttgtggatgatgtaaccaccagcggtgacacaataaaagatgtaatcaaagtggttaaggatcatggcggaaatcctatcgtagttactgttttgattgacaaatccggacttgaagaagtggacggagtcccaatcgaatcattaatcaaagtaagtcaattaaggtaa

SEQ ID NO: 1747 - DNA, 807 bp, Methanobrevibacter ruminantium
  source 1..807: mol_type = genomic DNA
atggaatttaatattgtaaaagagttaaatggtcaatttgaccctattgtactaattaaaactgatgaaaagccagaagatgctttggcccctaagcctggaagaggaggctgtgttatgtcttttgttgcacagtccattgcaaagcgaaaggtcactgccttcggccgtgaaaacatcacctgcggaggggtatcagcaggatttggatggggaactggatttaagacagataaggacaaggaatttcaagctacttttctatctcttggccttgattctgcaaaggataaggatgcttttcttgaaagattgagctatttgccaaagcctactcaagagatgtttaaaaaaggagagaggatattttcagactttgacactgcatatgaaaacatacagaataggcctttgtatgatgagggagaatatgttgtttttaagccaattgagcttcttgaagagggggaaactccagattcagttatctttacagcaaatactatggaactgtctgctatcctacagttgaatggttcatttagggctgaaagtgctcacataatgacccctcaagcttctgcatgtcaggctattggcgcatttacttttgaacaagaagactctgataatcctatccctgtattaagccctctagactttgcagcaagggctcatatgagaaggttgattccagatgattatatgaatctgtcaatgccttggaaattgtttttaaagttggaagaactaagtaaaaatagcgtttttcaaacccatttctgggatgattttgggaataaataa

SEQ ID NO: 1748 - DNA, 1422 bp, Methanobrevibacter ruminantium
  source 1..1422: mol_type = genomic DNA
atgattgaaaataacatttgtttattaacagacagctataagctcacccaccactatctacacccaaagggtacagagaaaatctactcctatcttgagagcagaacaggtgctgagtttaacaagactattttttacggactgcaatacatccttaaaaaatacctagaaggcaatgtagttagcgaagagaaagtattggaagcagaaagaatcgtagacgctcacattgctccaggcattttcaatacagatgattggatgtatatagctcaggaattagatggaaagctcccagttaaaatcaaggcagttgctgaaggttccccagtaaacgtaggcaatgtattgatgacagttgaaaatacagacaagcgtgcttattggctgccaaactatcttgaatcactgcttcttcaggtatggtatccatcaaccattgcaacactctctgctgaggttaaaaagctatgcaatttctatctggatgttacaggctcctcaaaggacaatcttaactttatgttgcatgactttggctaccgtggtgcaagctcaacagaatcatcaagattagcaggatctgcacacctattaagcttttcaggcacagacaccgttccatcccttgcaatcccagttaactattacaatacaaatgagatccaaggattttcagttcaggcaacagaacatagcgtaatgacagcaatgggtccagagggcgaaatggaacaggccatcaatgttgtaagaaacgcccatgatggcattctatcaattgtaatagacagctacaactataagaacttccttgaaaacgcctgtatcaaaggacacaagctaaacgaagaaatcaacgaattcctaaagagaactgaaggaaacaagattgtattcagaccagacagtggagagccaatctcaacaacaatagactgtcttgagataattgaaagaggattcggtacccacaatacagacaaaggatacaagatcttcaatgaaaacataggccttctctggggtgacggtttagactatcaaaagataagagacatcctatttggaataaaagctcaaggatgggcagctgaaaacctcatattcggtatgggtggcggattgcacacagcagtaaacagagacactcaaagaaatgcattcaagtgttctgcccagcttagagatggtgaatggatagacatattcaaaaagccattggacacaagcaaaaagtccaaaaaaggaagattcaagttaataagaaacgataagtttgaatacagcactgttccaatagaaactgaaggcaaagatcaattaagaaccgtattcaaagatggtgaactattgattgatgatagctttgaagaaattaaaaagagaacagaaacttataatatgtttcctattaaataa

SEQ ID NO: 1749 - DNA, 1374 bp, Methanobrevibacter ruminantium
  source 1..1374: mol_type = genomic DNA
atggaagagtccaaaactagatttgaaggagttgaatcaatcttaggagaccctaagaaagccatatggaaattatcaattccattaataatttcactatttatcacaagcctctatagtgtcatagatgccgtttgggtgtcctctcttggtgccgatgcattggctggtgttggctttgtaagtccaatattcattgccctaatgggaattgggaatggtttgggagcaggagcaacctctgcaatatccaaatacattggagagggggataagaaaaagtcagacaatggtgcagttcatgcaatagtaataaccgttattgtatcaatatttactactcttcttttccttatattcctaagggatattcttctttcaatgggggcatcaaatactatagattatgcaatggattatggagtcattctagtttcaggctctatattggttattctatccaattcattatacggggtccttagaggtgagggagatggaaatagaactatgtatgcaatgctatttgcctctatcttaaatatgattctagatcctatatttatttattatttgggcttaggagttaagggagcagctattgcaactctcatttcccttttgtttgtaaaccttctcttgttttattggttttacattaaaaaggacacttatttaaggccttttttaagcaattataggtttgataaggatataacagtagacatcttaaaggtaggttttccagcaagcttggagcttgttaacaatgccctctttgcagcacttttttcccttcttttaactgttgtcgcatcaacagatgctgttgcagtttattctacaggatggagggttgttacaattgcaacaactcctatgcttgctgtaggaactgctttgatttcagtggtagctgccaattatggggctagaagatatgaggacattttacttgcccataggtattcaatgaagattgcggttctatttggctttattgcagcgatagttgtctatgtatttgctcctcagattgtttcaatatttgcctatactggcactagcatgagattaagctcacagcttattgcatttttatctgtgattgttatctattttcctacaatgggatatggtgtcacatcaacatttctcttccagggaactggcaatggaattactgcaatgtttcagactatattgagggaaactgtatttacacttggttttgctataattctagctgtggttttaggctatggggagtatggagcctggtggggaattattcttggagagttggttgtaaatactataactatgttttgggctgattggcatgtaaaacgcttgattaggtctaataattaa

SEQ ID NO: 1750 - DNA, 420 bp, Methanobrevibacter ruminantium
  source 1..420: mol_type = genomic DNA
atggaagaaaacaattacatcgtcttcaaaaaacaatacggcaacattaaacgccctaggaccaaggaagtctcaataaatcaaaacggagtcaaaatttacgaaaaggaccaatcaatgattataaacatagttcttccaatagaagactcaatgaaagtataccaattctttgaagaattcaacttaggtgaagacatacaatttaatatcagcaatactggagactttgaatgcgtattccgaggaatttcttcagtcattgataaagacagttactcttcattctcaattacagtccaagagaaatatcaaaggccagatcagctccaagtggaagcagactgcaatcaagttgatgaatatggcaatccaattcagcaatgcataggctgtgggcttcacagagacgaaatatga

SEQ ID NO: 1751 - DNA, 939 bp, Methanobrevibacter ruminantium
  source 1..939: mol_type = genomic DNA
atgattgacgaaatttatgactactacgaaaaacgtctaagcacttccaattctatcctcaagatgagaggaattgacgaagaaataaataaacttcccttagggattaatttagatattgcaaacatcttaagcacaatcgacatatatgactacgatgaaaagaaagcagccaaaaagatcaaggaagcttatgttgaagtcttcaaggaaggaatatatttgggaattggctttggcaagatcttaaagttcaactatgcaaagtcacatcctgaaaactatgtggaatgtctcgaagaggattatcaacattttaccttctatgactttaagatagaggttctaaagaagatcattcctccgataaaggttaagaaatttacccaagagaggcatcctaaagagataaactacagaaacgaaagctttgaagacatccgctcatacacctgcataaatgtcgagacccaatgggaagacaaatttgactttgaagtgaatcctgatgcaaaggaaatggaagattatatccgccaaagggaggtgaaatcatatgaggataatgaggaattaaagaaatgtgttgatgacttgaagatgggaattcaaaatatcctattccagaagttctttgaagcattggaggtggatttggaaaaggcagagaatggctgtgaaaacaatctgcgctttgatgaggagactgcaaaggacgtcttcatttcccctgtattctccaatctggaaggagagtttaaaatcagagagcttgtcaataaatatcttattcatgtattcaatgaaggaaagatcatcggccttttaaatggcataaagatagttctagaggacattcaaaatgacaggctagactatgaagagatgaattcaatgagctctagagaaagctttctatacattaaggagggtttatag

SEQ ID NO: 1752 - DNA, 846 bp, Methanobrevibacter ruminantium
  source 1..846: mol_type = genomic DNA
atgataaatgaaattgtaaacggctataaaaaccagcaaaaggtctatttaagttccataataaaaacactgaacttagatattccagacgttttaagtgtctatccaaaatcaaaccacgatttagataagatatttaaagaaatcaagctaatagacaaggacgaaaacatcctggaacctctagaggaattctacatagacaccttaaaaagaggaatattaagttccatacctcttggaaagagcttcatggtaaagctccatagggatgatgaggaacattttaacgaagttttaaggatgaacagcggattgttcttaaattacgttcctaaaatcagttcccttgaagatttggaaaaatgcactccaaaatatggggaaagagattactataaaatgaaggaagaagaacaagtcattgtcatagttgaaggaatactacgatccttttgtgaattcacaactgataacaacctaatggttgactaccattttgaggaattgtttgatgttttggatattgatctaaagttggctaaaaaaagatgcaataagagaatcaaattaggtaataaatccaaaataggaatcatctctgcaatctacaagaacaagaacggcaaattcagagtgactgacttggtcaaggagcactgccaaacaatctttgaagagggtatgagacttggaataagaaatgggataaaaatagtcatggatgatgttcattcaaaaagaattgatcctgatgactttagcaccatggaattaaatgaactttcagcctatttctataaggaaataaatgaagaattagaacagctcgctaggaactgttaa

SEQ ID NO: 1753 - DNA, 1224 bp, Methanobrevibacter ruminantium
  source 1..1224: mol_type = genomic DNA
atgcaaaaagacaattctaatcagaataatgatttaaagcaggggattagtgattctaatcaagagaaggatttaaaccataagaccaataattctaatcaaaataaggattttaataatagaattagcaattataatcaagaaatgggttttaaaaataaatccaataattctaaacaagaaaatgattcgaaaaacgatttagattccaataaaaacataaatccttttaagcaaaaggatgatgattttgataaggccttagataaaaactacctagaagagtataatactcagtactactacagcattagccagtgcacttcattggataatagctcacaaggtcgtttagtttcaaacatccttcttaatttgatagagtctcttgaaaactatcttttaaagatagctagaattgattatattaacagttattttgattgggattttcatttattaaacagctcatttgaaaatgcattctgcatgcctggtggcaaggtattggtttactctggcatattgtcaattgccgataatgaggaaaggattgcatatatattggctcatgagatggctcatgcattgcttaatcatccaagggattatattattgttaaggataaagaatataataatgttcttttatttaagccatttagtcttaatcaggagtttgaggctgatagattagctatgatgatacttaaatgggcagattatgatattggcaatattccttcattctgccagttccttaggggaaactataataagtttaactatttttccacacatcccttaagtgatgataggcttatgaatatggaaagtctgattgctgagataaataatctaaaggacgattgctttgcacctattataaagaatgataggtctaatgcccttatttatacaaagagatatgctggttctcagtataatgataaagataatgagattgaggataggccaaaggtattttgcactaattgcggatactatgaggattccgatgcagtcttctgttctaattgcggttctagaatggatgataagtctagatgtgatagatgtggggctctaatcgatccaggggatgtcttttgtacaaattgtggcaatgtattggtagatgattataaatgttttaactgtggtcataaaataaaacctggtgatgtattctgtgtaaactgtggaataaagcttattaggtag

SEQ ID NO: 1754 - DNA, 399 bp, Methanobrevibacter ruminantium
  source 1..399: mol_type = genomic DNA
atggcaacttttagttcaatagaagaggcaagagagttttttaagggagataagtttgcaactaacattggagttcaattggatgagcttgaagatgactcctgtgtatgcagcttagagctatgtgatgattttagaaatgcctatggtgctgtaatgggtggagcaatattcactcttggagattttgcatttgcagttttatctaatcaattgcacagacctactgtaggattgcaggtaagcattaattatttaagtggagcaaaaggagaaaagctcattgctaaggcacattataaaaagaatggaagaactacttctgtaatcaatgtggatataattgatgatactggaagagagatagcacagtttgttggaactggatataagatgtga

SEQ ID NO: 1755 - DNA, 1008 bp, Methanobrevibacter ruminantium
  source 1..1008: mol_type = genomic DNA
atgaaggacatatttgatgaatgccagtttggcgagtttaaattaaaaagcagaattatcagaactggcggatgggaaagagacacagaagacggaggctttttaaagccaaaagtctttgacagatatgaaaagatggctggaaatgaggtcggcttaatagtctctgaaatgtttgcacttgaccctaaggaccgtttttatccatactgtgcaaacatgaactataagggattcattaaggattataaacaggttacaaacctatcacatcactttgaggttcctattttaggccagcttgctttcttcttttttgatgatggaacaaaccagaaggcagagccaaatgacataagccttgaaggaataagaaagcttcaggcagaggtggttatggctgccaagaagttttcatttgcaggctttgatggaattcaaataaacatggctcataacttttatcttgcaagattcatcaatccttattttaaccagagaaccgatgattatggtggaagcactgaaaaaagaatgagaatagttgtagagattataaagcttataaaaaagatggtaggatgtcatgtaagctttagaatcaatgctgttgatggaagaaaaggtggaatgactcttgatgaaagctttaagatagcaaagattcttgctgaagccggtgcagatagcgttcagattacagctagaacaatctcctttaagtttggagagactggagaccacgcattcctttcctatgccgatagaatggcaaaggaattggatattccagtaatattagggggcaccttgcgagatatgaaaacaatgaatgagatcttgaatgagacagatattgaattcttatcacttgcaaagccttttgtagctcaacaagacttcttgagcgaatggaaggaaaatggtgatggagtttccagatgcagggcttgcaataattgttatggtaaaaaggagagtaattgtttccagtttggtgatgaatga

SEQ ID NO: 1756 - DNA, 576 bp, Methanobrevibacter ruminantium
  source 1..576: mol_type = genomic DNA
atgttagaactagataaacttttggatatctttaatgctggagatacattggttatggatgaggaagctacagatgcttgcaattactatagtgccgaagcacagaagattacttgcgaattaaattatcaatataatgactttgataaaagaagagaattgttctccaaactcatcaatcaggagctggatgatgaattcagggtttttacacccttctttacagattttggtaaaaacatacatctgggaaagaatgtcttcatcaatgcaggatgcaagttccaggatcagggaggaatatatattggagatgatgtgcttataggccataatgtggttatggctaccttaaatcatgatgaaaatcctaataatcgtgctaatttgattgcagctccaataaggattggaaataaggtttggataggttcaaatgcaaccattcttccaggagttagcattggtgatggagcaatcattgcagcagctgcagtggttacaaaggatgtagaggaaaactccatagttgctggagttccagctaagtttattaggaaggttaaaacggattaa

SEQ ID NO: 1757 - DNA, 1404 bp, Methanobrevibacter ruminantium
  source 1..1404: mol_type = genomic DNA
gtggctggtttaaatctgattgatagtgtaatgtattaccctattctaattatcgttatggcaattgcaggactctactttacttttaaaacaagaggagtccagataagattatttttagagtccataagaatccttacggagcctccggatgaggaaggcagcatatcttcccttcaggcaatgcttgtctccacagcttcaagggtaggaacaggcaatatcataggggtctccactgcattatgtctgggaggtcccggcgcatgcttctggatgtgggtgatgtgtatcatcggagcatcatctgcattcatggaaagtacacttgctcagatttataaaagaaaggacaaggagggggtcttctatggaggtcctgcatattatatagagcatggtcttcataagcataaattggctctgctcttttgcgtatttctccttgctacatatgccgtaggattcaatatgctttgctcctttaaccttcagtcaacattcatggaatatccgttctatcatccaagcataactccgattatcataggtgccgtgcttgccattatcacctgctactgcttacttggagggggaaaaaggattgtcagtgtcacaagcacacttgttccggttatgggagtttcctatgtcatcatatgtttgattgtgattcttttcaacattcaaaacgtgccagttatgtttcttttaatctttagggatgcatttgatttccagtccatccttggaggggttgcaggatcatgtatggtttatgggataaaaagaggattgtactcaaatgaggcaggtgtaggttcagcccctaacgcttcagcttctgcagatgtatcccaccctgcaaaacagggattggctcagacactatctgtatatattgacacccttcttctttgtacagcctctgcattgatgtgcctgtccactggagtggtaagggatgcggcggtttccggtgctccatatgtccaaaacgccatttcatctgtctttggatggataggccctatattcattacagttgctatgattctttttgcatttacaagcctgattggaaacctttattatacaaataatgtcttaatgttcatgaacaatgagaagatgccttcaaagagattcgtgcacatatttcatattgcatgctcattgattattttcattggagcaatcattccaatggatgccgcatgggctatggccgacattacaatgggtggaatgactttgataaaccttcctgtttgtttgcttttaagcaaggcagctatagattgtcttaaggattatgaaaggcagaagaagatgggacttaagccagtatttaaggcaagttcgatcggactaaatgaagaagagctagattggtggaagtaa

SEQ ID NO: 1758 - DNA, 336 bp, Methanobrevibacter ruminantium
  source 1..336: mol_type = genomic DNA
atggcgattccaaaagcacctgtaaaaaggattatgaaagaagagggcgctgaaagagtaagtgctgaggcagtagatgcattagtagattacttagaaactgatgcagatgccattgctagaaaagcaattgactatgcaaaacttgcaaaaagacaaacagtaaaagcagaagatattgcattagctattggccgcccagaaacttctgaatccactgctgagaatccacacaaccttttagaagtggttcaaaaagtattagatgctgcagcagacggaaaaggctttgaagaaatcattaaatcatttatgaaactagaaaaaaaagaataa

SEQ ID NO: 1759 - DNA, 1335 bp, Methanobrevibacter ruminantium
  source 1..1335: mol_type = genomic DNA
atgtcctatgtagatgaagtaattgacttaattgttaaagaaaaccctgatgaacctgagtttcatcaagctgtaaaagaagtattagaatctttaagagtcgtaatcgaagaaaacgaagaacaatacagaaaagacgcacttttagaaagattagttaacccagaaagacaaatcaaattcagagtcccttgggtagacgacaacggacaagtgcaagtaaacaccggttaccgtgtacagttcaacagtgcaatcggaccttacaaaggcggtcttcgtttccacccttccgtaaatgtaggtatcattaagttcttaggattcgaacaaatcttcaaaaactccttaaccggccttccaattggcggaggtaaaggaggatccaactttgatcctaaaggaaaatctgacagagaagtaatggcattctgtcaaagtttcatgactgaactctgcaaatacattggtgctgacactgacgttcctgctggagatataggtgtaggtggtagggaaatcggttacttattcggtcaatacaaaagaatccaaggattatacgaaggagttctcactggtaaaggattaactttcggcggatctttagcaagaactgaagcaactggatatggtttattatacttcgctaacgcaatgcttaaggcaaacggcgaaaccttagaaggtaaaaccgtaattatgtctggtgcaggaaatgtagctatctatgctatcgaaaaggcttaccaacttggagctaaacctgtaacctgttccgattccaccggttggatttacgaccctgaaggaatcgatgtagaattattaaaagaaatcaaagaagtaagacgtgaaagattaactgcatatgctgaagcaagaccatctgctgaataccacgaaggtaaaggcgtatggaccgtaaaagctgacgttgcattcccatgtgctacccaaaacgaattagacattgatgacgctaaaaccttagttgaaaacggtgtcattgctgtagctgaaggtgcaaacatgccaaccaccttggaagcaaccgaatacttaattgaaaacggtgttttattctcaccaggtaaagcttccaacgcaggtggagtagctacttccgctcttgaaatgagtcaaaactctcaaagattatcttggacctttgaagaagttgattccagactccaaacaatcatggaagatatctttgcaaatgtagatgcagctgctaaagaatacggatttgagaaaaactatgtagttggagcaaacattgctggattcttaaaagtagttgacgcaatgaacgctcaaggaatcgtatag

SEQ ID NO: 1760 - DNA, 549 bp, Methanobrevibacter ruminantium
  source 1..549: mol_type = genomic DNA
atgaaaatactaatctcaaatttaaagggaaaggaacttgtggaaatagctatgaaaaaccagatagacaagctaatttcagtctactcaaactataacgaaacaagcctccttgatcagtacatgactaaagaaaacataaagataagtacaacaaatgcaattgatgcctgcaagcagcttacagacataattcgccatcaagacacagatgatgagatctatgttgcaagcgatggaaactttttaggatcaatgctgaactttgttgcaaataaggaagctgcagactatatattctattccttcaacaatcagattatccaaatgcctagattaagcataaatctatctgaaacaaaaatgaaaattctaaagagtctgaatgaaacagagcagactgcaattcttattggaaagaatataggaatctctagagccatggtctataagcatataaacagccttatggaagatggcctggtggggcagactaagcagtatgaaaagtactatctaacaaatgcaggaaagatgctgattatctaa

SEQ ID NO: 1761 - DNA, 240 bp, Methanobrevibacter ruminantium
  source 1..240: mol_type = genomic DNA
atggctgaagataaacaagaacctttaagtccgattgaagagattaaaaaagaatatcttgaaaagatagactactttggaaatagaagaagcaaatatgctctttataaaaagttcagcaaaaaatacaacttaaaccgcagagtctttattcatatcctgaacgaggctcatgaagatgttggaagcccaaaaagatatgaattgagaagacaaacccctaaagactataaaagataa

SEQ ID NO: 1762 - DNA, 840 bp, Methanobrevibacter ruminantium
  source 1..840: mol_type = genomic DNA
atgcttattgtttattgtttaaacttttatatggtgttttttatgttttatttagtgggattaggtttatttgatgaaaaagacatttccttaaagggaattgaaactttaaaaaaagttgataaggtttatgctgaatttttcacttcacgcttgtttggatctaacttcgaatccattgaagagactattggaaaagagattattgttcttgataggactcaagttgaagaggaatctgtttttttaaaggaagctaaggaaattgatgttgctctcattacagggggagaccctttgattgcaaccacccactcagactttttagttgaatgcgcaagggatggaaccgactttgaagtgattcacggttcaagcatactatcttccgcacctgcaatttcagggcttcaggcctataagtttggaaaggtgacaaccattccattcccagaccttgagtacaactatttccctaagtccccttatatggctattgaagagaacttgaaaaatgatatgcatactttggttcttttagatattcaagctcataaggataagtatatgacaatcaatgaaggattagaaaacctaatgacaatcaaggacaatcttgaaagggaagggatgattgatgagaacagcttggcaattggaattgctagggtaggatccaaggacaatgtagtaaaggcaggatacattaaggatcttttggattatgatttcggaggccctcttcattgcattgtgattccatctaaattgcatattgtggaagctgaatatttggttcatgttgcagatggtcctaaagagattttagatgatttatag

SEQ ID NO: 1763 - DNA, 1404 bp, Methanobrevibacter ruminantium
  source 1..1404: mol_type = genomic DNA
atgaatgtttttagaagttttatagatattctaagcgataggacagttaatgaaagaggatatttcttctcaaataaggcactctttgccttatttcttcctctgcttgttgaacaagccttagaattttgcgtaggtcttgccgactcaatgatggttgcctcccttggggaggtagcgatttcaggggtgtccttagttgactttttagttcagctgcttatatttagcttttcggctcttgctacagggggagctgttattgctggccagtaccttggaaacgatgagccagagaaggcatgtgacgcttcaaaccagctggtttggtttacaaccattcttgcagtaataatggctgttcttgtcttgatcttcaggccatttttaatcaatctcttctttggtcagatagagccggatgtctttaacacttcaagcatttatctaagctatatggctatttcaattccattcattgccatctacaactctggagcagcaatatttcgtacaatgaacaaggcaaaccttcctatgcagataatgtttgtctgtgacattttaaatgtcattggaaatgccatactcctatttgtctttggatttggggttgaaggggttgccattccaactgttcttgcaagagcattggctgcagtcataatgatctactttgtccttcaggaaaggtatgaaatacatatcagaaagacacttaggcataagtttgactgggtcttgcttcgaaaggtcttgaatgtgggaattccttatggggttgaaaacggcgtgttccagcttggaaggattcttatcttaagccttgtatctacattcggaacaatagccattgctgcaaactctgtaggatatgcaattgggatattttcagttcttccaggatttgcaataaaccttgggctgactgccgtcatttcacgctgtgttggtcataatgactatgagcaggccaagttctataataagaagatacttataataacctttttatctcatttggcaatcaatctgcttatatttgctcttcttccatatatactgcagatatataatctatctcctgctgcaagtgccttgacctatcagatggtagtttggcatggaatctttgcagttctaatttggccgatagcatttactcttcctaccacattcagaggtgctggagatgcgaaatggccgatggcggtaagtttgtctgtaatgtttatctgcaggatagccttgtcatatgtgattgcagactttatgggagttggtgtatttggaacatggattgcaatgtttatagattggtatgttagggctgcattctatgtttacagatactttagcggcaagtggatggagtatagagctgttgggactaatttaagttga

SEQ ID NO: 1764 - DNA, 1461 bp, Methanobrevibacter ruminantium
  source 1..1461: mol_type = genomic DNA
atgattttgaatcattacattttaagtggaataaatgaaaagattggtgaaatggaggaggaatttcagttgatgctacttgcttcggaaattgtcgattgttgttttaatttctttgaaattgaacgaaaaacttcaaaagtcggcaggcctcattttgagattaagaatatgataaaactgatattttatggctacattaataaaataacgagttctgtagtcttggctcataatgccaagtataattttctctacagttttatttcgcatggctgcgaaccaagcgaccggacaataagggattatcgcaagaatttcatgagcatattccaattaataatgagctttacactaattgcaacatataaattgggtttgagtgattttaagtacattgcaattgacggtacgataaaacaagcttataactctccctttaacataattaaggaaaaagacatccggttattaattaagcattatatggttgaggaattaacaaaaaatgagattaaaaagcttagaaaaacagcgaagaaatttttgaaggataaaacgaaaacagacgaagaaaaagtggatattctttttgaatggtggcgtttgctggatttttctggacaaagttctctgggtttgaatgatcatgatgcgagatggatgaaaattaaggataaaggacagatttatccaaaattttcatataatcttcaattagggacagatactgagtctaagttgatttgcggagttaacgtagtccaaaacccaacagaccattatcaaatacccgctttaatgaatcaaatcataagcaatttaaatcttaaaccaacaaaaattagcgcagatactatttatttaacgcttgcaaacttaaattacttggataacttaggaataactgccttaattccaacatctcagcaaaatcgagagaattctggcgaaaagccaaacaatcgttttgctataggttattttgtttttgatgaatataaaaatgttttcatttgtcctgaaggacaggaattgacacttgatggaatttatcaggcacacccggaaaaaggaggaggaaacaagctaaaagcagtctattctaacttcaatgcttgcaataattgcataaataagggagtatgtttcaaaacagggcatagatcaataacaagatatgttcatgagcttgcttataaaactgagcggataatatcttcagaaaaaggcattgaagaatataaattgcgttctagtactgtagagtcacataatgggactttcaaaagggtttatctttatgattttattccaataaccggtttaaaaagagtacagggattgatgtttgccattgtagcttcatataacttaataagattcttaaatcttattaaagaaaataatatgagtttacaatctgttattaattcaataagatacatatcatcgagttaa

SEQ ID NO: 1765 - DNA, 1098 bp, Methanobrevibacter ruminantium
  source 1..1098: mol_type = genomic DNA
atgttaaccataaaaattccagtgcaaaatatagaagcaacaagacaaatagtgctaaaacataagattcttgactatgactataagatcaaggtggaaaacggctttggccatataccgattagagaggaaacagaagacgaaatactctctaaagtcatagaagaatgtaaagaagaaataataaaacaaaatagcgattatactatcgaagtagtcgatttaaaccaaaatgaagaacttgaaactgtcaaaagatatccaagaagcataactgagctccttaaggacaagctaagcgatgaggagatagaggaattaaagaaatcctttgatataattggtgatgtggttattgtagaaattccagaggagcttgaagcacataagaaggaaattggagaggccacacttcagttcacaaaacgaaagacagtatatatgaaaagaagcgctgttgaaggaataacaagaacaagacagcttgaactgattgcaggtgaggacaatcctataaccatccataaggaacatggaacaagacttaaactagatgtgaagaatgtctatttctcaccaagacttgctacagagagaaaaagagttcaagaggaaacaaaagatggcgaagagattcttgatatgtttgcaggaatcggaccatttcctattgttatagcaagagaaaagaatgtggatatcactgctgttgacattaatgaatatgcaatcaagtatctcaatgagaatattaagttaaataaattgcagcctaatgcccatatcactgcaatatgtggagatacaaggatagttgcagataatgaattgaagggacgaaaatttgataggattatcatgaatcttccaggattagcgccggatttcttagatttggctgtctccatgtgtaaggacggaggagtcattcattactatgaattctcagagggtttttcacagggaattgaaagggcccagatagcttgtgaaaaacaaaataaggaagttgagatacttaatacaagaaaagtaaagtcaaccagccctggaatgtggcatgtagttattgattgtaaagttagtgataaaaaatag

SEQ ID NO: 1766 - DNA, 960 bp, Methanobrevibacter ruminantium
  source 1..960: mol_type = genomic DNA
atgagaacattggaatgggaagacaataaattaaagcttatagatcaaaccaaactgccagatgaattgacttatgtctactgcagcaattacaagcaagtgattacagcaattaaagatatgattgttcgtggagcccctgcaatcggtgtctctgctgcctttggtatggcacttgctcagcttgccggagaagacatggaaaaggttgcagttgagatgaagaatgcacgtcctactgcagttaacctgatgtgggcagttgatagggttatgaaagccgaaaacatgcttgatgaggcattagagatggctcgtgaggacattaacacaaaccttgcaattggagagtatggcgcagagcttattgatgacggagacactgtccttactcattgcaatgcaggagcacttgcctgcgttgattatggaactgcccttggagtcttccgctctgcattcaatcagggaaagaacattcaagtgatatgtgatgagacccgtccaagaggacagggagcaagcctaagcgtttgggaaatgcaacaggaaggaattcctgtaaaactcattccagatgttgcaagcggatatctcatgtcaataggaaaaatagataaggttgtaataggggcagacagggtggcccatgatggaatagcaaataagataggctcatttatggtggctcttgctgctaagaggtttgacattccgttttatgtagccgcaccaatcagcacatttgataaggaaatcagcatctttgatacagaaatagaagaaagagatcctaacgaagtcatttattatggaggagcaagaatctgcccggaaggaactgaagtaattaaccctgcatttgatatagttccaaaggaccttataacaggggtcattacagaaaaaggagttttcgatttgaataatttagaaaaagactttaaagagcttttctaa

SEQ ID NO: 1767 - DNA, 891 bp, Methanobrevibacter ruminantium
  source 1..891: mol_type = genomic DNA
atgactaaaaaagacataacttgtggaggagaccataaaggtgcaagatttgcacacattacaaaagtgcatccatgctataatgaaaagctccacgataaggttggaagggtccacgttccaatcgcacctaaatgtaatatcggatgcaatttctgcataaggtcaatcaatactgatgaggacaggccaggtgtagcaggatccatcatggatgcagatgctgcagtggaacatgtattgaatgtgacaaaggacagcgcaatcactgttgtaggggttgcaggtcctggagactcattggctaatgaagccacatttgagttctttgaaaagatcaacaaggtaaagccagacctaatcaaatgtatgagtacaaacggtcttttgcttcctaaatatgctgaaagaatagcagagttaggtgtaaacactgttacagtaactgtaaatgcagtggacccagagatattaaaggaaatcaacggattcattttctatgaaggcaaggtctataagggacttgaagcagctgaaatcctttccaaaaaccagcttgaaggaattaaaaagataactgaccttggagttgttgtaaaggtaaatatcgttctcatcccagggcttaatgacgagcacattccagagatagcaagaacagtcaaggaatgcggtgcagaccttgtgaatgtccttcctcttattccattgaataagatggctgactatccaagacctggatgcatggagattgaaaaggctagaggggaagttgaagagtaccttccagtatttagggcatgcacccaatgcagagcagacgcttatggaattcctggaaagaaacatgaggatcatcatattggaaatgctccacagtctcacttctag

SEQ ID NO: 1768 - DNA, 567 bp, Methanobrevibacter ruminantium
  source 1..567: mol_type = genomic DNA
atgtatattgaatcaaatgatccggaaggagcaaaggtctacgacatgattataagacagatctttcaggatttggtcctgccaccttccattgatgacatgaaggcttatgtaaatccaaatgaggtctgtttcataattgcaatcaagatgagaaagacttcacagcacattaccttgaaggaagtggctaatgtcgactataacgctgaagatgacactacagtggtaatcattgacaatgaaaactatcttccaaacattctaaaaaggctttgggaaatcaatggccgtgaaaatgttcaccagccaagcagatatgtcattcacttgcctggagagaagaatgtctctgatttggttgtagacgaccctcatgaaaatctaaagagaagaatttatgatgcagtctttaggatagtccctgaaggatttaagataatgaaagacatgtctgaaggagacattgtctgcattgttgccacagatgaattgattaaggatgaatgggttgaaaaggctaaaggatatatggtggaattgaacactccaaagacttgggattaa

SEQ ID NO: 1769 - DNA, 1236 bp, Methanobrevibacter ruminantium
  source 1..1236: mol_type = genomic DNA
atggtacagattgcacttgtttcctgcggtaccgaatacagtggtatccaaaaggaaatcgaaaaggcagctcttaagtttggagctgaaattatccttcctgaaattgatttggattatattaatgaagcttatgaaaaattcggattctctgctcaaagctcaagcttaaagcttatgattgcaagggcaatgtccattgtagaaggcagatgcaagcctgatgcagtattcattgcaacctgcttcagatgtgctgaaggagcattggtgagaaacgaagtgagacgtttcatacagaacaacacccgtattccagtggttacatactcattcactgaaaggacaaaggctgatgaattgttcatccgtatggaagcattggcaactacagttacaagaagaagcattcttgctcgtgaaaagcaagaaggacttactcttggtctcgactcaggttcaacaaccacaaaggcagttcttatggaaaacaacaaggtcattggaaccggttggacttcaaccaaggatataatagaatctgctaagactgcagctgcagaggcctttgacaatacagattacaactgggatgatgttgacggaataggaaccacaggatatggtaggttcaccatgggtcgggaatttggcgcagagcttatacaggaagaattgtctgtaaacgcaaaaggtgcagtatatcttgcagactgccagaaaggggaagctacagtgctggacataggcggtatggataacaaggttattacagtaaacaatggtattccagacaatttcaccatgggcggtatctgtgcaggtgcttccggaagattccttgacatgacctcaagaagattggatgtggacattacagagcttggtcctcttgcagtgcaaggagactggagaaaggctatgcttaactcctactgtattgtattcggtattcaggaccttgttacaaccttagctgcaggaggctcaaaggcagatgtagcagctgctgcatgtcactctgtatccgagcaagtatatgaacagcaattacaggaaatcgacattcgtgaacctttgattcaagtagggggaaccagtcttatttcaggacttgtagaagctgtcagtgaaactttaggtggtatagaggtaattgtccctgagtattcccagcatattggagctgtaggtgcggcattgcttgtatctggtatgggcaaaaggcatgaataa

SEQ ID NO: 1770 - DNA, 507 bp, Methanobrevibacter ruminantium
  source 1..507: mol_type = genomic DNA
atggtaaaagtagctatttatccaccaaattcattgattttagctgacttgattgagagaaaaggtcatgctcctttagctcttcaaaaacaaataagacaaaagataaaagacccggagattgattcacctccaatgaacattacagaggaagacccaataaacggattgaagtatgcagctattgaagtcccttcaggggttaggggaagaatgtccatcatcggacctcttatagatgctgcagaggctgcaatcattgttgacggcgctccatttggctttggctgtgtaggatgtgcaagaacaaacgaactgtccattttctgcttgcgtaaaaaggacatacctgtacttgaagtggtctatcctgacgatgaggatgggaccgtgcttatggtaaatcaaatcatggaattcttggattccttgcctggcggcggaggagacatggaaggagacaatgacgttttaggcgaacagattggaactaaaggaggaaaataa

SEQ ID NO: 1771 - DNA, 507 bp, Methanobrevibacter ruminantium
  source 1..507: mol_type = genomic DNA
atgcctgcaaatttatgtataactccagatttaggtaaggaggacatggatccggaagtttctacaaggatgatcattttaagttccaaggcaaatgtaagcgaaagcgaagtcgtcaacttcctgcatatgcttaacttgccacttacaataaaatggacttgctatggggcaatgatcagcggcaaggacaaatatgtcagacaagcgattagagagcttcgcaaattggatccttacggaatctttacaaaggaaagaggttttgctccaggtgacccaagaagatgcagaggccacaggtatgggccaagggaaggattccaccaaatggagaaggaattcagaattcttgactatgttggagaggccttgaaaaatccaagagatgtggaaatcgagaagaaagaacctgtttctgttgattactttaaagaagttttagataaggctttagaagaatctgaaggttcttcaaaagaaaaaagtgaggacgataacaaatag

SEQ ID NO: 1772 - DNA, 1569 bp, Methanobrevibacter ruminantium
  source 1..1569: mol_type = genomic DNA
atgaaaagaggcaagcctatgctaataaaaattaatggagaagatgtggatattcctgaaggatctaccatcaaggacgctatagagctttccaatgcgccttataagaaaggaagcattgtctgccttatcaagggagaaagcgaaatacaaagcaatgtccttaagtataagataaagactcctaagggaagtattctcattgaattggaagtttctgaaaaatcaaagcctttgactgatttcttcaaggaaaactattctctcttcagctccaacaatgttcgttgggaaacctctaatgaagtggccataggtccggtagagtctaattttgaaccgtctcatgatgagttcaggtattttgacaatgatgtcttaataagcctctccggtttttccaaggaggccacacatataatctttgtaaaggacgatcactcaaatgtatatggagttccaaaatacagcgacagaggagtctttgcaaggattatcggaggaagaagaacattgttctcacttaccgatgatgatgagatattgtcaatcgagcctgtgattgagagaagcacagtcaccgacagtacaggaggctcaaatcttgaggaagttcttgaagagggaaatcagctattcacctacgctcttttagagccaaatgcaaagtctccagcatcagttgagcatctgttctcattgattagaaacaacaaaatacaggttgactttgaatctaactcatttttaggtttctatgaattaaatggtcttactaaggatgctgaagagataagtgaacgtaagagaggaacagtaaccttaagaagcgaaggaaacggaaaaggaagagtctatgtctatagggaggacagggtcagagctgaaacccataccaatcttgctacagtcaagcaaggtatggaactctttgataccgctaaaaagggagacttcattactgtattaagcgatcctgaaagaatcatgcttatgatgctaactcaaaaggaagcagaggaaaaaatgcaatctttaggaataaagcatgttcgtgacggaaaccttgatgacgatgcgattgttgtgattcagacacctgaaaataccattgacattctggaaaataaggaagtcaccaccttcggacttgcaagcgatgaattggttaagatcaaattgactgacaaggctccaagaaccagatggtatcttgagaaaatcagtggattggcagaaaagcctgtaggcacattgaaggtctactttgcagttcccgacatgaacatgttcatgttcaatggggatactgacgaatccaagggactcattccagagaatatccctacagatattgtaaaggccggtgagatagctgtaaccaatatgtcaaggaagaacttaggtcttattggtataaggacaatcgatactgatgagttcggacctactggtgaggcattctcagctacaaacattgtaggtgaggttgttggaaacattgaaggcttgaacaagcttaaggatggaagcactctttatatttatgaggtttacgatgaggaataa

SEQ ID NO: 1773 - DNA, 684 bp, Methanobrevibacter ruminantium
  source 1..684: mol_type = genomic DNA
atgagtttattggaagttaagaatcttaagaaaagctttggagacaatgtggtcttgaaggatatctccttttccgttgaaaagggtgaggtattgtcaatcataggtccatccggatccggtaagtccacattgctaagatgcataacagaccttgagacagaggacagcggtgagatcaattttgacggaacctttggattggtgttccagaacttcaatcttttcccacatcattctgtaatgaagaatattaccaatgcacctctaaaggttcaaaagagagacaaggctgaagtttacgagcatgcaagagaccttctaaagaaaatggggctttctgataaggaagatgcatacccttcagaattgtctggtggtcaacagcaaagagtatccattgcaagggctctttgcatgaagccggatatattgttctttgacgagcctacctctgcacttgaccctgagcttacaggagagatattagctgtaataaaggacttggcagctgagcatatgactatggtgattgttacccacgagatgaactttgctagaaatgtttctgatacaattatcttcatggatgagggtgtcattgtggaagagggctcacctgaagaggtattctcatctgacaatcaaagaatgaaagagttcttaggcaagttttatgaataa

SEQ ID NO: 1774 - DNA, 654 bp, Methanobrevibacter ruminantium
  source 1..654: mol_type = genomic DNA
atgttattaagtaaaattttagaagaattattatggggtatgggaacctccattgaaatattccttcttacattgctgttttccattccacttggtttggcagtggctgctggaagaatgagcagcttcaagccacttcaatggtttatgaaggcttatatttctatcatgagaggaactccattgatgctgcagctgattgttgtattctttggtccatattatatattcggaatgacactttcaagggattacaggatgattgcagttataattgctttcaccatcaactatgcggcttactttgcagagatcttccgtggaggaatcgaatccattccaaacggacaatatgaagctgcacaggtattgggatataccagagttcaaacattctttataatcatcttgcctcaagtggtaaagatagtgcttccatcaattacaaatgaggtaatcactcttgtaaaggacacttcactttcctttgtgcttgcaattccagagatgtttacagttgcaaagcagattgcagcagctgaagcttccatttcagcattgctgattgcaggtggattctattatgtattcaatgcgcttgtggcaattattatggaacgctttgaaaagagattggattattacgatacatag

SEQ ID NO: 1775 - DNA, 825 bp, Methanobrevibacter ruminantium
  source 1..825: mol_type = genomic DNA
atgaagaaaaaaatagcaattattttaggaattgcattattagcattcttagtcatcggcgcatccagcgcaggtttcttagactttttaggtggcgatggaactgctactaatgatgacaatacttttattgtcggttttgatgcagaattccctccatacggatacaaagacgataacggggaatatgtaggatttgacttagacttagctcaagaagtatgtgacagaaacaactggactttagtaaaacagccaatagactgggatgctaaagacagcgaattggactctggttcaattgactgtatttggaacggatttaccatcaacggtagagaagacgactacacctggtctgaaccatacattgacaacaagcaagttgttgttgtaaaaacagattccggtattaacagtttagctgacttagatggtaagattgtagaaacccaaaaagattcatctgctttagcagctcttgaaggggacaacaaaaccttagctgacacctttaaagacttaactcaagttgctgactataacactgcatttatggatttagaaaccggtgcatgtgatgctgtagctattgatattggtgtagctcaataccaaatcagccaaaaaggaagcgaccaatacaaaatgttagatgaagaaatctcatctgaacaatacggtatcggtttcaagaaaggaaatgaccaattaaaagatcaagtccaaaaaactttagacgaaatgtttgaagacggaactgtagaaaaactcgcacaaaagtacgacacctacggagttcctggcgctcttattcaaaaataa

SEQ ID NO: 1776 - DNA, 978 bp, Methanobrevibacter ruminantium
  source 1..978: mol_type = genomic DNA
atgaattttaatgagcttgttaaatcacttcaagagtttattggtgtaagtaggaaaaattcaatagaaaaggttacaaaggctttaagcgaaacttataatatctctggagatgttcttcttgactttggagacgatgcatctgcaatcgatattggaaatggtcaggttgttctacttgccgccgatggaatctggggacagttaatgagtgtcaatccttattgggcaggctactgctctgttcttgttaatgttaacgacattgctgcaatgggaggtaggcctatcgccatggtaaatacattatccattaatgatgatgaaatctatgatggggttcttcagggaattgtagacggctgccgcaagttcaatgttccaatggttggagggcaccttcaccctgatgccgaattcaattcattggatgtggcaattgcgggaattgctaaaaaggattctctaattacttccgctggtgctaatgtaggagataaggttattgtagccattgacactgacggcaggcagcatcctcagtttgtcttgaattgggacaccacatatgaaaaggatgcaaagctggttcaagatcagatttctgttatgcaggagatagctgaagctcatttgccaactgctggaaaggacattagcaatcctggaacccttggaactttggaaatgttgcttgaggcatctggtgttggagcatttgtagagcttgagaggattcctagaaatcctgatgtctcttgggaggaatggctgatggcttatcctggagctgcctttgtaatgactgccaaggaggaaaactgtcaggagattattgatagacttagtccttactcctttgaagttgcagtggttggagatgtgattgaggataagatgcttgttttaaaatcaggtgatgaggaagctgttctatttgatcaaaggaagaatcctgttcttgtcttaggcaattaa

SEQ ID NO: 1777 - DNA, 633 bp, Methanobrevibacter ruminantium
  source 1..633: mol_type = genomic DNA
atgacattgctgggccatcacattcatgataagcttttcctctctaaggacaccttggagattccttttgatgaggaggcagactctcctgagaactttaagtcaatcatgtttaatgtattcaagtcttatgtcattgagagcattaaggaagtcgttccaagctttgttgaaaaggaccacgaatataatgtggtcaatagctatgaaggattcgttgaagaggactatgaatttgaagacttggatgactttattcaagagctggagtatggcagctatgagggctctaatgagatttatgtggatgaggacggctctttagttgaagaggtctatattgaggatggtgaagttcctttagaggaagtttatattgaatatgatgatgttcctgtagaggagatctttgtggagcatgattctgatgatgatatttatgtagagcatgagtctgttgaggagatttttgttgagcatgatgacggctctatagatgagattattgttgagcatgagcctaatgaaaatattgtttatgaggatgctcctgtagaagagatttttgttgagcatgagcctaatgaagagattgtttatgaggatgctccattagaagagattttttgttga

SEQ ID NO: 1778 - DNA, 1242 bp, Methanobrevibacter ruminantium
  source 1..1242: mol_type = genomic DNA
atggaaattggagttgttgtacatggccccggaatcatagattctggctgggctataaaaattattgatattttatctaattatggaaatgtccattgtcgtttaggcggaactatgggcaggactgcagttattgacgctgctttagaggatgccatagacatatccttaaaattactccctagccaatctttggaactcttcaatagggaaggtgttgatataatcttcctattgaattatggaaagtcccctgaaactggcagagtctttggatataaggttttcaaccattactttaagcagatttcaaatgaggattatcttgctaccaatcataagcctttatatgatgcaagcgttcctgtaattcaaattgaacgtcctggagaagaggacggctcaataatcagctggaatacagaattgaatgagcagctaagcaaaagccgtaaaggcagattcaaattgggattgggaaagaagaatatggtggaatcattatcctttaactttgaagaattattcgatcatttaaaaacttccttaaatttagtagaagtcacaccagaggaagtcgtatccaattatttctccaataatcaggaaaggaaagatgaagaggacattgagaaaatattacgttcatatgatgattatgacatcagccattacacctaccgtaagattcatggagtaagccctgatgagaacatcttcataaacggcatagttgtaggctattccaatggagattccattgtcttggttgcccgtgacggattgattgccgacattataaatggaactattaagtatcacggacttgaaaagctaggtcctgttgatctggagagggtcatagttaaaacaggtcttcttagaaagtctgatgatgtaaatccgagagtcttatcaaataaggacatttcacttaaggatacagaaaggcatatctattcaggtgagatttcagaagatgactattcctttaaggttgcttatgtggatcatgcagcttatgacatctataagttcaaggactttgatttggttgttacaataggggatgatacttcccttgtggcctcagatattctttatcgttttgatattccaataattggaataaccgatggagacttggataaggtcgttgaaaacggatttgtaaatgagaagtcaacaatcattgaagtggcttcaggctttgatgacattgctgggccatcacattcatga

SEQ ID NO: 1779 - DNA, 507 bp, Methanobrevibacter ruminantium
  source 1..507: mol_type = genomic DNA
atgagtgatttatattatgtcttagatgcatctgcatttataaatggatttgaaccgaaatcagattttaacattacagtttctgaaataactgatgaggttaaagacttaaaatcacgactaatattaaatcaagccatagatgatggtaaaattataattcaagaggcccaaaaggagttcttggataaattagatgaaaccattgccaaatctggtgatgacttaaggttatcaggtcctgataaaaagctattggctgttgctttggctttattggatgaaggcaaagagattaaggtcttaactgatgactattctatgcaaaatgttttaaaaatccttgatattccctatgaaagcattataactgaaggaataaaaggagtttataattggaaaaagacctgtgaaggctgtaaaaaggagtatcctgcagattatccatttgatgactgtgagatatgcgggtctaaagtatttaaacgaagaattaaaacttactaa

SEQ ID NO: 1780 - DNA, 519 bp, Methanobrevibacter ruminantium
  source 1..519: mol_type = genomic DNA
atgaaaagtgaaacaatggaattacataagaagaaagctccaataaaggtttcatgtggaattataacacttagtgacagattctcaaatgacaaagagggaaaggaaaaagacttatccggaaaatacttgattgatgaattaagcaaaaaatacgatgttgacgattacacaatcattcccgatgaaaaggacatattaaaagacaccatagaatcaatgatagataatggaatagatgtaataatcacaacaggtggaacaggccttgaatcaagggacataaccattgaaactgtagaacctttatttgaaaaggaaatgaaaggatttggtgaaatattcagagcaatttcatatgaagaattaggggcgggatcccttttatcaagggcaacagcaggagtttataaaaagacactcatattctgcatgccaggatctcctaatgcagtaaaaacaggaatgaaaatattctatgaagaattagggcatcttaaaaaacatgcacaaaaatag

SEQ ID NO: 1781 - DNA, 531 bp, Methanobrevibacter ruminantium
  source 1..531: mol_type = genomic DNA
atgtgcatggtatctaaagaatatttaattgaaattcttaaggaaaacaaagtatttgaacaaggggaattcactcttgcttcaggaaagaaaagcaactattatgtcaatatgaaaagagctataacagagcctgaaatcttgtctacaattgcaaagctaatcaatgaaaagattgatgatgatacagataagattgcaggacctgctttaggagccgttcctattgcaactgctgtttctttggaatctaaaaaaccgctccttatgattagaaaagagaaaaaaggctatggaacttctaaattaatcgaaggagatttgaatgaaggggataaggtaatccttgttgaagacgttactacaactggaggttctttactaaaggccattaatgcaatagttgataatggtggagtagttcaaaaagcttttgttgttgtagacagggaagaaggtgcaatggagacctttgcaaatgagggaattacattagaacctttaatttccgttagcgaattttttgaataa

SEQ ID NO: 1782 - DNA, 285 bp, Methanobrevibacter ruminantium
  source 1..285: mol_type = genomic DNA
atgagaattgcaaaggaattaattggtaaagaagtcttaggaactgatgtaaccgttatgggaaaagtcgttgatgttgatattgatgttgaggataatattattgaatcaatcattgtctctaaaggaggtattcaggaaagcttaaacatttctaaaagcgaattggtcattccttttgatatgataagcaaaatcggtgataagattcttttaaaagatgcattcggagaagacctagatcaaatggctgatgagattcaagatttgaaaaaccaattataa

SEQ ID NO: 1783 - DNA, 114 bp, Methanobrevibacter ruminantium
  source 1..114: mol_type = genomic DNA
atgatggtttttggaatagaagatccttggatttggggagtttatgttttactcattggaatgacattggtttgtgttgcctacggcgcattaaactggaataatgaggattaa

SEQ ID NO: 1784 - DNA, 1650 bp, Methanobrevibacter ruminantium
  source 1..1650: mol_type = genomic DNA
atgaattactttttactaggaattgtttttatcgtttacttccttatggtaggttacgtaggttacctagcatggaaaagaacaaattcctctgaagactttttggttgcaggtagagaaactcacccatacattatggcattaagttacggggctacttttatctctacggcagctattgtcggttttggaggagtggcaggtaaatatggtatgggtatactatggcttgcattcttaaatattcttgtagggatattcattgcatttgtattcttcggtaaaagaactcgtaagatgggtaagaatcttaactccctaaccttccctgagtttttaggccgcagattcgatagtaaattcatacaatactttagtggagttttaatcttctgtgctatgccgatttatgcggcagtggttcttatcggtgcagcaagatttatggaaagttctttaatgcttgactttaatctggcccttttcatattggctgtcgtaatttgtggatatgtgcttttcggcggtttgaagggtgttatgtatactgacgcattgcaaggaacaatcatgtttatcggaatgttgattcttcttgtattcatctattgggtattgggcggtgttactgaagcaaacactgcacttacaaacatggctcacctatatcctcctgatgccttggcagaaggtggtacaggctggacaagcttccctaaactgggaagcccattctggtggactctcgtaaccactatcatcatgggtgtaggtattggagcattagctcagccacagcttgcagtaaggttcatgactgtaaaatccaataaggaattgcacaggtccctcttgattggagctgtcttcattgctgttatgaccggtaccgcttatatcgtaggttcattatgtaacgtatacttctatcagaacttcggtcagattgcaattgactatgtaggtggaaatatggattcaatcatccctacattcatctcaactgcacttcctgaatggtttgtatacatattcctcttgtccttgcttgcagcggcaatgtcaaccctttcctcacagtatcacactcaaggtactgcattaggtcacgatattgtagacgcatttaaaaacagaggaactacccgcgaatatactgatgaggagattttggaaggctcttcaaaagaggaaactagaataggatttatttcagttagccaattaggtattttgattgctgtagtgttgtctttaatcattggtcttattttgcctggaggtattgtagctcttggtacatctctctttatgggattatgtgcagcagcattccttccggtctattgtgcagccttattctggaaacgtgcaacaagaaaaggggcaattgcaggtcttttatccggtacattcacaagtcttttcttgcttgtatttgtatataagaaaactgctgttggccttggaatctgtaaggccttaactggtatggacatgctgattaatgtaatgccttggtattcaattgatgtgatggtatttgcaatacctgtttctgtaatatttacagttgttgtaagcttgctttcacctccgatggatgaaaaagtaattaaaaggtcatttgagggactttctgaagaataa

SEQ ID NO: 1785 - DNA, 1302 bp, Methanobrevibacter ruminantium
  source 1..1302: mol_type = genomic DNA
atgatttggaatcagaatgcagaatgtatggataaggaagaaaaagaagaaatgcaacttgccttactccaaaaacaagtaaagagagtttatgaaaaggtacccttctatagggaaaagtttgataaagcaggatttcatccagatgacttaaaaacccttgatgacattaccaaaataccatttacaaccaaagcggatttaagagaagcatatccatttggattattcgcagtaagcgatgatgagattatagaaattcacagtacctcaggaacaaccggaacacctgtcgtctccggatacacacaaaaggatattgacatttggggagagtgcactgcaagggccattgcaatggctggcggagataaaaactcaaaaatccaaaattcctatggatacggattgtttaccggaggattcggtatagaccacggtgctaaagtaatgggagccactgtaataccaatgtcttctggaaacactgcaagacaattgaagatcatggaagacttccaaagcgacattctcacctgcactccatcctatgcaatgtatttggcagaatcccttgaaaaggaaggatacactgcagatgacatcagcttgcacggaggaatcttcggagctgaaatgtggactgaagagatgaggcgtagcctagaggaaaaattaggaatcactgcacataacatttacggacttactgaattgatgggtccaggagttgctgcagagtgcaaatatcagacagggcttcatattcaagaggatcatttctatccagaaatcattgaccctgaaaccgaagaaatattagaagacggcaaaagaggagaattggtcttgaccaaccttacaagagaaggaatgccggtcatcagattcaggacaaaggatatgaccgcacttagaagggatgaatgtccttgcggaagaaccactgtaagaatggatagaatcactggaagaagcgacgacatgctaaaaatcaaaggagtcatggtttacccatcacaaatcgaaacagctatcctacagattgaaggattgactgcaaactatcagattcatgtatcaagacctcatacccttgatgagatagaggtaaaagtggaaacctcacctgaagtattctcagatgagatgaaaaagatagaagaatttgaaagaagaattgccaaaaagattcaaagcgctattggcataagcgtggatgtgactttagtagagcctgaatccttgccaagaagcgaaggaaaagcaattagagtaattgatgagaggaactttgattaa

SEQ ID NO: 1786 - DNA, 432 bp, Methanobrevibacter ruminantium
  source 1..432: mol_type = genomic DNA
atgagcgtaaaacaactttccgtatttcttgaaaacaaagagggaaaattaaaaaaagcagttaatgcaatgtcccaggctggagttaacatcagagccctttccattgcagacagctccaaatatggaattttaagattaatcgtttcagacaacgaattagctataaaagccttaaaggaagaaaactttacagttaaagaaactgaagttattgttgtaggagtaaaggacgaaccaaacggattgaacacaatgcttgaaatccttgaaaaagagcatattaatgtggaatacctttatgcattcgtcagctccaagactgatgaagctattgttgttgttaagattggaaactatgaagacggtttaaaagcacttgaaaatgctaatgcaaacctcttatccaaagaagatttagctgaattataa

SEQ ID NO: 1787 - DNA, 1278 bp, Methanobrevibacter ruminantium
  source 1..1278: mol_type = genomic DNA
atgttagatagattaaaaagcattagtcttggaaattggatactcatcggaatggttttaggcctaataacaggcgtaatattaaacttgtatgttcacagccaatttattgacataatactcatagataacgttttctacttaggaggaaacatatttatcaagctaatgaagatgctggttgttcctcttgtcttctgttcgattgtggtaggggtggcctcaatttcagacattagaaagattggtacaatcggtgggcgaaccatcctcatctaccttattacaactgcccttgcagtttcaatagctcttctgattgcaagcttcatccatccaggtgcaggactgcatatggctggccttgcaactgcctcaaacgtttcaaccaatgttacaataaccaatacaatcttaggaatggttccagacaacccaatcaactcattggcaaatggagacatgctcccagtaatcatttttggagtactggtaggaatcattctagctaagctaaaggaagagacagaaaccataaacaaggtctttgaggaaggcaacacaatcatgatggaaatgacttcaatagtcatgaaatttgccccaataggtgttttctgtcttatggctaagacatttgcaaccttaggattcgatggtcttatgccgctgagcaaatatgtaatatgtgtgctcataggccttgcagtgcaggcattcattgtctatccgtcacttatggtcatatttacaagattgaatccgatcaagttctttaagaaattctattctgtaatgctatttgcattttcatcttcaacatcaaatgcaacaattccattgaacctagaaaaattaagcgaacttggagtctcaagggaagtctcatcatttacaatccctcttggagccaccatcaatatggatggaaccgctataatgcaaggggttgcagtaatgtttgctgcacaggcttatggaatggatttaggagcaagtgcgctacttacagtaattttcactgcagtgatggcctctataggaactgctggagttccttcagtaggattgattaccttaaatatggtattcacttcaataggattgcctgtagatgcaataggaatcattatgggaatagatcatatcttagacatgtttagaactgctgtaaatgtaacaggtgatgcaatatgtactataattgtatcatttaagaacaagtctatagatttggatgtttttaatggtaaaaaacaagccgagggaagttcataa

SEQ ID NO: 1788 - DNA, 279 bp, Methanobrevibacter ruminantium
  source 1..279: mol_type = genomic DNA
atgccttttaaaatcgatagtgctattgttaaaaaagatatggactccggcaaatatgatttggtggatcctgaaggaaaattctcacaagcggatgctttaatggtcattaatagtgatgatttcattactgtacaacttataataaatgctattttaagaaatgactttaaagcatggaaagatgtaaaatgggaaggtggagacagtcttaaatcccttttagttaaattaggatatggtaaagaagaaatagttgaaatgttaaaggaattttaa

SEQ ID NO: 1789 - DNA, 3177 bp, Methanobrevibacter ruminantium
  source 1..3177: mol_type = genomic DNA
atgcctgttgataaggatattaataaagtgcttataattggttctgggcctattcagattggacaagctgctgagtttgactactccggttcacaagcttgtaaatcacttagggaagagggtttggaaactgttctagttaacagcaatccagctaccattcaaactgatatggatatggccgatacagtttatacagagcctttaactgcagagctagtagctcaaattattgaaaaagagaatattgatgcgatactacctaccatgggaggacagaccggtttaaacattgcaactgaacttggaaaattaggtcttttggaaggaataaaggtcataggttctgacgttcaaacaattgcagatgtggaagacagagacctctttgctaactttatggataggctagatgagcctattcctaaatgtcatgcagtggaatctgttgaaggggctttagaagctgtcgaagaaatcggataccctgtcatcgtacgtcctgcattcactttaggaggtaccggtggaggaatagcccacaataaggaagagcttattgaggtaaccacccacggtcttgacatgagttacatcaaccaagtattgattgacgaatccgttttaggatggaaggaaatcgaatttgaggtaatgagagacaagaacgacacctgtattatcgtatgtaacatggaaaatgtggaccctatgggaattcacactggagacagtatagtggttgctcctattcaaaacctgaatgatgaggtctgtcagcgcctaagagacgcttccattaagattatcagaaaccttggaatcaatggtggatgtaatatccaatttgcattgaaccctgaaaccaacgaatacaagattattgaagttaacccacgtgtaagccgaagtagtgcgctagcatccaaggctaccggttatcctattgcaaagatctcctccaaggttgcacttggacttacattggatgagattcaaaacgacattacaaaagagactcctgcttcctttgagccatccattgattatatcgttgtaaaaatcccaagatggccgtttgacaagttcaaaggaatcgacagaaagattggagttcagatgaaggcaacaggagaggtaatggctataggaagaacctatgaagaggccattcaaaaggctatccgttcattggatatcggccttcatggattcgagtatcttgaatacactgaagacaaccttgcaaaccctaccgatgaaaggctcttccatatgtactctgcaatcaaggacggaagaagcgtagaggagcttgcagagctctctaagatggatgcattcttcctatacaagattgaaaacatagttgagtttgaaaatcaggttacaaaagaggctcttgaagatgaagaattcttgcttaaggctaaaaaattaggattctccaatttcacacttgcaaagcttgcaggaattgaagaagaggatgttaaagcacttcttgataaatttgatattaagccatcctataagatggtagatacctgtgctgctgagtttgaagctaaaaccccttattattacagcagctatgacaaaggaaatgagcttgtaaagtctgacaatagaaagattttgattatcggcgcaggtccaatcagaatcggtcagggaattgagttcgattactgttgtgtacattcttcccttgccttaaaggaccaaggaatagaaacaattcttgtaaacaacaaccctgaaactgtaagtactgactatgacgtttcagatgacttgttcttcgaacctttaacctatgaggatattatgggaatcattgaacaggtagagccagagggtgtcatcgttcagttcggaggtcaaacatcaatcaatctctctgttcctcttgcaaaggctggagtcaagatattaggtactccatatgaaagcattgatagggttgaagacagggaaagattcactgaagtattgaatgacttgcatattcatcaggccccttatggattggccaattcatttgatgaggcaaaagaggcagcagaaagaataggcttcccagttcttgttcgtccgtcctatgttatcggcggaagggcgatggaaatcgtctatggtgtagatgagcttgaggaatatatgaaagaggctgtaaaggtctctccagagcatcctattcttgtggacaagttccttgaagatgctgtagagcttgatgtagaccttttatgcgacggggaagacgtattcattgcaggtattatggagcacattgaagaggctggtgtccactcaggagactctgcttgtgtaatacctcctcaaaccattccagagcatttgcttgaagtaatcagagaaaatacaagaaaattggctttggaattagatgtcattgggctcatgaacattcaatatgctgttaaattggatgaggaaagagtttacatcattgaagctaacccaagggcgagcagaaccgttccatttgtaagtaaggcaattggtgttcctcttgcaaaggttgcaacctccttgatgatgggcaagacccttaaggactttaatttaaccaaggaaatcaagatcaatcacgtagctgttaaggaatctgttttcccattcttaaagcttacagaatctgacagtgtcttaggtcctgaaatgaaatccacaggagaaagtattggtattgatgaaaacttcggccttgctttctataagtcacagctttcagcgggaatggacttgcctaaggaaggaaacctcttcatcagtgtaagggaacaggatcagcctaagattcagccgattgcagagaaggctcatgctttaggatttaatataatggctaccaagggtacagccaattcaatatttgatgttcctattacaagggtcaagaaggtttcccaaggacagcctaacattaaggaagcaattttagatggaaaggttgatatgattattaacactcctcatggtgaacaggcttctaaggacggctatacaatcagacgtttagctgtagagcttggaattccttatgtgactaccttagcaggagcaagagctgctttaaatgcaattgcagctgttaaggaaaatgatttaaaagttaagtcattaaatgagcacattgctaatatttaa

SEQ ID NO: 1790 - DNA, 1080 bp, Methanobrevibacter ruminantium
  source 1..1080: mol_type = genomic DNA
atgggaaatgaagcaaaattagctttggaagatggaactgtcctaaaaggtaaagcctttggttatgaaactacgactgtaggtgagcttgctttttcaactggcatgtccggttatacagaaagcctaacagacccttcctttaagggacaaatattaatgagcacatatcctttggaaggaaattatggtgtaagcgaagattggtatcaatctgacagtgttcatgtagaaggatttgtagtaagggaagcatgtaagaaattatccaatttcggaactaaaaagaccttggatgactttttaaaggaattcaaagtatctggaatcgaagatattgatacaagggacttgactttaaaaatccgtgagaaaggttcattaaaggcagcccttgccactgaagagattgatgatgatgaacttgttgcaaaggcacgtgaacatacaagcatcactgaattggatttggttccattggtttcaactccagagattaaggcttttggagactttgacaagactgtagctattattgactgtggagttaaaaggaatatcattaaatgtttccttgaaaacaatattggcgttgcccttttcccatatgatacagattatcaaacaattcttgattatggagttgatgggcttatggtctcttcaggccctggaaaccctgagagattaaccagcacaattgaaaatgtggaaaaattgcttaacagattccctgtattcggaatttgcatgggtcagcaagtaatcgctaaggcatttggcgcaacaacatataaaatgaaatttggtcacagaggagcaaatcagccagttaaggacttaaacactggaaaagtgtttatcacttcacaaaaccatggattctgtattgatcctgaatctttagctggaagtgacttggaactcaatcaaataaacttaaatgacggcactcctgaaggatttttgcataaggaattgcctttaaggaccattcagtatcacccggaatccggtcctggacctaatgatactaaggtcttgtttgaagagtttggccaaatgattagggagtactag

SEQ ID NO: 1791 - DNA, 750 bp, Methanobrevibacter ruminantium
  source 1..750: mol_type = genomic DNA
atgtctcattttgataactctgattttaataaggatttagatgtgaataatcaatatgatccagtaaaaggcaatgataaagcattcaatggcaaatattcacttaatttttcaatctctcataatgatcctaatttctctaatcttgcaatgtcttctagtataatctctgaaaccactcttgaagaagattgcattcttttaaaaaagaaatccttgcttaagcgaaagtctttaggctctcaaaagatttattatagggaaattcttgaattggacttgattaagtccactctatcatctttatatagttccataaggatagtttattctaaaaacggatattctaagagggtcttgtctttaagcagttctgatggatttgctgtaaggtggttttatgatgccttggttgtgaagtattcctatgtcaagtctggtttggataaaaagtatgattttaattcaaatgagtctgattggatagaagcgaatgaatctaataaaaatactagtttatctggtgatttaactaattctaatgatttaaatgattcttctattaaagaagatgatttgaataattctaatggctccaattctggcgatgaatctcataattctctttcttctaaacagtctaaattgtctgattttgtctctcaaatgaataaggagctttcagaggaagaaactagaagcttaaaaaagaaaatgaaatttgagagatgttctagcggagaatactaa

SEQ ID NO: 1792 - DNA, 390 bp, Methanobrevibacter ruminantium
  source 1..390: mol_type = genomic DNA
atgttcttagataggttttcattagaaagaaatgatttgaactttagaaaatataatttagcaatcctaattgcttctttgcttttgtatttattgaatatttattttttaagttcctttggagatttctttaaattttattttgacgatttatttgcaattatggtattgttcagctttttaaatcttgtttttccatataagatagacaatttctggataattgtaatcataacaatatttgcagcattcttttgggaatatgttgctttattcattaagccaggctctgtatttgattatttggatattttggcttattttctatctatggtgatttatttaattttgatttatgcttttgaaggtgaattgaatgtctcattttga

SEQ ID NO: 1793 - DNA, 228 bp, Methanobrevibacter ruminantium
  source 1..228: mol_type = genomic DNA
atggaagatgaagtaatagatgttgaagattatgaagttaaggaaacagcaatagtagttagcgatgatgaagaggataatgattactctaaaagttcaaatgataataattacacatccaacactacatttagaactgcaaccattagcttatccaatgaaaagttaattatacttgctttagtggcaattgttctcattgcaatattcttattgacattttgttaa

SEQ ID NO: 1794 - DNA, 231 bp, Methanobrevibacter ruminantium
  source 1..231: mol_type = genomic DNA
atgaatcaattttgtccaaaatgtggtgcaaagcttttagacccttatgcaaagttttgtagtcaatgcggcactaatcttactgaaaagaaagaaataaacattgatgaattgcctgaagaaagaattgacttaagagaagggatgacaaacaccaataaaggaatgtacagatacacaaaatggggaagacgaaagaaaaaacctgtaaattgggatatggaaaagtaa

SEQ ID NO: 1795 - DNA, 351 bp, Methanobrevibacter ruminantium
  source 1..351: mol_type = genomic DNA
atgagatcattagaggaaattggagctaaaatagaagaattaaatgataaaattgcaggaatcagagcagaagatgaggaaaatctaacaaatgaacttaaagtcattcttgcaggttccgaattgcagtcaatcatattaacaagcacattaacaagcaaagaacagcaagttcgagacttgcttgataaatttgtacaaagaggggatgagcttaacgaaagatacgaagaggcatctatagaagatgatgcagctgcaaaaaatcaattgcatgctatgatttggaccaatgacataagaattgacaccctcaaatgggttcttgaagaagaagatgttggaatttaa

SEQ ID NO: 1796 - DNA, 1419 bp, Methanobrevibacter ruminantium
  source 1..1419: mol_type = genomic DNA
ttggttcttatttgccctatccttgctgaagaggcacatgcaacaactgtctttctaacatcagacaacgttttaggccacgatgaggacatgcaaatgctaaatgatatcaaacagcagattgagaccaaatcaaatgggcaaattacagtcatagttgatgagaatgcctcaaaccctggagaagggactcgggcaatgaatgctgattgcgacatagctgtaacaattgcctatgcctgtgccggaaacctggtggaccttggaagctattcagtacaatccaccaaaaagataatctatgtgaatgcaggctcacttgaccttacaagcataaacttcttaagaaggtcttatgacgacaattggtcttcatccagctttgcatcccttcaaaaccctggacaatatctatatgattctggaataaccttattgcagcctggacaaaagttctatggggaaacagacaatggaaacctggaccattgcagctctgaaatagacggatacattgcagatgaagtgatgaagcaagtctattcaaatggagtaatcagaaaactggactcagattatataaacagacacaagctggatccaaaatacttagcagaagattccaaaaagattgttgacggatttggaactccaatggcagattcctatggctcatacaccacacagcaattattgtatatgagcgcatcctatttggtaggatatagtctagatgttccacaacaatttgcccctccagagaatcctgcagaatactctgcatttacaaagggaacatattcattcaatgaatactgtgaaatggcagatattgtagtggattatatgaatgagcatggaaaggctccagattcaataagctataagggagctacaatcagttattatgacttggtctataactttgcgctccttactcaagatgatttcgatgcagctcatatgaacttccctcaaaatgccgacttccaaaaatacaattcaaatatcctattggacattcttccaatagcaattattatagttgtcattattgcagtggcaattataataagaaaattaattaaaaaaggaagaagaggaattaagagaatcaaaaacagaggcaaggacaataattattatagaaatcaggcaagtggaaacagatctagaaaatcaagaggaggttctagagacaattattctagaaacagtgccagatataataattcaagaggaaatcaatcctctagaaaatctagaaatagcggaagacctagaaactctagaaacagcagagactctagaaacagcaaaaataaaaggtcaactaaacttttccacaaaaatgtagaccttgaccaatatgataattctagatcaaaagagccaaaaagattgaataagaaaagataa

SEQ ID NO: 1797 - DNA, 930 bp, Methanobrevibacter ruminantium
  source 1..930: mol_type = genomic DNA
atgacttctcaaactagcgaaaaagaaaatcaagagttaatagatagtttaaacaatgaaatagactatctgaaagagattctaactagcaagatctttgaagaagagcatcttttaaacttcacctgccgtgacattgaaacagattatgccttgaaatttggagtttataaatacaaaataaaaggatataaacttaaaattaaaaaaacaaaaagaacaattgaattaatcaaaaaaatggtcaatagacaagagataaatctattcaataaaaaactagaggaaatgcagccaaatcaagcaaaaatcaatgaaaccaagataaataaacctcgattgaatatgaaggaaatcgaagaccatattgaaaatgaattcaaagaagaggacattgaactcgaaacagagactgcaagaacaaacatccttatcgaagagcatagaaataatctggatagaagagtgcctgttagagaaatagatgctctttataaggaatgcattagaaaaatgcatcctgatttattattcaatccaacagaatatgaggaaagcctatttttcaatgcaaaggaagcttatgaggatagagatttcgaggaattggaagcaacatacaaccttatacacacccataagattgaagagactcctcaaacagttgaagagatggaaagattcatagaacatttggaaatccatataaaactagaagaaagagagatttccaatataatcaactccaaaccatatactcaacagaaattccttctaaaccaaaaaaaggtaaatgattatagagaaggattagtcaaatcccttttagaggttgaaaaagagtatattaaatgtaaaagagagttaactgatttgaaatcaaaaaataacttaagctacaaattagatttaactaaaaaggacaattaa

SEQ ID NO: 1798 - DNA, 447 bp, Methanobrevibacter ruminantium
  source 1..447: mol_type = genomic DNA
atgcttattcgcgaatttcttccatctgatctggctagagtttatcaaattgaggtagaatccttttcaacaccttatgatattcctattcttaagcaattatatgatattggtgcaggatttcttgtagcaactgaaaatggtcaggttgttgcttatattattttctggcttaaagaggaaaacttaggtcatattatcgctttagctgtagatagaaagtttaggggtcaacatatagcaactaggttgcttatgatggctgttactgttcttagaaattgtagcgttcctaaaattaccttggaggttaaggctcaaaatactcctgcaattagcttctatgaaaaattcggctttaaaatagagaggaaagttccaaattactatgaagatggatctgatgcctatgtgatgtacttttatacagattccattaaaaattag

SEQ ID NO: 1799 - DNA, 414 bp, Methanobrevibacter ruminantium
  source 1..414: mol_type = genomic DNA
atgtgggatgacttagaagaatacattgagaatctatctaatgattatagctcaaagaacaatagaaaaacaaagattgtagagattggagttggaaaattccaaacaatatctgaccatttaagggaaaatgaaaacatagagcttataatgaccgacatagaccctgcaaatgagaatgtcgttaaagatgatgtgtttaatccaaatatggacatctacaaaggtgcagacataatattttcaatcagacctccaggcgaaatacaagaagccattatgaaaatcagagatgaaatagattgcactttaataattaaacctttatttaatgaagatttaaatataaaagccaaaggaatgaaattgaaaaattataatagggcttcattttacatttatcaaaaggaataa

SEQ ID NO: 1800 - DNA, 2721 bp, Methanobrevibacter ruminantium
  source 1..2721: mol_type = genomic DNA
ttgatagaggaaatcttaaaaacctacaataccacaattgaaggtttaaccaatcatgaggctaaagaaagattagaaaaatacggccctaataagattcaagagcaggaaagcgacgggctgttaaaactttttttatcacaatttgccgatgcattaatctttcttcttataattgcagcgataatcagctatctaattggtaaccatttagatgctgttgtaatagttattgttgtaataattaactcaataattggatttattcaagagtatcgtgcagaaaatgccatgcaggaactaaaaagcctagtgagcaaggaagcccatgtaagaagggagggcaagacaaaaatcatccctgctgaaaagcttacaattggagatatagtcctgattgaagagggaaacaaagtccctgcagatctgcttctcgttgaaagctatgaccttacaatagatgaatctctgctaactggagagtctgaagaggttagaaaaaatgctgattattccaatatgggcaatcttgaggaaaagataagaaatatttcaagccattaccaagaggaggaattaagagaaaagattgtctcaatgaattccaatgtattatccggtagaggcactggtgttgtgattgcagttggaatggacactacaatcggaaagattgccactatgattcaagaagaagatgaggagactcctttggctaaaaaagtggacaagcttggaaaaagaattggagctttatccattgcagtctgtattggagtattctttatagatttcttccaggattataatatcatagaaggatttatgactgcagtttccttggctgtagctgcaattcctgaaggattacctgccgttttaacattgactttggctttaggaatgcaaaagatggctaaatcaaatgcaatagttaaaaaactttcttcagtcgaaaccttaggttcatgtacattcatctgtacagataagactggaacattaacagaaaatagaatgactgttagggaagacttcttattggataatgacaaatcagtattaatttcaggcctttgtaataatgcaaaatatgaaactgtagacgaaggagagtatgaatctctagaaaaagataataatagggctagaaatagtagtgaagaagacagcaaaaagactgaaaacagcaaagaagaaagccaattaatcggaaaccctacagatatagcagcatataactttgcaaaaggccatggatttgacaaattagaccctgaacactcctacacacgtcttgatgagattccttttgacagcaacagaaagagaatgagcgttatctataaaaaggaaactcagaatgaaacagaatattacatatttactaaaggagctcctgaattgattttaaacctatccgataggatagaaaaagatggaaatatcaaagaaatcgattctgaaaccatatccaaaataaaccgcaagattgatgagatgaccaataaaacattaagggtcattgggctttcctataagcaaatagatgaggaagactacaataagataaaaaatagccataatgataataaaatacatgatatccaagaggaattggaaagaaacctaatcttcacaggacttcttggaataatggatcctccaagagccgaagcgatagatgcagtggcaagctgtcaaaaagcaggaattgaagtcgtaatgataactggagaccataaggacactgctacagccattgcccgagaaatcggaatattatcaaaagaggattgtgagagccttagcaagcatgtgctgaccggtgaggaactggacagattgaatgatgatgaatatagaaatatcgtagaggaaatcaaggtttatgccagagtatatccagagcaaaaaagaagaatcattgatatcctgcaaagcaaagaccatatcgtttcaatgacaggtgacggagtcaacgacgctccggcccttaaaaaagcagccataggagttgcaatgggaagcggaacagaggtcaccaaagagtctgctgatatgattattcaagacgacaactttgcaacaatagtctcatcaatcaaagagggaaggacaatatatgacaatcttaagagattccttaaattccagctctcaacaaatataggagctatattaacaatcactataggctcattgcttcctataccaactccatttactccaatccagcttctttggattaatattataatggatggccctccagcacagtcattaggattggaggcctctgaagacaatattatggaaaggccacctgaaagaggagagcttttagataagaagacattgattaagattacaatttcaggaattgtaatgacaattggaaccttatccttattcatttatgaattgggactaaattcaccatatggtaaaacaaaggcaattaccatggcatttacagtattcgtgttataccaattgttcaatgcattaaattacaggtcaaaatcaaatgtgaaaaataagatgcttatattttcacttattggaacattcatactccaagtgctggttatctatgtgccatacttgcaaataatattcaaaacatgcccaatagagccattcgattggatcttggtaattatattatctgcaatcattttagtcactgataaaatagctaataggctaatcaactaa

SEQ ID NO: 1801 - DNA, 123 bp, Methanobrevibacter ruminantium
  source 1..123: mol_type = genomic DNA
atgaatttaatagcagatattgcaagtggtctcttttggatgagtttagttatgattggaggatttattgttgttattgcattaatgactttaattggaaaaggctcttctgcagatttctaa

SEQ ID NO: 1802 - DNA, 309 bp, Methanobrevibacter ruminantium
  source 1..309: mol_type = genomic DNA
atgaatcaagcaagaattaagcttactggaactgatcctgaaaaacttaactatgtttgtgaccaattaaagaaaatctctgaaagaactggtgtagatatttccggtcctattccattacctaccaaaaaattagttgttcctactagaaaatctccagatggagaaggaaaagctacttgggaaaaatgggagctccgtattcacaaacgtttagtcggtattggtgctgacgaaagagctatgagacaagttatgaaagttaacgttccagataacgtaagtattgaaattgaacttaaaaactaa

SEQ ID NO: 1803 - DNA, 1242 bp, Methanobrevibacter ruminantium
  source 1..1242: mol_type = genomic DNA
atggcaaaagaaaaagaacatttaaatttagcatttattggacacgttgaccacggtaaatccactttagtaggacacttattattaaaagctggtgctatcgctgaacaacaattagatgaaggtgaagacaaattcagatttgttatggacaaattaggagaagaaagagaaagaggagtaaccattgacttagctcaccaaaaattctccaccaacaaatacgactacactgtagtagactgtcctggacacagagacttcgttaaaaacatgattactggtgcttcccaagctgacgcagctgtattagtagtagctgctaacgacggtgtaatgccacaaaccaaagaacacatgttcttatccatgactttaggtattaaacaattaatcatcgcaatcaacaaaatggacatggttgactacagcgaagacagatacaacgaagtaaaagacgaagtatccgacttactcagatccatcggtagagaccctgcttccactcctttcatccctatgtctgcatttgaaggagacaacatcaaagaactctctggcaacatgtcatggtacaaaggtgacgctttaatgactgctttagacaaattagtaccacctgaaaaacctgtagacttaccattaagaattcctattcaagacgtatactccatcactggtgtaggtaccgtacctgtaggaagagtagaaactggtatcatgaaacaaggagacaacgttatcttcgaacctgctggagtttccggagaagtaaaatctatcgaaatgcaccacgaaactttccctgaagctgaacctggtgacaacatcggattcaacgtaagaggtgtaggtaaaaacgatatcagaagaggagacgtagctggacacactgctgacgctccaactgtagctaaagaatttactgcacaagttgttgtattacaacaccctggcgtaatcaccgttggatacacccctgtattccactgtcacacctcacaaactgcatgtactttcttagacttaacttccaaacttgaccctgctaccggtcaacctgaagcaaccaaaccagacttcattaagactggtgacgcagctatcgtacaaatcaaaccaaccaaacctatggttatggaagaagctgctaacatcccacctatgggaagattcgctatcagagatatgggtcaaaccgtagctgctggtttatgtcttaaagttactgacaaaaaataa

SEQ ID NO: 1804 - DNA, 2208 bp, Methanobrevibacter ruminantium
  source 1..2208: mol_type = genomic DNA
atggtgatgattttgagtagacgagacaaaatgattgcaaaaatcaaagaattgatgtaccaacctaaaaatatcagaaacataggtatctgtgcacacattgaccacggtaagaccacattatccgacaacctcttggcaggtgctggaatgatttccgaagagcttgcaggagatcaaagattcttggatttcgacgaacaagaacaagctcgtggtattaccattgacgctgcaaacgtatccatggtacacgaataccatggcgatgaatatcttattaacttaatcgacactccaggtcacgttgacttcggtggagacgtaactcgtgcaatgagagctgtagacggtgcagtagtagttgtatgtgcggttgaaggtatcatgcctcaaactgaaaccgtactcagacaagctttaagagaaaaggttaaaccagtattattcattaacaaagttgacagattaatcaacgaagtaaaattaggacctgaagagttagcaaacaagttcattggaattatcaatgaagctaacaagttaatcactaaaatggctcctaaagataagaaagacgaatggcttgtaaaagtggatgacggtagtgtagcattcggttcagcataccacaactgggctatcaacattcctatgatgcaagaaaccggaatcaacttcaaagacattatcgattactgtaatgatgaaaatcaaaaagaattagctaagaaagtacctttagctgatgtattattaggtatggtagtagaacacttgccatcccctgaagtttcccaacaatacagatgtcctaacatttgggatggagacattgaaagcgaagctggtcaaactatgattaataccagccctgacggacctttagctgtaatggtaaccaacgtatctgtagataagcacgctggtgaagttgctaccggtagagtatacggaggtactgtagaacaaggtagtgaagtctacttagtaggaggtcaagcaagatccagagtacagcaagtaggtgttttcttcggtcctgaaagagttcctactgaaaaggttccagctggtaacattgtttacattaccggtgcaaaaggagctaccgctggggaaaccatctgttctcctgaaaacaagattgtagagtttgaaggaatcgaacacatctccgaacctgtagttaccgttgctgtagaagctaaaaacactaaggacttacctaagcttattgaagtgttaagacaaactgcaaaagaagacccaaccattcacgttaacattaacgaagaaaccggtgaacacttagtttcaggtatgggagagcttcacttggaagttattggtgtaagaatcaacaataagggtgtagacatcctcacttccgaacctattgttgtatacagagaaactgttgcaggaaaaactccaaaccctgtagaaggtaaatctccaaacaagcataacagattataccttgaagtttcacctttagacgattcaatatttgaagcattgcaaaacggtgacatcaaggaaggtaaaatcaaagctaaagaagaagctcaacaattcattgaccacggccttgacaaggaagaagctagaagagtatgggatgtttacaacaagtccttattcatcaacatgacccgtggtatccaatacttagatgagatcaaggagcttgtcattgaaggtttcgaatctgcacttgaagaaggtccagttgcaaacgagattgcaatgggaatgaaattcactcttgtagatgcaaagcttcacgaagacgcagttcacagaggacctgctcaaatcttgcctgctatccgtaacgctattaagggtggtatgatgatggctgacccaacattacttgaacctgttcaaaaggtattcattaacaccccaactgactatatgggatctgttactaaggaaatcctaaacagaagaggtcaaatcatcgacatgccaactgaaggtgatatggtaaatgttgaagctaaagtacctgtagctgaaatgtttggttttgctggtgagatcagatctgcaactcaaggcagatgtttatggtctactgaaaactctggattcgaaagattaccaagagaattgcaaggtcaaattgtaagagaaattagacaaagaaaaggattggctcctgaaccattcggtccggaccactacttaggataa

SEQ ID NO: 1805 - DNA, 561 bp, Methanobrevibacter ruminantium
  source 1..561: mol_type = genomic DNA
atggctaaattatttaacaaatgggaccttgatgaagtggaagtggaagacttaggtttaaagagatacatttgccttgatgaaaccattgttcctcataccttaggaagacacgtaaaaagacaatttgcaaaatccaatgtttctatcgtagaaagattaatgaacaaaatcatgagaaccgaaagaaactccggtaaaaagaacaaagcttacaatatcgtaaaggaagctttagaaattatcaatagaagaactaaacaaaaccctgttcaagttttagtaaaggctattgaaaacacctctccacgtgaagaaactacccgtatcaaatacggtggtatcggataccaagttgctgtagacatttctccacaaagaagagtggacctttctttaggattcttaacaagaggaactttacaatccgcattcaaaaacaaaagatctgttgctgaatgtttagcaagtgaaatcatctttgcttctgaagaagatactagaagtttcgctttacagaaaaaagaagaaaaagaaagagttgcaaaagcagcacactaa

SEQ ID NO: 1806 - DNA, 426 bp, Methanobrevibacter ruminantium
  source 1..426: mol_type = genomic DNA
atgccaggactttttgctgcaaaaaagcttaaaaagaatagacaaaattttaaatggaaagacgtagattataaaagaagagcattacgtttagatgtaaaagcagaccctctcgaaggggctcctcaagcaagaggaatcgttattgaaaaagtgggagtagaagctaagcaacctaactccgctatccgtaaatgtattcgtgtacaattaatcaaaaacggtaagcaaattactgcattcgcaccaggtgacggtgcaatcggttttatcgatgagcacgatgaagtaatgattgaaggtatcggcggaccatccggaagatccatgggagacattcctggagttcgttggaaagtaagtaaagtcaacaacgttgccttatctgaaatggtaagtggaaagattgataaacctgtaagataa

SEQ ID NO: 1807 - DNA, 405 bp, Methanobrevibacter ruminantium
  source 1..405: mol_type = genomic DNA
atgagattcattgctctttttgagagtatgactggtgcaatggttaaggattgcattattgacgatgaaaattccaaggttacctttgttgttaaaaacggagatatgggtttagctattgctaaaggcggaactaccgtaactaaagttaaaaaggcagttggaagaggtgtggaaatcattgagtataatgaggacccagaacagttcattaagaacatcttatctccagctgaattgaagtctattaagattgttactaaaaacaatgatgaaaagatagcttttgttaataccgattcttcaaacaaaagaatagcaattggtaaaggcggaatcaacattgaaagagcaaaattattagctaaaagacaacacaacattagcaatattgttttaaaataa

SEQ ID NO: 1808 - DNA, 300 bp, Methanobrevibacter ruminantium
  source 1..300: mol_type = genomic DNA
atgatggacgtagaaagaggaataagagtcgctgtagacacaggagatgtgaccctcggctctgaaaaatctattcaatctttaaaattaggtaaaggtaaacttgcagttgttgcagctaacagtcctaaagaaattttagaagacgttgaatattatgcaaatctctctgaaattcctttcattgtatatgaaggtactagtgtagacttaggttctgtttgtggtaaacctttcactgtagctactttaatcataaacgatccaggagattctactatcttagaagcaatggggtag

SEQ ID NO: 1809 - DNA, 1245 bp, Methanobrevibacter ruminantium
  source 1..1245: mol_type = genomic DNA
atggcaaaatatgacatttcaatgattaaagataataactattataaagaacaatgtgaacatgctgaagaatctctaaacaaaaaatggtattctgaatcaattttaacaatggcaataactcttgaagaattaactgaagaattaatcaaatataccaaaaatatttccgatggaaaattaagtcaaagagataagatatggatattaaaagataatggaatcaccaattacaatatatataactatttacgtgaagcaaacatctcaagaaacaaattagtacatggagaaatacctagaaattatagcaatactttttcaatgtataaaaactttttaaaaattgtattttggtatgatgaaaattatgtaattggaaaacttaatactaaaagtaaactaaaacaatatttaaataaagtttgtgatgattcacatatcctcaatatcatagaacaagaaattaatgatggagcaataactgaaaatcatcaaataattaaaagacataacaaagagttaattgattatgttgaatctttaaatatagaattagaaattaaagaaaaattaataaaagacatatattctggagttacaaaaaataggtcccaaatagaagaaaaaattaagagagaaaagaaagatcctataataggtgttgtaaacatagtaaatacagaaaacatgatgaaatacacaatccaatcaacagatattgacaaagaagtaaaagaaaacatggaaaaactagaaaacaacacacacgaaaacaaacaactacaagaagactacaacaaatacgggccggaatcattcactacagaaacagtaaacatatgcaaaaacgaagaacttagcaaaataacaaaagaagacgaaataatattcaatgcaaacaaatcatataataatcgaaaaaaagatattaatcctaaaataggcattgcaaacataattaatacagaaaccctaatgaaatacacaatccaatcaacagaccttgacaaagaaatcgaagaaaatataggaaaactagaaaacaacacccacgaaaataaacaactacaagaggattacaacaaatacgggccggaatcattcactatagaaacagtaaacatatgcaaaaacgaagaacttagcaaaatattaaaagaagacgaaataatattcaatgcaaacaaatcctataataacaataaaaaagaagaaaccggagaaaaaaatcataccctgtaa

SEQ ID NO: 1810 - DNA, 1755 bp, Methanobrevibacter ruminantium
  source 1..1755: mol_type = genomic DNA
ttgttagggggtattaatttgaataatgaagatattataattggtattgattttggaactacaaattctgcagcttgtatttataaagatgaaaaatttcaaataattcctagtgctatgggttatgattatttccctagtgttgttgcagtaaatgaaaatggtgaattgctagtgggacatcatgcaaaaaagcaaatggcaagtaatgctagtaattctgttgcagaatttaaattaaaaatgggtgaaaatgaaactattaaatttaatggtgaagataaacttcctcaagagattacttcttatgttttaggtcgtataaaaagagatgctgaagcttatttaggtaaacctattaataaagcagttattagcgtacctgctagttttgataatgatgctagaaatgcaactatggaagctggggaaattgctggttttgaagtcgaagctcttgttgatgaacctacagccgcatgtttgacttatagtctcacaaaaaattttttaggcaatattttagtattcgatatgggagggggcactttagacattatcattggagcctttgatggttctgaacttgttccaaaagtcactactggagctagatttggtggtcggaatattactatggctttgcgggattatcttcaaagagactttgaagaacaaaatggattaaagctagaagattatataactcctgaatatgatcctcttattgatttgtataatgctactgaaatcgctaagatagaattatccagcaccaaaactactaatgttcatatagattctattgtaatgactgataaagggcaacgtattaatttggataaaaatgtaaaccggtctgatttaaataagttatctgatgaagttgtaaaaggaagtaaagaaaaagttcttgaggcacttaaggatgctaaattaacaaaagacgatattgactttttggtttttgttggaggccctactaaaatgcctcttattagggaaagcattgaaaaacttttaggcaaatctgctgcagaaggtattgatccaatggtatgcgttgctcaaggggcatccatatataaagggggtccaattacagtaggcactattaattctttaacattgagtgttgtaattaatgaaaaagagtctgatccacttattccaaaaaacactcctcttccagcagaagttactaaagaatatcatactatgcgtgataatcaaacaagtgcaaatattcaaatcgttgagggagaatctattcttgcaaaagaaaatcatacacttcactcttttactttaaggggacttcctccaaggcctaagggcgaagtcgcaatccaagttaaattaaaagttgataaaaatggaataatgggattgtctgcaaaagaactaagcactaataaaaaattatccgcgacattcgattcaagtaaccgtatgtctagtgaagaaattaagaaggcaggtttagataatgagaatcttttaagtgattatgaagaaaagattaaacaaagaaatattattaacgatgctgaggaagttattttcgaaggaaaaaaactaatcgagaactatagtggccatatgttaatatctgataaaaatagagttaacgagaatattgaaaaacttgaaggtttgttagttattccaaaaaattttgaattaattaaattaattactaaagatcttcgaaatttaattgaaaaaattgaatctgaagatttttattattaa

SEQ ID NO: 1811 - DNA, 2052 bp, Methanobrevibacter ruminantium
  source 1..2052: mol_type = genomic DNA
gtggtaaataaaggttctaatgatgattttaattgtaataattgggagcttggccgtatttttgcccgtaagggtaattttactgaagcagatatacgttttgaggctgagttaaatcattctctttctcctaattctcttgttcttgatgaccatggccatcttttgaataggatgggtaaatatcaagatgctattgataaatttagaaatcttttaaatagtgatgaaaattatgttagcagtttatttggtattggtatttcttacattggcttaaataagttgggtgatgctttaaagtattttgaaaaagttaatgaacttgatgaagaacatgcagatgcttggtactactctgctataatttatggtaatccattttatcctaagtatgatcttaacgttgcaaaaattagatataaaaattatcaaaaatcaaaagaatcatatattaatgatcccaagtattttagtaaaccctttgataatttatcttgggaagaattgcatgattactataaatgcaatagcctatttcgtataattgaacaatctctggataaagggattcttgatgaatttttaaacttttctaatgactataaaagattgtattgttttgatgaagagggtttggacaagcaatttgatatttttagattatttgaaaatgatactcctttagcagataaaattgataaattccatgaagataaaaatattgaagacaaatttgaatctgcaggttttgaagaggatttaattgagggtttatcctttaaacttggaatgatgtctattgatgataaaaaaatgttgaatgaacttatggattattctaaaagttcacaattaagtttcaatgatattaatgatttaattcgtgaaaatgttttagacgaggatatgtctctcgatgacttttatgaaaatagggaatatatagttaaaaatcgtattaaaaaaaataattctgaatatgaaaggaatgttgaaaaaagagtaaatactgagttaaaaaaccaaattgcaattaataaaaggttaaatgataatttaattgaaaaggatgaagtgattgaaaagttaaatgataatttaattgaaaaggatgaagtgattgaaaagttaaatgaaaatttaaatgataaagaggaagtgaatcaaaaaatagaagataagttgagaaataattatgaattattatctgatgaaaatataaatcaaccagaacatcgttttgataattatgatttttcaactaaggagattaaatcttctttttctggtttaaaagaatcaatggattcatatttggaagatatggaatcttatttgaatgagtgtcaagatgtaagttctatgaatattctttcaggtattaataatcagtgttatcaagatgatttggaatatattaaaaatgaatgtggtatttccgatgttgatcttaaaactttaaaatctgcttttaaagacttttataatggtaagtttggatctgcttcttataatttcagtcttgaacgtctaagaaaaacaattggaaaaacatctgaactcaaaaaatataggtattttttaaaattaacttcaaagtctcgtgaaaagatacttgaagaagaagactttaattggcttattattaaaaatttaaagttaaaagattataaaaatgaaaaagaaaagaaaattaataaaggaaaaaaacttaaaaaagaaaaatatcctataggatggtttaatttgggcaatatttgctttgattatgcgaattcacaatctgttaaaactactgtaaaagcaggaaacaatgctatggatgcttatgagttagcatatttttgttataaatgtgccgaggatagtatttctaatcaggaagaaaactcaaagtatgagtttaattttaaggacacaaaaaacgaacaagaatttaaaaacaatgttgtgaggatgatttctaattgtgaaattaagattttgcaacaagaaattaagggcgaattaaaaaaattggataaattacaaggaaaatttaattggtga

SEQ ID NO: 1812 - DNA, 1638 bp, Methanobrevibacter ruminantium
  source 1..1638: mol_type = genomic DNA
atggtagatgctgaagcaaaacttgatgcaattaaaaaggttgaaaaagtacttaaaaagaataaaattgactttcctcaaagttatattgatgaattggcaagtgcttatatcagaagagatttgactgataaggaattgaacactttagttcttaaggtcgaagaagcttatgaacgtgctcatattgaagcaggtgaagctgtaggaactgttgcagctcaatctgtaggtgaacctggtactcagatgaccatgcgtacttttcactacgcaggggtagcggaattaaacgtaacattagggttacctaggcttattgaaattgtagatgcaaggaaaaagatttccactcctacaatggacatttacttcgaagatgagtacaagaacgacgaggaattcgtcagaaagttagcaaaccaaatcggtaaaagcacaatcaatgatattttagctgattatgacattgactacttcaattataagattgtcactgtacttgacaatgagaaaatcgagtctagaagacttgatatagatgatattattagtcgtgttcaaaagacattcaaaaagctcgaaatcattaattatggtgacgatgagcttattgaagaagaggctaaagatattgaagatgtcgattctgatgttgaagaaaccgacattgctaaggtcgataaagtggatgaaactggtatggctaaagcggattctgatgctgaggaaactggtatggctaaagctgattctgaagaagatagtgaaactattcaagtttcagatgaagaagtccaagagccttccaacatcaatcttaaaaaatcagatgaaaacattacattaatctttgaacctagcaaaagaaccatcagagaacttagacttctcggtgataaggtccgtgacttgcagattagtggtaccaaaggtatcggtaaagttattattcgtaaggacgatgctgaatgggttcttcataccgaaggttccaaccttggcgcaatctttaagattgaaggtattgacaaggtaagatccactacaaacgacattcacgagatagaagttgttttaggtattgaagcagctcgtaatgctattgtctatgagcttaaccgtaccctatctgaccaaggtttgactgtagacatcaggcacatcatgttggttgcagacatgatgacttccgaaggaactgtcaagtccattggtagacatggtatcagtggtgagaaatcaagtgttcttgctcgtgctgcattcgaagaaaccggtaagcacttgcttcacgcaagtatcagaggagaagttgatgatctcactggaatcattgaaaacattattataggtcaacctatacctcttggtacaggttctgtaagtgttacaatgaaaccagatgcatatcctattactgcaggtataactaaacgtggtaaaggtaagtctggtggtagtgcttctgaatctaaggaggttaatagtggtattgctaaaggcggtaaaggtaagtctggtggtagtgcttctgaatctaaggaggttaatagtggtattgctaaaggcggtaaaggtaagtctggtggtagtgcttctgaatctaaggaggttaatagtggtattactccctga

SEQ ID NO: 1813 - DNA, 2781 bp, Methanobrevibacter ruminantium
  source 1..2781: mol_type = genomic DNA
atgtcaccagatcaaattagggaaatgtctgttgtaaacatcaccagaccggatacctatgatgaagacggatatccaattgaaaatggtttgatggactctcgcttaggagttattgacccaagtttaaaatgcagaacttgcggtgagaaaggaggagagtgccaaggccactttggtatgattgaccttgcaagacctgtaattcatgtaggtttcggtgatgacattcataagatattacgttctacctgtaatgaatgtggacgtgtcctattggatgaagaagagattgaagagtatactgaaaagttaaatgagcttcaagaagctggagaaagcacagaagatctcataaaagaagtttacaaaatctgtaaggctaaaaaggcaaaggatgtctgccctcattgtggtgctgaacaggaagacattaaaatcgttaagccaatcggcattattgaagtacgtaaggaatacgatgaaaacggagaattgcttacagatgcaaatggaaatcctgtaacaacagattatgatttaacagcatctgaagtaagagaaaagttagagcgcattccagatgaagacgcttatgtattgggagtaaaccctgaagttgcacgtcctgaatggatggttcttactgttcttccagttcctcctgtaactgtaaggcctagtattacccttgatactggagaacgttccgaagacgatttaacccataagcttgtagatattttaagaatcaatcaaaggcttattgaaaacatggacgctggagctccacagcttattgtagaggacctctggcagttattgcaataccatgtaacaacctacttcgacaatgaggcaagcggagtacctcctgcaaggcacagaagcggaaggccacttaagaccttggctcaaaggctcaaaggtaaggaaggaagattcagaagcaacctttccggtaagcgtgtaaacttctcagcacgtactgtaatctcccctgaccctaacatcagtattaacgaagtaggtgttcctgaaatgattgcaaaagaggtaactgtacctacctatgtaaacgaatggaacattgaagatttaagggaagctatcctaaatggtcctgatgctcatcctggtgcaaattatgtaagaaaatacaatgacagaatcaaagattacaataaggtcagagtattggattccaataaggaaaccgtagctgaaatgttaacttgcggtgacattgtaatgagacatcttaaggatggagacattgttttattcaaccgtcagccttcccttcaccgtatgagtatgatggcccacgaagtaagggttcttccatacaagacctttagacttaacctttgtgtatgtcctccatacaatgcagactttgacggagacgaaatgaacatgcacgtattccagactgacgagtcccgtgcagaagctaaatcccttatgagagtacaggaacacattttatctcctcgtttcggaggacctattatcggtgctattcacgaccacattagtggagcatatcttttaacccgtgacggattcaccgtacctgaagatgacgctttccaaatgataagaaaatcccacttattgaaatgcccttatgatgaatatcttaaaagggatcttgatgagaaggaatataaacagcaaatcaaggaatacaatgaaaagctcaaacgtaaacacagagattggactggaaaagaattattcagcttactacttccaagcacccttaacatgaattacagagctgaaatctgtagaaaatgtgaggaatgtatggcagaagcttgtgaatacgattcttatgtggttattaaggacggtcaattgacccacggtgcaatagacgaagctgcatatggttctttctcaggtaaaatcttggataatatcgttaaggaatatggtccggcatacgctaaggaattccttgaccgttccactgaccttgctatctgtggaatcatgaaaacaggtattaccacaagtaccaacgatgaggaaatccctgaagaggctattgaggtaattgacgctcacttggataatgctgaacaaaaggtagataaattgattgaaacctatgagatgggcgagcttcaaccattgcctggacgtagtgcagaggaaaccctggaaatgcgtattgtgcaagttctaggggaagctagggacgcagcaggggacattgctgcaggttacctcactatgggtaagcaatccccagacgattcctatgaccatgtgatggctgtggaaaaccactctgtagttatggcaaagaccggtgcaagggcatccatgttgaaccttgctcagattaccgcttgtgtagggcagcaatctgttcgtggtggacgtattacaagaggatatcttgcaagaccgcttcctcactttagaaagcacgaattaggggctagagctaaaggatttgtacattccagctacaaagaaggtcttgaccctgtagaattcttcttccacgctatgggtggaagggaaggtcttgtagatacagcgattcgtacagcacaatccggttatatgcaaagaagacttgtaaacgcacttgaagacttgaatgtaagatcagacggattggttacagacaataagaatcaggttatccaaaccgtatttggtgaggatggaatagacccagcaaaaagtgactttggtaaagtggctaacttagacaagcttattgacgaaatgagaattaaagatgagggtaaataa

SEQ ID NO: 1814 - DNA, 1812 bp, Methanobrevibacter ruminantium
  source 1..1812: mol_type = genomic DNA
atggttaaggctaaaatttatattaacggtaaacttacaggaacttgtgatgaacctgaagagtttgttaaggaaatgcgcgctagaagaagatctggcgagattcacaatgaaatgaacattacctattatgatgaaaaccatgagatttatattttcactgaccctggaagggcaagaagacctttgattcttgttgaaaaaggtgagccattgcttaaagatgaacacattgaagcaattacaaagggagaattgaaatgggacaatctgtttgaattaggtcttttggaatatttggatgctgaagaggaagagaattcatatattgcaatgaacttaagccaattgaatgaagaccacacccacttggagattgacccatctaccatgctcggtatatgtgctggaattattccattttcagaccacaactcatctcctaggaacacaatggaagcagggatgacaaaacaggcattaggattatacgtatccaactacgcattgcgtaccgatacccgtggtcacttattgcaccaccctcaaactccactggtaaagacaagaatcattgatgcaatcaattatgatgacaggccatccggacagaacctggttgtagctcttatgtcttacgaaggatataacatggaagacgcaatgattctcaacaaatcctctctcgaaaggggaatgggaagatccagcttcttcaggtcctatgaggcatctgaaagaaggtatcctggtggacaagaggacaagtttgaaagacctgaaaaaggagttaaaggttacagatccgaagaagcttataaaaaccttgacgaagacggaatcgtaaaccctgaatcccatgttgaatcaggtgatgtattaatcggtaagacttcacctccaaggttccttggtgaaattgacgagttcggtaccgttgcagagaaaagaagagagacttctgtcactgtaaggcatggtgaaaagggtattgtagatgcagttctccttaccgaaaccgttgaagggagcaaattaactaaaataagagtaagagacacaagacaacctgaattcggtgacaagttcgcatcaagacacggtcagaaaggggttgtaggtctcatattatctcaagatgacattccatttacagaagacggagtcgttccggatatcattgtaaatcctcacgctattccatcaaggatgtctgtaggacaggtattggaaatggttgcaggtaaggccggttgtatggaaggtcaccgtatggacggtactccattcaatgacaatgttgaaggagaaatcaagagagcccttcatgacaacggattcgaatctgcaggctgtgaatcattatacaatggtgtaaccggagaacgtatcgaagctgaaatcttcgtcggcgttgcatattaccaaaaattgcaccacatgacaaccgataaggtttatgcccgttcaaccggacctgttcaagtgcttacacgtcagcctactgaaggtagagctcgtgaaggtggtctcaggtttggtgagatggaaagagactgtcttattgcacacggtgcagctcttgcacttaaggaaaggctcttggatgagtctgacaagtatgaggcagttgtatgtaatgaatgtggaatgttagcagtatatgataagaataagaacaagatgtactgtcctatatgtggagacagtgaaacttatcctgttgagatttcatatgcatttaaattgttgttagatgaacttaaaagtttatgtattttccctaaattaattcttggggacaaagcttaa

SEQ ID NO: 1815 - DNA, 1563 bp, Methanobrevibacter ruminantium
  source 1..1563: mol_type = genomic DNA
atgaataatgagacatggggtttggtagactcattctttgataagtatgatatcgtagatcatcatatcaaatcatataacgattttgtcgaaaatcgtatacagaatattattgacataactgaacctatcactattgaaaacgaaaagggaaactatactcttagaaccggcaagcttaccattgaaaagccattcaccaaggaagcggacggttctaaaagcatgatttaccctactgaagcaagacttagaaacttaaactactctgctcacatgtatttggaaatggcattgcatgacaataacagcgatgaagaggaagagcttgaaaacgtctacattggcgaattgcctctcatgctcaagtccagcatctgccacttgcatggccttagcgatgaggagcttgtaaaaagaggggaagaccctaaggatccaggaggatacttcattgtaaacggttccgaaagggctgtcgtaacaatggaagagattgctccaaacaagatcatccttgagagaatcgatgagattgaagatagacatgcaaaggcaatcgtaacctctatcaaaagcggttttagagcaagaatcactctcgaatacaaaaagccacgtaaaagcggcgtatttttaagaatctcattcccatatgttccaggagaaattccacttgtaatcttgcttagggcattgggattatccacagacggagagattatctctaaaatatccgatgacttcaacttccaaatgtacattgcagacgacttgcaggtttcagagaaggacttgaaattggattcagatttattattaagcttatccaacgaagaaagagacgaatatcttcaaaaggcagctatcaaatacataggtaatagggtagctaaaggaatgactgaagaatacagaataaaacgtgcagaagacgtaattgacagatacttgctcccacatatgggaatcgaatctgacaaacgttatgacaaggctatatacttagctgaaatgactgaaatgttgcttcaagtaattgaaggacaaagagagcctcacgacaaggaccactataccaacaaaaggttaagggtctccggtgacttgacggaagacttgttcagggtagcattctcctcccttacaagagacatgagctatcggcttgaaagaagcctctccagaggaaaagagctttcaatcaaacaggctgttcgttcagacgtattgactgaaaacatcaagcacgcaattgctacaggtaattgggtcggcggaagagcaggtgtaagccagctattggatagggtaagttacatggcaacactttcccaccttagaagggttgtatctcctcttacaagaagccaacctcactttgaagcaagggacttgcacccaacccagttcggtaagatttgccctaacgaaactccagagggacctaactgtggtttggtaaagaacttggcccttatgtgtaagatttcagaaggattcgatccggaagacatagtcaacatcataagcactatggacaatgtggatatgatagattaa

SEQ ID NO: 1816 - DNA, 249 bp, Methanobrevibacter ruminantium
  source 1..249: mol_type = genomic DNA
ttgaaatttgatattttagaacataatgctgttccaaagcatgaaattttaacaaaatctgaaattaaaaagatttttagtaaattagattatgatgttagtcaacttccaaaaattaaaatagatgatcctgtatctaaggccattggagctaaagaaggggacgttttaaaaattactcgtgaaagtcaaaccgcaggtacttttattacctataggttagttgatggctttactgctaataaatag

SEQ ID NO: 1817 - DNA, 915 bp, Methanobrevibacter ruminantium
  source 1..915: mol_type = genomic DNA
atgactaacgaaatcattaaagaaaatacagaaaagattgaagaaatcttaaacggtatcgaagaagcaatggaaaacgttaaggcaaaaagcccacttacccactgtatcacaaattttgtgactataaatgattgtgccaatgcggcattggcaattggcggatcacctatcatgacaaatgacagtcaggaagttgctgaaattggaaatatagcaagcgctattgtaataaacattggacaagtcagccaacttcagatcaattcaatcaaaaaaagctgcgaacatgcaaataaaacaaatacccctattgtctttgaccctgtaggagctggagtaagcaatatcagaaataccatcacaaaggaaatggtagagttctatgaacttacagcaatcagaggaaacatgtctgaaatcaaggcaatagttaatcttattgaccttgaaattaaagacaatgaaaagaaagactctgctggaaaaggtgttgatgtagcagaaagcgatataattacaagagacaacctttacacaaacggactgattgtaagagaacttgcaaaggaactggaaacagttgttatggcaagcggaccaatcgacatcatctcagatggagaatataccttcgcacttgaaaacggagatgcaatgatgcctcttattacaggcagcggatgtatgttaagcacaatcattggaacatatataggtgcaaatgagccattgattggagcaataacagcaagcgctttaatggcaattgcaggagaaaacgccgcagaagcagtcaaaaaagacaatttaggtccaggaagctttagaaatttcttgattgataacttatacaaagtaacagcagatgacatttctaaaagagctaatttgtttgaaatcgatttaaactaa

SEQ ID NO: 1818 - DNA, 660 bp, Methanobrevibacter ruminantium
  source 1..660: mol_type = genomic DNA
atgtttaaagcaatgaaaaaagaggataaaatgaacaaaagcagtattgattattcagtttatttagttacagaccacagaggtaaaaccgatgaggaaatactaaatataattgaacaagcaataaaaggaggaacaagtgttgtccaaattcgtgaaaagactgcctccactaaagatttctacaatctagcactgaaggcaaaggaaataacagaaaaatacaatgttcctttaatagtcaacgacagaatcgacatagcccttgcagttaaaagcgatggcgttcatataggacaagacgacatgcctgcaaaggtagcaagagaaataattggagaagagatgattttaggtgtttcagcttctacagtagaagaagcaatgaaagcagaatctgatggggctgattatattggctctggagcagttttcccaactgcaacaaaagatgatgctgattccgtttcaaaagaagaattaaaagagattgttaattcaaccagcatacctgtagttgcaataggcggaataacaatagaaaatgcagaatcattaaaggacgctgaaatagatggattttctgtagtcagtgcaataatgaatgcagatgaccctaaaaaagcatctgaaatactaaaagagatttataatagataa

SEQ ID NO: 1819 - DNA, 1233 bp, Methanobrevibacter ruminantium
  source 1..1233: mol_type = genomic DNA
atggctaagttcaatactattgatgattttgatgtaaatggaaagactgtcctaatgagaattgacattaattctcctgtagaccctaattctgggattattttagatgacactcgtatgaagatccatgctgagaccattaaggaattatccttgaaaggggctaaaacagttctattggctcatcaaagtcgtccaggtaaaaatgactttactacattcaagcaacatgctgaagttttatccaaagcggtgggaatggatgtaaaatatgtggattctatcttctcatccactgcaaaagaagctatcttggctttggagcctggacagatattgcttttggaaaatgtaagattctattctgaagagcaattgaagcgttctccagaggaggaagccacatctgttcttgtcaagtccttaagtcctttgattgattatttcataaacgatgcatttgcagcggcccataggtctcaaacctctttggttgggtttacaactgtagttccttctgcggcaggcagagtcatggagaaggagctaactgtaattggaaatgctttagagaatgtgcagcacccttgtgtctttgcattggggggaatgaaagctgacgattccattatggttacagagaatgtattggaaaacggcactgcagattatgttcttgtttcagggcttgttgcaaacatatttatttgggcagcaggctatgacatcaaatccactaatgaaaacttcattgaggctagaggatacttggatatggttgataagtgcagggatcttattaaaaggttcccaggcaagatcatttatcctcaagacgttgcagttagcgttttaggagatagggctgatgtaaccattgaaaacattccagacgcttctatttttgatattggcagacaatcattgattgaatattctaagattattagagaagctaaaacaatatttgcaaatggtcctgctggtgtatttgaagatcctaagtttgcaatcggtacagaggatattattaatgcaatagcatcttccgaaggattttcaataattggtggaggacatattgcagcagcttgtgttaatttaggctatggcgataagatggatcatattagtagtggtggaggtgcttctattaatatgttagcaggtaagccgttagctgctgttcaagctttagaagcttctgcagagttatttaataataaagaataa

SEQ ID NO: 1820 - DNA, 675 bp, Methanobrevibacter ruminantium
  source 1..675: mol_type = genomic DNA
ttgagtcttaagacacctgttgttatattaaattttaaaacttatttggaatccagcggtcaaaaggcattggatttggcaaatgctttagaaagcgctggagaagaatctggaattactatggttgctgtaccacaggccattgatatctataggattaaagaggaaacaagcattcctgttttagctcaacatattgatgcagtttcccctggaggccatactggaagcaacttattcgaaagctttgtggcaaatggtgttgacggaaccttattgaatcactctgaatgcagaatgactcttgcagatattgcagaggtcgttcaaaaaacaaagggagctgatttaatctcatgtgtttgcacaaacaatattgaaacaagtatggcagctgcaactcttgctccagattttgttgctgtagagccacctgaacttattggaactggaatacctgtttctaaggcagaccctgaagttgtagaaggaagcgtatctaaagtaaaggctattaataaggatgttcaggtcttatgcggtgctggaatctccactggtgaggatatggctgcagctattgatttaggtgctgaaggtgtgctattggcttctggaattataaaagcggaaaatcctaaagatgccttattggatttggtaagtaagatttag

SEQ ID NO: 1821 - DNA, 915 bp, Methanobrevibacter ruminantium
  source 1..915: mol_type = genomic DNA
atgacatttactaaagaagaacaagcaaaactagaatacagtggatacagattcgtcggtgagcacgggcatgctgcggctaaaacctgtcattggactagaaaaagcataaaaaatgaaggagtgtgctataaggaacaattctatggagtaaaatcacatagatgccttcaaatgtctcctgccgtaccattctgccaccaaaaatgttccttctgttggagagacctatcccaaacccgtacagaatgggaaggagaatatgatgatcctaaaacaatcatagaaggtgcaattaaggcacagaacaatctcttatgtggttttggaggaaacaagaaagcagataggaaaaagcttgaagaaagcaaaaggcctacaaatgcagcaatctcacttgcaggagagcctacgctataccctgaaatagacgaacttataggagagttccacagacaggactttaccactttccttgtaagcaatggaatgtactgggaaaagttgggaagccttgaaaacgaacctacacagctatatgtttcattggacgcacctaatgagaaagtctataatgagctttgcaaccctcaaatagatgatggttggggcaaactaaacaaaacactagaactgatgcctagctttaagaacaatacagcaattagaatcacctcagtcaagggcaaaaacatgttcaataccgatgaatatgccgaactcatcaataaggcagaccctacctatgttgaagtaaaggcttatatgtttgtagggtcttccagaaaacgattaagtatggacaatatgcctagattccatgaggtcaatgattttgctaaagagatagctgataagacaggtagggaattaaccaaatattctgaagccagcagagttgttttattggaataa

SEQ ID NO: 1822 - DNA, 1125 bp, Methanobrevibacter ruminantium
  source 1..1125: mol_type = genomic DNA
atgaagttttttgaacatagcgcaaaaaaagtatttgaaagtgaaggtattaaaattttagaggggcatgtggtatactcccctgaagaggcaatggaagtggctaccgaattcggcaggcctatcgtattgaaatcccaagtcttggtcggtggaagaggcaaggctggaggtattaagtttgctgataaccctggtgaagctcttgaaattgctaatgaattattgaaacttgaaataaaaggggaaaaggttaaacacttgctcattgaagagaaggcaaatatcaaaaaggaattcttcttaagcgtttccaatgacagagccaacagaaggcctatcatcatggcaagtgctgaaggtggagttgaaattgaagaattggcaaagacatcacctgaaaagatcatcagatataatgtaaatcctttaaaggagttcttgccttatgaggcacgtgaaatagcccgaaagatgggtgtaggctctgaattgatttctcctcttggaagcatcatttggaagctttataatgtttatgataaatatgatgcagaagtggctgaaatcaaccctctcattttaactgacgacggcttgattgctgcagatgcaaagcttgaaatagagaatgacgctcttttccgtcatcaggatttagtaaagcaaaacagattcaagcaaaaggactttgcttttgtaaagcttgatggagacattgctgttatcggaaacggtgcagggctcactttaaccggtatggatatggttaccttattcggaggaaagccagcaactttcttggatatcggtggtggagcatctgaagagactatcaataaggctttaagtttggttttaaactatcctcctgtaaaagtagtgttcttaaatgttttaggaggtattactagagcagatgatgttgcaagaggcgtaattgcagcattggaagctaataagtgggatgtaaatattgtaatcagacttactggtactaatgaagaggaaggtcaaagactctttgatgaggcaggcattccttatgagatctcattggaagaagctgctaaaaaggcagttgaaatgtgcaatgagataaaagcaaaagaagctggcaaatag

SEQ ID NO: 1823 - DNA, 582 bp, Methanobrevibacter ruminantium
  source 1..582: mol_type = genomic DNA
atgtttggaaagtttaaagtaaaaaaatatttttctgaattaaataaagcatattattctaatgattttaaaaaagccattaagtatgcagatattattttagaaatggataaaaataatttagaagtattaaaatacaaatacaactctttagctaatatgggagactatgaaaatgctttagtgtgtatagatgaaataattactttggaaaaatcttgtatggctttattaaacaaaggaacaacattatgttatatgaatcgcattgaagaaggttttaagcttcttgattatgttattgataattgtgaagaatatgaggcagcattcataaataaatgcaatttcttttttatgcttgaagaatttgatgaggctctatctttatcagataaaatattaaatatgcatcctgattgttcaaatgcttatgacactaaatcatttatttattataaaagagaagaatatgattcatctttaatttacgcaaataaagcattagaaaaaaatccaaataataatattgcattagagaggaaggaaagacttttatctatattaaattcaaaggattaa

SEQ ID NO: 1824 - DNA, 546 bp, Methanobrevibacter ruminantium
  source 1..546: mol_type = genomic DNA
atgagaactgaagttcgtatagctggttttggaggtcaaggagttatcatggcaggaatcattatcggaaaggcggcatccctttatgataatattaatgctgtacagacccagtcctatggtcctgaagctcgtggaggcgcttcaagaactgaaatcgttgtaagcgatgaagagattgactatcctaaagtgacaagtccagatattcttgtagctatgtcccatgaagccctaatcaaatatatgggtgacttgaaggacgaaggtgttctaatcattgaccctgacatgatcgttgaagaggaaattgttgattttgtaaaagagcacaagatcaagctctacagagccccagctactaagacagcaacagaagatgttggccttaggattgtggcaaatattgtgatgataggtgctattgtaaaggtcactaatgtggtttctgttgatgctgctaaaaaagctattttggatagtgtgccaaaaggcacagaggataaaaatattcaagcattcgaagcagggtatgctttaatttaa

SEQ ID NO: 1825 - DNA, 864 bp, Methanobrevibacter ruminantium
  source 1..864: mol_type = genomic DNA
atggtagaagtaaaagaaagcccatataagaagtatctaagggaagatagattgccacacatattttgtccaggctgtggaaacggtacagtgatgagcgcctttttaaaaggccttgaaggaactgacattgactttgaaaatattgcaatggtttccggtatcggatgctcttcaaggattccaggttatgtcaagtgcgattcattgcacaccacccacggaagggcattaagctttgcaactggtttaaaggttggaaatcctgatttggatgttgtagtcttttccggagacggggattgcgcttccattggaggaaaccacttgattcatgctgcaagaagaaacatcaatcttacagttatctgcattaacaataatatttatggtatgactggaggtcagataagtcctacttcccctaaaggaagctttggaaccactgcaccttacggctcaagggatatgccttttaacttggccgagctggtttcagctgctggcgcaagctatgttgcaagatggaccacaacccatccgttacagctttcaaaggcaattcaaaagggtctggagaacaatggattctcattcattgaagtggtatcccaatgtccgacctatttcggccgtaagaacaagcttaaaactccattgtccatgttccaatacattaaggaaaacagcgtaaacaaaagaagagcagaaaagatggaagaagatgaattggaaggaaagatcattgtaggcgagtttgcaaacaagcctcatgatgaattgaccgatagcattaaaaaattgattgaagagaattccaatatgccactggctatcaaatctgcatttgaggagttggattaa

SEQ ID NO: 1826 - DNA, 1131 bp, Methanobrevibacter ruminantium
  source 1..1131: mol_type = genomic DNA
atggctgaagaacgttttgtacaaggaaacgaagcttgtgcattaggtgcaattgcagctaattgcagattctttgcaggttatccaattactccatctactgaaattgctgaacaaatgtctatcttgcttccaaaatatggaggcgcctttgttcaaatggaagatgaaattgcatcagttggtgccatcataggtgctagctggagtggccttaaggctatgacagctacctctggtcctggaatttcattgatgcaggaaaacataggctacggcttcattacagaaacccctatcgttataattaacgttcaaagaggttccccatctaccggacagcctacaatgtctgctcaagcggacatgatgcaagttcgctggggttcccatggggattatgagccaatcgctcttgctccttcatctgtacaggaattctttgactttacaatcaaggctttcaacttagctgaagagtacagggttcctgtaacagttcttgcagatgaggttgtaggccatatgagagaaaagctcatcattccagatgagattgaaattgttaaaaggacaagacctgaaaagccagatggccaatacttgccttttgatgctccaatggacggaaccactcctatgcctgcattcggtgacggattcaacatacatgtcacaggccttacccacgatgagagaggatatccagacaccaatgatcctgaatcccataccaaattggttgaaaggctatgcaataaggtcattatgaacagaaaggacatatgttccgttaagaaagagcaatgtgatgatgctgatattgtgattgtatcctgcggctctccatatcgttccgttggcgctgcaatgaaaaaagcaagggaagaaggaattaaggtaggatctcttaagatagatactccatggcctttcccagaggaagaaattgcagagattgccaagactgcaagcgacatcatcgttccggaaatgaatttgggacagatggttcatgaggttgaaagagctgctaaaggagaggctaatgttcatttaatcggcaagattggaggaatcctccataagcctgaagagatattggctaaaattaaggagattagcggatag

SEQ ID NO: 1827 - DNA, 207 bp, Methanobrevibacter ruminantium
  source 1..207: mol_type = genomic DNA
atgattattatagattcaaagctttgtaaaggatgcgatatttgcatagcaacctgtcctaagaaggtctattctaaatctgacaaggtaaacaccaaaaacgtttatcttcctttccctgaacatgaggaaggatgcaccaaatgcggattatgcgaattgtcatgtcctgatcaagctatttatgttgaaaaagaggtggaataa

SEQ ID NO: 1828 - DNA, 129 bp, Methanobrevibacter ruminantium
  source 1..129: mol_type = genomic DNA
atggatttgaatgatttaaataaaaataatttaaaacagaaaaaaaatcaccaagttttaaaagatttgaagataaataatttaattattatctttttagacttaacgcaatacataaataataattaa

SEQ ID NO: 1829 - DNA, 372 bp, Methanobrevibacter ruminantium
  source 1..372: mol_type = genomic DNA
atgggtgcaaaagaaaaatatttctctaatatttcaaatagggaaagagctatatttgaaggagccataagcatgggggccttattccatcaatttgtaggaactcccttcaatagaaagacggctgaaagcctagaaaaggctatggaagaatcttttactttacagccttgcattgataaggtagaggtctctatagacttggatagattggataaggctatgacagagtttgaatacacttctctaagtggagacatgttggatgttaagatctattcaaaagtggatgatgtcttggctgtaattagaatagagtttattgaagagcttaattatcctttaatgtatgtggaagatattattgaataa

SEQ ID NO: 1830 - DNA, 762 bp, Methanobrevibacter ruminantium
  source 1..762: mol_type = genomic DNA
atggatttgaaaaatataaaaattgctacaatcattacaattattgcatttataatcattggcctatatgccttgactgaagtaaactacttctcttacaagaatgttgtggaacatgatgatattaatgcgtctgtagtaattattccatccattggggtttttgagaagataaacaatgtttccatctctcaaggggtttatattgatcagatgtctaatcttccaaccaagggagatgtggttctatttggacataggacattgcagggatctcctttcttgagattggacagtttgaagaagggagatattgtaactctcgaatggcctgagataggtgagataaactatacagtcaaatcttctaagatagttccagccagctatggtctgtatttaaatgaaagccatatggaaggggatattcacaatcaggaaatttatctaatcacttgccatcctcttggttcttcagctgaaaggcttattgttgttggagaattgaattctacaagtctaatcaatgaaactgctttggaggaaaatccacatgcatcatgggcatggtatataactttaggattctttgctttaggattgattgtttcatttttatctcctgaagaggaaaggaagattattttagcagttgtgattataataactattattttagtttatttctgcttattcccaatttcttctcagatttgggcagatcaattaggatggctgaatagtatgatgggtgttaattaa

SEQ ID NO: 1831 - DNA, 1932 bp, Methanobrevibacter ruminantium
  source 1..1932: mol_type = genomic DNA
atgtctaatcgatttaattcctttaagaaaggaatttctaaggttaaaaatatatctccaaaaattaaaggaaattcaaatcgaaagaagaataattctaagaataaaaggtctaaatcaactattgaatatatagttcctgaaaattctccattacgtaagaattcgactgatttagactctgattctggatttttcaattctgattatttggatgatttgcctgagggtgtgtcttatactcgtccagttggtgatttgtctgaaggggtgacttatactcatcctgcggatgactcatatgatttggatggagtcgataaaagatatgcaaaatatatttttggagatgatttaagtgatagaaactttaaggatcccagagattcgagctatatggaggatttagataataatgatggtttaaataatgaatttggaagaaataggaattttcataaaagtaggaattatgcagataaacgctttaacaatgatttagataataatggtgaaaattataaaaatgattcttatttggatgaaagttattctgatttttcttttaaaaaggatttggataatggctatttgaatggtgatgcttatttaagtaattctgatttttctgattttgataaagattatttagatgattctaattttaagagcagtcactcaaagaaagcttcccttaaatccaatggtattaaaagcaaattgcttaattttaaagatggccttttgaataaggatgacaattccaagagccgctttggaaaaattgtttttatcttgatatttttggttttggcatcatctatgttttatttctttgtataccaaccatttcaagatgaattaaatttggaaaagaatgcaaagctgaatgaattaaatactctttataaaggtccattggaagctcatgagaatgcatatattttaaaaaatcaaatagaatctgaaaatgatataaatgaactaaagaagattgatattttaatgtatgcgacgaaggattggagaacttatcataaatccaaaatagtctcttccaaggataattttggaagggtcatgctggcttatggggatgaaaacaaaaaccttattatgtctgtcaaggatgcaaatgagtttgttggggataatgacggaagagtcctatcaaacattcaatttgaaaaggtagacactataatcgttcctgtttccatttcacggcttcaggcaagtgcagggcttatttcggtaggttcaatcgttgatatctattccctaaaggacaattattcctatggtggtgacgaggattccaattttgagtcttcatcagcccttaacgaatcttcagaagggcttgtagaaaaccagtctgaggataacgaggatttgggtggtggcgaagatatttctaaaatgcctgtcgattcaaatcccgaagaagattctggtttttcacaaaatggagaaccggatgtaagcggagctactgtattggccattttgcgctctaaagatagcggtgtaatagacagttcaataagcaagtccaatactttagttgagggaaaccttacggatccttatgaaaataccagttcatatacaaatgatgttgaagagcttcttaaagcctctgtatttaattcttatgatgataataaggctttagagtattatttgaatagttatggcataaagttatctaattatgagaggatgtcaaatctggctgatttggatagtgaatatttggttcttttagaagttccacgttccgatgtcagttttgtcataaacaatatggataatcttattctgactattccaacagaatttgctccgaattgggtaattggtgaattgaatgagacttattatgataatatttacaattatgatttaaattcatcctcttttatatga

SEQ ID NO: 1832 - DNA, 945 bp, Methanobrevibacter ruminantium
  source 1..945: mol_type = genomic DNA
atgagattaaaaagtgttggaatgggatattttttagcagtatctgatgctatttcaattttaaacatagcatttggattcttagctattttaatggttattgataacaatttaatatatgcaagtctatgtatccttcttgcagttgtttttgactctgtagatggatgggtttctagaaaacttaatcgtgtggatccgttaggatttggtatgaatatagattctttagcagacattgtatcctttggtgcagctcctatggctatattatactccataggttcaagcatttcatcttgggccggatatctgatagctattgtatgtatgattactttagtttgcggtcttttaaggctgaccagatacaatgtgatagctgataaaatcaattataggggatttgtaggccttccaattccggcaacagccataatattggttacctattatttaagcggattatttaatattgctgttgcagctgtcttgatgttgcttgcttcatttttaatgataagcacaatcagatatcctaaagtggataactattatcttattggtcttggagcgctaatgatcttattgttgattttgccaatacaagtatttattggacctattaaccttcctgctttagtattgtttgttttagcattggtttacatgttcatgacattcctagagttctttattgatgatgacatgacatttgatagggataaggccagtgataaggtaagcaatgttagggagattaccgaaagcaaggtcagcagttctgttactaatgtaaaggacgtctttaagaacatgaaagataccatcaatcaaatctccaatgaggatttggatgttggtcttaaagaagatgctgaagaggaaaaggaaaaagaagaaaaagaagttaaagaagcagaaatagtggaagaagtagaataa

SEQ ID NO: 1833 - DNA, 852 bp, Methanobrevibacter ruminantium
  source 1..852: mol_type = genomic DNA
atgattgaagagagaatacagattcttagaagagctgctcaaatctccaccgaagatcgggaggagaaggtatggtgtgtcatagcgggaaatgacagattagtcgatgatatagcctacaatgcaatcacccgccaaggacagagtccagattatcctttaggagaaaatgtttcaattacttcaaagcattcatataagaagttcgattgcatcatgcttaagggagaaaccttaaaaataagggaattgaagaataaaacccatgaagaagggggagcctctttgcaaatcaccacaacatcccttgaaaggcagccaaacttattggttgtaataggtcccgaagagagcatgaaacgttttgttggtcagacaagcagacaagaggttaagattgatatcttgctagaagatcacaccacaggatttatcaaatccgaaccgaagtcaacaaagattccaaagttcttaaaaaactttttcaatccaatcatagaatcaagcgaagtcatcctatctgttctattgatttcagttaaggatgaaggagatattgataaggtaaaaggaatcagccaagaaaacagcttatttggaattgatttaaaatcaacaattcaagataaggaaatagctaggctgaaagaaagaaaagcaagagaaaaggctaaaaaagaggaagctgaaaagaaagaaaaagaagaaaaagaaaaagccaaaaaagaatccgaaaagaaagaaaaagaagaaaaagaaaaagctaaaaaagaagaaagtaaagaagataaaaaagaaattgaaaaaggagaaactaaagaagataaaaaagaagaagataaaaaagattaa

SEQ ID NO: 1834 - DNA, 1071 bp, Methanobrevibacter ruminantium
  source 1..1071: mol_type = genomic DNA
ttgagtatttttggaaatgaagacgctattgaaattgaaccaactagagtcgtaaaaaatagtttaggtattgacttaggtaccttaaacactgtaattgcaaaaccatctggagacaaatttgacttatatcaaattccttcagtagttgcagtcaaaagagatgatcctactgctgttcttgcagttggagaagaagctaaaaaaatgttaggaagaactcctgaagacatcattgctgtaaggccacttaaaaaaggtgtaattgaaaacattgcacaggcacaagccttgctcattagagcaatggaaataggcattaacgaaggagaaactgtagaaagaatagtaatcggaattcctggagactcttctgaagttgaaaagaatgctgcagaagaaatcggtagaaaagcaggtgctgaatatgttttagtcatcagcgaaggattggctgcagctatcggtgcaggattacctattgcagaacctatgggaaccatggttttagacattggagcaggatccaccgacatcgttgtcatttcccttggaggaatcaatgacatagaaacagtaagatgcggaggagacgacatcgacaatagaatcgtcgaattgattgaagaaaaatacaatgttgcaataagcatccacgatgcagaagccgctaaaatcgaagtgggtatggtacactgcagtgaagagtttgaaaacttgaattatgaagtaatcggaaaatccttagaaaccaacagacctaaaaaggtcgttatcgattccatgctagttgcagatgcagctgaaccaatcattaaacaagtaatcggcggattaaacctcatcttagaaagattaccagctgaattaatgatgggaatctataacaacaccgttgcagtcggaggaagttccagattaagaggaatcaaagaaagaatctttgatgaatctgaaatccctattaaaatttccgatgacccaatgacagtagtagctaaaggaactgctattgttgctgccgaaccattagctttagaacctgaagtacgtttaaaagctatgaaataa

SEQ ID NO: 1835 - DNA, 240 bp, Methanobrevibacter ruminantium
  source 1..240: mol_type = genomic DNA
atggatatgaaaacaatttatttaagtgaagaagtctataacagattatctcttttggctttagaatctgaaaattataatgatcttattgctagattgatagatgtttatgaaaatagctattttgatgaattgagtgatgctgaagctgatttttataatgaaaggattaaatattttgaaaatggggattatgaaggcattagaaaggttgatttaaaattctttggaaaaaactaa

SEQ ID NO: 1836 - DNA, 660 bp, Methanobrevibacter ruminantium
  source 1..660: mol_type = genomic DNA
atgaacacactaggattagatgaagcaggtagaggtcccgttcttggaccaatggtagtagccggaatagtcatacctgaaaagaaagaaaagataatagaaagaatgggagtgaaggattccaaaaggattaccccaaaaagaagggctgtgctctatagaaaactaaccagaatgtttgattatgaaactgtggaaatcagtgcaaaggacattgatctattaagggcaaaaggagtaaacctcaaccagattgaaaagttggccatgatgagaatcattgcaaagcttaaggccgacaccataatcatagattcccttgacataaaggaaggaaggctagaggaagagatgcaaaattttgttggagaaggctcaaaggtaattgcagagcataaggcagatgacaaatatatagttgtaggagccgcttcaatcatagccaaaacaaaaagggatgaaataatcaaccaaatcaataaggaatacataaggtccactggaaacaaggatggaatcggttccggatacccaagcgatccaaagacaaagaacttccttaaaaactacaaatacgatgaaatgccagactttgttagaagaagctggggaactgttcaaagaataaaagaagctgaagaagctgaaaaatcattgtaa

SEQ ID NO: 1837 - DNA, 618 bp, Methanobrevibacter ruminantium
  source 1..618: mol_type = genomic DNA
atgtatttaggaagaattatttcagcaggtaaaacagaagatggcaagccttttgtagcttatagagtttcaagcagatcttttccaaacagacaggtaaaggttcttgaagatgaagcggctatcattccaaaggaaggctttgaaaaggacatttttaaaaactcttatattgcttatgactgtataaaaactgtaggagatattgcaattatctcaaatggttcacagaccaatccgattgcagataagatatccattggtatgaatattcgtgatgcaatggcatattccttgattaccttggattatgaaaaggacgattataacactcctagaattgctgcagtggttaaaggtggagatgattttgaagcatatattggtattgtaactgacagtaagatattggttgaaaagattgatgagggtgctcaattcatttccacttatgaaaagaacagtccggaagatgttgtatattctgccgaaactccagatgatgcatgcaagtttatctttgatgaaggtgcatttgctgagtttgaaaatcctgtatgttcagttgcagcaatctttgatggaaaatggaatatttctggattaaatccagaataa

SEQ ID NO: 1838 - DNA, 402 bp, Methanobrevibacter ruminantium
  source 1..402: mol_type = genomic DNA
atggcaattgacattaagcgtcataaggaaaagcttagacaggacgaacctgaaatcaaactggttcctttcattgacattttatttacattgcttatatttttagtggttacaagtacctttggagctgctacagttgatgataatggttcaggttctggaaagccgaatatgacggacactactggtgatgcggagtattatttgattcctgttgccggtttgcagaaagttactgtagatggtgtggatatgtcctctgagattaagggaaatgcaattggtgtgcatgcaagagtccttgaccagggagatgttcagattaaaacgagtgaacatgcgataattattaaagcgcctccaggtatgagtccgcaagaagcggttcacacgccagagtag

SEQ ID NO: 1839 - DNA, 840 bp, Methanobrevibacter ruminantium
  source 1..840: mol_type = genomic DNA
atgattatagaaatgctaactgatggatttaatatgattatggagatgctgcaaagcggaggagttatcacctatataattctcttgcttggtatctatggtcttttaatatccattagaaaaatattttaccttaggaagataagtaaaattgatgctacagagattatggggacaattacctcttctatggaacagggcggagctattgaagccttgaagaacatcagtcactataagaaccctgtttcaagaatcatgtctgaagcattgaagattggctataagaataagacagaagttgaagaaagtatggagcagatttttattgtcgaattaagtaagatgacaaatgggatcagtgctttaaagaccattattgagcttgctccatttttaggtctaatcggtactgtgcttggtatttggatgacctttaagaatttaggtgtgaatccagatgctgctgcaatggctgaaggtatttacattgctcttattactacaattgctggtttgactgtagctattattcttatgcctttgtacacttatattaaaggtttgattgatgatgaaatggataaaatcgaattggcaactaaaatgactaattggagttatgcagttattaagattcgtgtttatgaaaaattgccttgtgtggttgaagctcttcaagaggcagatggtatcgtaagtgttaaggagattacagatccttattccaatattcagatttcattcaagcctagtatgcttgaaaagagtataagcaatatcattttagagaaatgtgatgtaaagtctgaaattactgaaagtaagttgagacaatag

SEQ ID NO: 1840 - DNA, 765 bp, Methanobrevibacter ruminantium
  source 1..765: mol_type = genomic DNA
atgactttagaattatttggattaaaaaaaattcctttggtaaaaaaaggagatgacattgcaaagattatagaagatgacttgaaagaggaagatatccaacttgaaaatggagacatcttgctcatagctgaaacattaatttcaaaggctgaaggaaacatcataaagatggatgatgttgaagtaagcgacaaagccatagaaatagctgaaaagtgcaaaaaagaccctaagattgtcgaaaccatccttcaggaatccaatgaaatcgttgcagtaggccctaatttcatagttacagaaaccaagcacggatttgtatgcgccaactctggaatagacgaatccaatgtagaggacggattggctaccccaatgcctgaaaaccctgacaagtctgctaaggaaatcagagaatacttagaagaaaaatatcaaaaggagatagcaatcataatcacagacacccaaggaagggcatttagagtgggagcaatcggaactgcaatcggatgctctggaatcaaccccctttgggtgagaataggagatacagatctttatggaagggctcttgaaaccacagaagtggctacagctgatgagcttgcagctgctgcatccttattaatgggacaagcagatgaaggaattcctatagttcttataagaggattcgatgcatttaatatccttagagatactgaaactggaatcaagccactccttagaccaaaagagtttgatgtgtttagaaaataa

SEQ ID NO: 1841 - DNA, 510 bp, Methanobrevibacter ruminantium
  source 1..510: mol_type = genomic DNA
atggttgaaattaattatagttgtacaaattgtgacttttcattcctagacaaaaatctaatattctatttagacacagcaaatgaaactgaaagaatagataatttagaagagatcttgaatgataaaacagacaatttagaattaattgaaacaagcctaaataaagaaagctcagataaaatgactaaagcacttattgcaggctttctttatgaaaattattgtcctcattgcaagcagttaataaaaacctatgttccagaggataataaactatttacagaccaagagatggaaaaaatactaaaaaaggaaatttctaaaaataaacaagaaaataataattttaaaatactgttttttgattttaaaaatactctctatagagatagaagaaagattcttgaaagcaatgaatgtcctaattgcaataaggaaatgtctttagtaatttcagagaaaactccatgtccagaatgtggagaaaaactaaaagaagatttttaa

SEQ ID NO: 1842 - DNA, 906 bp, Methanobrevibacter ruminantium
  source 1..906: mol_type = genomic DNA
atgattaccatactttccggaggcacaggaactcccaaactaatacaaggaataaaagaaatctaccctgaagaggaaatatctgtcatcgtaaatacagtggaaaacgaatacttttcaggaggatatgtagctgcagactgtgatacagttatgtacacctttgcagatatgattgacgaccaattcttctatggaattataggagatacatttaagataagaaacatcctaattgaaatgggaactacagagcttcttaaaataggagatatggatcgagcaatcaagattcaaaagacaatccttttagaggaaggaaagacccttagcgaaattgtagaacatcaaaagaacaagctaggagttaaagcaaagataatcccaatgagcgatgaggactctgaaataaaaataataacaaaagagcatggcgaactggatttccatgacttcctaatcaagcaccaatgcgaaggggaagttcttgaagtaaaatacagcgacgttaagccaagccctaatgtgattggaacaattaaagatgcagataaggtaatcataggtccatccaatccgataacctcaataaggccaataattgcaattgaaggggttgaagaggcacttaaggaaaagaaagtcattgcagtctcaccatttttaggagaagccgctttcagcggacctgctgccaaattcatgaatgcatttggatatgaggcatcatctaaaggagttgctgaattatacaaacctttcttagacacatttataatagacaatgaggataaagacaaaaaggaagaattagaaaaaataattccaaatatagtagttgcaaacacctttatgaaaacaattgaagataagatcaatcttgcaaaagtggttttagaactttaa

SEQ ID NO: 1843 - DNA, 762 bp, Methanobrevibacter ruminantium
  source 1..762: mol_type = genomic DNA
atgatacaaatgactttgatacaaattgataattatggtccatggacagtaactccaagaccacgtactgaatctgaccttcaaattttacaagcggaactttttgcagacgtacaaagacagatagctgctaaaaaaggtttagtgttctttacaagatttgacaacttgcttgcagttacaaacggcttaaatgaagaagaccatatgagaattcaaagatcaattagaaacagatacccaatcacaataagcatgggtgtaggagctgcagagacagctcatgaggcacaaagactagcaaccatagctcttcaaaaagaaggaggagcccaatcctcaggcagaaaagaaattttagcaatcaataatcttattgaaaaccctgaagacagtttcgtacaggctgcacacattgacataaacagcgtaaccgaaacattaaccgacatagagtctgcctttgacacaagcttcatggtaaacaaggctcaacactacctcatgaccaagcttagagaaaaaggagcattattattcttcatcggtggagacaatttcatgtccccatgcaacggcttaagcgaagaggacttaacaaacatccttaaggaaatcgatgaagagataggaatcggattaaaagcaggtatcggaagagcagacaatatggaagacgccgcttatatggcagacatcggacttgaaataatccgtgaaggaaataataaagaatggattcatgtaattgaagaactttaa

SEQ ID NO: 1844 - DNA, 714 bp, Methanobrevibacter ruminantium
  source 1..714: mol_type = genomic DNA
atggccggaataacaaatgcagaatttgcaatgaaactcataccttacggatttgacacagtcaccatcggaggatacaatacagactccgaatcaatagacgcctgtgaaaagattattgcaagaggccgaaaagagttcaattaccctaaagaggaaatctatagcgtaattgaaaatgaagttaacgcaatcaaagacagttttaatgtacaagtctctgcaaacttaagagggagcacaccagacccacttatcaaaatcagcaaaatagaaaaactggacataattgaaataaactgccattgcagacaagaggagcttgtagcagtaggatgcggacaatcaatgcttttaagaccagacttagaagattacataagagaagtggtaaaaaaatcagaatcaaaagtctcaatgaagatgagagctaacgttgaaggggtagacaatctggaaatagcaaaactggcagaagactgtggagttgactacttacacattgacgccatgaaaatgggagtaagagatgctgatttttatctaataaaagaaatagccgaaaacaccaatattttcatcattggaaacaattcaataaattcaatctctcaagcagaaaagatgctgaatgcaggagcaaatggcatttccatagctagagctgcaattagcggaaaattaaacttcgatttaaatcaaataaaaatctaa

SEQ ID NO: 1845 - DNA, 981 bp, Methanobrevibacter ruminantium
  source 1..981: mol_type = genomic DNA
atggctggaactatgaaagcttggagaataaatgaattaggaaaacctcctgtattagaggatgtccctataccagaacctggatttggtgaaatcttaattaaaatgaaaggtgcaggaatgtgcagaactgaccttgaagttatagatgaaggtttcattacagttccatttgtcggaccattcacatttggtcacgaaaacgcaggaactgttgcaaaactcggtcctggagtagatactgttgaggttggacaaaatgtcattgtagacacattgcatgcatgtggtaaatgtcaatactgtctttcaggccgtgacaacttctgtgaagttgcaagtgcacgtggtcttaaggaagacggaggtatggcagaatatatgattgctgatgcaagggaagtcgctcctttaggtgaccttgaccctacagaatatgtggcattggctgatgcaggtctatctccatatggtgctgtacagactgcaaaaccattcattccaaacaatggtactgctgttgttatcggtgtagggggacttggattctactgctgtcaatatttagctttaacaacctctgctcgtgttattgtagtaaaccgttcagctgataagatggctaagatgacaaacttcggtgctgacgaattggttgttttagatgacaatgcatatgataagattatggaattgactgacggcaaaggtgtagatgctgtatttgactttgtaggaagagacaacactttagagcttgctgcacaaatcaccaaaggattaggtctcatttccattttaggtcttggtggaggaacacttcctgtaagctggaccacagtcaaacctggtgttatggtaagattgactcaaggtggaacaattacagacctttatgagattatggacttggcaaaagctggtaaaattacagttcaagctcaaaaatatccattcagtaaggtttttagaagctcttga

SEQ ID NO: 1846 - DNA, 258 bp, Methanobrevibacter ruminantium
  source 1..258: mol_type = genomic DNA
atgagcaaactctctaaactgccgaatattggcaaggtattggaaaagcaattaaacgatgtaggaataaagactgatgaagacttgattgatcttggcagtaaggaagcatggctaaaaatcaaagaagtagatgacagcgcatgcttaaataggctaatggctttagaaggagccatacagaatattcgttggcataacttatctcaagaggataaggacaatctaagagagttctataattcacaaaagatataa

SEQ ID NO: 1847 - DNA, 660 bp, Methanobrevibacter ruminantium
  source 1..660: mol_type = genomic DNA
atggttaggccaaaaatagagcgacgaattgtgaaaaaacctagctacacttgcatccaacacggcgacatatcaagagaagaggatttcgaaagcatcaagatgaatcttgatgagtttgaagcaatacgcttaggagactatcacaatatcaaacaaaaggaagctgcagaactgatgggaatatcccaaccaacatttcatagaataatcaattctgcaagaaagaagactgcaatgtctttgattgaaggaagaaaaatagaaataaacaatgaaaatttctatagcgaagataagatctacatctgcaacaattgcggattccaatggaacaatccaaaaaaggaatatgcaaactgtccagactgtaaaagtgaaaatatcgaacgaattaaggttaatttgaatgaaagtgattatataaataataatccaaataagataaaaacaaatagccaaatatgcgatattgataatacagatgttcctttaaatgaaagaaaatcatttggaggacctggaagtggtaggggaccatcaaaagcatgcgaatgtcctaattgtggccatattgcaccaaaaattaagggattcccatgcagaaacataaaatgtccagaatgtggaacccctctatgcggatcaaagcataaataa

SEQ ID NO: 1848 - DNA, 1611 bp, Methanobrevibacter ruminantium
  source 1..1611: mol_type = genomic DNA
atgtctttcataacattaaaaaacattaataagtcatttaacggagaacctgttctaaaagatataaatttaactatagaggaaggttctactttaggtattctcggtagaagcggtagtggaaagtcagttttaataaacatgctaagaggtacaaaggaatatgctccagacagtggacaagtgctctttgaccttgcaatatgtgaaaacaaaaagtgcttgcatgttgagcctgcttcaaaggctggaggaaaatgtccagaatgtggagcggaactacaagcaaaacaaatagacttctggaatgcaggaagattggaaaaggctgcaatcagaagaagaatctccatcatgcttcaaagaaactttgcattatacgacgaacagactgtaatagacaacgtattgaatgcaatgggtgacgaaggcagatatgaagaggagaatatctacaatgccattgacctattggaaatggttcaaatgagccacagggtaacccacgttgcacgtgacttaagtggaggagaaaagcaaagagtagtacttgcaagacaattggctaaaaaccctatgttgcttttagcagacgaaccaacaggtacattagaccctcaaactgctgaaaagcttcaccaaaccttgattgaaggtgtaaaagatgaaggaatcagcatggtaatcacttcccactggcctgaagttatgaatcacctagctgatgatgcaatttggctagacaatggggaaatcatagaacatggcgcccctgatacaattgtagaaaacttcctcaaaacagtgcctaaagcagaacaagtggaaaaaatagaacacaccgaagagataattaaagttcaagatattaaaaagcattattattcaattgaaagaggagttgtaaaggctgtagacggcgtaagcctaacaatcaaccaaggagaaatctatggtattgtaggtctaagcggttctggaaagaccacattgactaaaatgatgatcggcctcaccgaaccaagtgcaggagagcttgtaatcagattaggtgatgactggattgacatgaaaaagccaggtcctttaaacagaggccgtgtaactccatacttaggcttgctccaccaagaatactctctttacccacacagagatgtacttggaaacctgacagatgcaatcagcctaaacctccctgcagagtttgcaaaaatcaaggccgcacatatccttgagactgtaggatttgaaaaggacaaatccatgagcatgctcacaaaatggcctgacgaactaagtggaggagaaagacacagagtggctcttgcacaagttcttataaaagagcctaatatagtggtattggacgaacctacaggtacaatggaccctgttacaagaatcatcgttaccaattccatcctaaaggcaagagatgagttggatcaaactttcgttatcatatctcacgacatggactttgttctagatgtctgtgataaggcaagccttatgagaggaggaaaactcttaagcactggaaccccagaagaaatcgttgcagagcttacaggtgaagaaaaagcagatatgattaaggaccactag

SEQ ID NO: 1849 - DNA, 483 bp, Methanobrevibacter ruminantium
  source 1..483: mol_type = genomic DNA
atggcatgggatgatgcaccgtcacatatttgcagaggaggagatgtaaggggactcgcattttgctgtcctccagtaaaaccttgccctgtaatgaatgcacttagagaagtgggaattactcctcaggaatttttagaaattaaacagaagtttgcaagagaaacccgattaggggaaggccctgcaacttgcttcggatcacttgtatggtgttgtaagacttcaaagccttgtcctttaagagacatgaccttaaatcaaattaaaatgactgaagatgagtatatgacacttaaaaaacagttatctgaagaaatcttaaaagcaggcaagccaaaagacaatagcgctgaagcaatggctcttgcagaaacatttaatataagcgtagaagaggctaaaaagactcttgaagactgtgataatgatttaagaatggctgtaaaattgctcaaattaaaagagcttgataacgaatag

SEQ ID NO: 1850 - DNA, 624 bp, Methanobrevibacter ruminantium
  source 1..624: mol_type = genomic DNA
atgggacttacttccctttttttagaagtggaaaacaaaaacgtttttatcttaggcactggagaagtagccaccagaagagcacatcgctttttagacaaaggagcaaatgttattctagccggaaactcaatcgatgaagagctaagcaaaaaaggagctatcctaactcctattaaagaccttgaagagcttgtcaaatggagtgacataattgtcactgcaagcggagacgatgaattatgcgaatacatcgcatcaatcagccaaggaaagttaatcaacagagcagacaagcctgaaaagggaaatataatagcgccaacaagctttcttatagacgatatagaaatatccatctataccaatggacaaagccccttaatggctcgagagcttagaaaaaaaatccaatccataatcacagaggaagacattcttgagataaagcttcaggactatgccagaaagctcttaaaagaaaaggtagaagaccaaaagacaagaaagcaatatcttctaaagattctaaacaacacccagataaagcaatgtctaaaggaaaagaatttagataaagccaaaggacttgcagaggagatcatcaattcagaatttaattga

SEQ ID NO: 1851 - DNA, 1197 bp, Methanobrevibacter ruminantium
  source 1..1197: mol_type = genomic DNA
ttgataatcaatatacgtgtagaccacacccttgcagacatagaaactatggaaaaggtctcaaaagacctaaaggaactcttttccaacttaaaagaaaactttaacatcagtgaatatattgaaatcaatacctgtaacagatacgaatatttcctttatactaatgttgatgacgacagcctagactgtgacaacgaatatgtcataatagaatatgacgattctgcaattctccacctattcagaatgacttcagggcttgaatccatgatcatcggcgaagatcaaattctaggccagataaaagattccaaaaagaaaagcgaaaaggaaggccactgcggaaagaccttagacaccatctttacaaaggcaatacatgttggtcaagtggtaagaaacaagacaaaaatcaatcaaggctctatctcaataggctcagcagcagttgatcttgcagaagagcatcttggagatcttcaggacaagcatgttcttgtaatcggtgcaggaaagatgggaacacttgttgcaaaggcattggcagagaaaaacctaaaggcaatctttgtagcaaacagaacctattacaaagcagtgaaattagcagaggaacttgatggagaggcaatactatttgacaatctagaggaaaagctgcttaatgcagaccttgtaataagctctacaggttctccacaccctatagtcaataaggaaagacttatgaaagtatttggagatgaagtccctgaaaaaatgatatttattgatatagcaaacccaagagacattgaagatgatgtcaaggaattgggaatcgacctattcaatattgatgacttaagaggaattgccgagaagaataagaaacttcgtgagaaggaagtaatcgcagctgaaaagataattgaaaatgagtttaatttacttaaagaatcctttaatttaattgaaataaattcaatacttggtagtttaagagagtctatggaagaaataagacaacgtgaaagtcaaaagggcatagttaaactaaatgcggtagatgcgagggacataaaagtcatagataagatgactaagtcaatagttaacaagatattttatgacatctctgaaaaagttaagatatccgctaaaaacaacgaagaagatgttattaaaatgtgtgaagccatcttaaaaagatag

SEQ ID NO: 1852 - DNA, 1128 bp, Methanobrevibacter ruminantium
  source 1..1128: mol_type = genomic DNA
gtgaaatctgataataagagttcaaaaattaaaaaatcagaggtttatattaaatctagttctgattctatagataaagaggccgaagagcttatcttagagtctgcaggttatccatttaactttgcacttcttgaaggacctcatttagaaatatcagataatgtcctctttgagcaatatgcaattgaacaatggagtggaactcttgtaaagactggttcttatttatttgatcaaaagattattccagattatgcatttaaggttctgaaggtttttccagaaaattccatcatatctgaaaacacctctattgtggttgctgatgttgataaggataaacgttcctctataaagtcaaagcaatatgatgttcattttgatgatattgtaggtcaggagaatgcaaaaagcaaatccaaattgatttacaaatatcttcagaatccagacaaatttggcacttgggctcctaagaatgtcttgttctatggcgctccaggtacaggtaaaacaatgctcgcaaaggcccttgccaatgaattggacattcgcctttatcttgtcaagtcaacctcattgattggtgagcatgtgggagatgctgcaagcaggatccatgaattatttgaggctgcaagcagaaatgcaccttccttaatattcattgatgagatagatgcaattgcacttcacaggtctttccagtccttaaggggagatgttgcagagattgtaaattctcttttgactgaaatggatggaatcagcccaaatgatggtgttgtaaccattgcagctaccaataacccttctgcaatagactttgcaatccgaagccgttttgaagaggaaattgaattcaagcttccgagtgatgatgagagaagggaaataattatgcttaatcttgacactttccctcttgattatgatttagacatagagaagcttgtaaaagtgtctaaaagaatgtctggaagggatattaaggaaaagctattgaagacagcccttcacaatgcaataatcaatgataagcagacagttgatatggatgatgtcgcttttgcattgggtgtaaataaatataaagaagaagaagttaaaggaatgtttgaataa

SEQ ID NO: 1853 - DNA, 837 bp, Methanobrevibacter ruminantium
  source 1..837: mol_type = genomic DNA
atgaaagataaggttatttttggtccagcaggtaagccaattgattttaagggaaaggcatttgaatctccagaatatttaggtccaagggggctttatgcatttgaatatcagtccacttatggcgtaaggataggggagtcatctgcaataaagcttagagagtctgcagagagaaatggggttttaatgtccatgcattgtccttattacattaatgtatgttctaaagaggaagaaaagattgatagctccatagaaagactgattcaatctgctaaggttggagaatatatgggtgcctacaggcttgttttccacccaggattctattcaaacagaaaggctgatgtctgtatggatttggctaaggaaacctataggaggctccttttaagatgtgaagaggaagggatagaggactttacctttgctccagagactacaggaaagcgttcacagttaggaaatatcgatgagataattgaaatgtgcgccagctttgaccatttcgagccaacaatcgactttgcccatgttcatgcaagagggcgcggaatattaaataagaaggacgattataactgcatattctcaaagcttgaagacaatctggacattgacaggcttcattgccatttcactacaattgaatactcccacaagggagagagaaagcaccatactctagctgaaggtgatgaatatgggcctcacattaaagatttattgctcaatctgattgaaaacgattggaaagccactataatctgtgaaactcctttgattgaccaggatgccttaagaatgaagaagctttatgacagtttgatatga

SEQ ID NO: 1854 - DNA, 1017 bp, Methanobrevibacter ruminantium
  source 1..1017: mol_type = genomic DNA
atgaaatctgtagctattaatggattcggaactataggtaaaagagtggctgatgctgtagccgctcaagatgacatgaaagttattggtgtaagcaaaaccagacctaactttgaagcaagaactgctgttgaggaaaagggatatcctttatatataggaattccagaaagagagcctctatttaaggaagcaggaatagaaattgcaggaactgttgaagacatgattcaagaggcagacattgtagttgactgtactcctggaaacatcggccctcaaaaccttgagatgtataagaaagctggcgttaaggctatttaccaaggtggagaagaccatgaactaaccggattgtcatttaactcctttgctaactatgatgattcatatggtgcagactatgcaagagtcgtatcctgtaacacaaccggtctaacccgtaccttgcacacccttaatccattggttgacattaagaaagttcgtgctgtaatggtaagaagaggatccgacccatctgaaatcaagaagggtcctatcaacgctattgtacctaaccctccaaaggtcccttcccaccacggtcctgacgttcagactgtaatgaaaggcatagatgttactacaatggctttgcttgttcctactaccttgatgcaccaacacaaccttatggttgagattggaaatgatgtaactaaggaagaagtaattgaagctcttgaaaaacgttccagagtaatggttgttgaagcagctgctggccttgactcaactgctgcacttatggaatatgctaaggatttaggaagaagcagaaatgacttgtatgagattcctgtatggaaagagtccattaatgtagtggataatgaactcttctatatgcaagctgtgcaccaagaatctgatgtggttcctgaaaacgtggatgctattcgtgcaatgcttgaaatggaatctgataatgaaaaatccattgcaaaaaccaataaagcaatgggaatcttttaa

SEQ ID NO: 1855 - DNA, 552 bp, Methanobrevibacter ruminantium
  source 1..552: mol_type = genomic DNA
atggtttttatgattgatctagaccaattaaaaaaggaaattaatgatttaaccaaggattataagggatttgaattcaaatacatagatacagattccattgtagttgagccttggacaaggcttaaatgtcaatatggctgccctaattatggaaagacccttgtatgtcctccattcactccaaaggcagaggaatttatcggcatggtgaattcatataagactgcaattctctttcaaataagtctggcctcccttgaagatgacattggaggtataactaaggtttcggttgatatagaaaacctttgcgctcactttggctattataaggcatttggcatgggcgctgggccttgtatggtttgcaagtcaaaaggtgaagaatgcagtttggatgcctgtaaatatcctaatgaagcaaggccttccggagaggcttgtggtgtagacattcataagacaattgaaaacaatggctatgatattttaggaatcgatgaggagaataacagctatttctgttatggaatcgtcttattggaataa

SEQ ID NO: 1856 - DNA, 1086 bp, Methanobrevibacter ruminantium
  source 1..1086: mol_type = genomic DNA
atggcaaatactttttttagtaaaatagttaaatcattatgggtcttggcttcctttattccaaccctaaatggattggggtttgcttatataggcgctaaggagtttaaaaataattggattattgaaggtgtgatttacgagattccttggtttttattatttatctttgtaaataatgaggatcttggagtgttctttgcaacaataggcttattgggaatggctgtttcctttgttaggtcactctatgtctactataagcataaggacatattgatagatgacgatgccgaaagtcggataagcactgaaaagtccatcacttcattttgggttatcttttctgttataatctttttaaatgggcttggtttgatatatgtcggatttaaaagaaacgttcggcaatggatattggaaggtgctttctttgaatttttatggcttctattttttatcacccccagcaataaggccttaaacagttttatcatttcacttggatttattggtatgattctatctgtcattagaacatttatggtctactttgaagaggaaagaatggatggaggcttttacagtccaacagctgttaagaaggagccacctgctcaaaatcctattgaaaacacaatcaattcttatagtgagaacaatctttcagatgatgatatagttcctgagttcaagggatataagactcaagttgaggatttgaaagacgcttttaagactaaggaagacaatgttaataatttgttatctaagcgttttactaaagaagagcttagctatggcagattcaagtcagttgtaaatgagtttcataagacattctattctcaggcagattccactttaaccatgattaatctggctccagaatacagcgaaagagtagatgagaccataaaaaataagataggacttatggattcattgcttggtgagatgaataatcttttagaagaacttattcttaatgatggacttccagagaagtcagatgaggaaatcactgaattatttgaaaatatgcataatttgattaattctgttgacgattataataaggaatag

SEQ ID NO: 1857 - DNA, 345 bp, Methanobrevibacter ruminantium
  source 1..345: mol_type = genomic DNA
atgaatttcaataaaaaaattttattaataatagcattggtattcattgctagtgttggcattgttgcagctgaagacgcaacagttgatccatacactttcacaataccagatgactacactattgcaacatccgatgacactacctgtgcaatgcaaaaggatgcaacccatgccataagctttgcaaccggtgtcagcgatgatatagaagcagcaaaacaaaatttcatcagtcaaggaaaaacattgcttaaagaagaatccatgaactataatgacatggacatcacccttcaggcattctctgctgatgttgatggaaccaccattatatgtttataa

SEQ ID NO: 1858 - DNA, 1653 bp, Methanobrevibacter ruminantium
  source 1..1653: mol_type = genomic DNA
atggaaaataatgatttagaaaatttaagaaaacttattcaagatatcttggattttgcaaaaactcattctgatacattggatgaagattctgctcctttatggtattttgcaaagggaaaatttaacataactttagatgcccttttgctaaatgatattctatgctttttaagctttttaggattgagtgatggaaatatcagttctgatgaattgaattttataaattatgttttaaatttcaattttacaaaaagcgatttggagctttatttaaagaataatctaattgatgattatagcgaatctcttcctccttccttttttgtgttctatgaatttgataagtttgcattggaaaatggaaaactgactgaaagcattgtagattccttatttgaggttttcaatggaatcggacatctctttatagctcttgataatgagtcttctcttgaaaagaatattttagattcatttttagacaatattaaaaagcaactggctgatttgagaggcttccagtatgaacttatggttttggctttaaaaaatgatttgatagataatatgttggatactaattcaattgatggcttttctgattctaatctggacacttcttttgattctgatttagacaatcctcaattagatgattctttcttagataaggttgatgactttttctttaacaatgaatccgatgatgatttcgttagttctgttgactcttcaaatgatgatttaaatatgggtggtgatgactctttagatagtgattctcaatctaattcctcttctccaagtgattccgattctcaaaaagataataaaaagagcattcaagagagtttagataaattaaacaaattagttggtctagaagctgttaaaagtgatgtaaattccttaataaaccttattcaaattagaaaattaagagagcagcgtggaataaagcaacctgacatgtccttacatttagtgttttctggaaatcctggaactggaaagaccacagttgcaagactcctttcagatatctattgccagcttggattgctgtctaaaggccatttggtcgaaacagataggagcggtcttgtagcaggttatgtaggtcaaactgcaataaaaacccaagaggttatccaagaagccatgggaggcattctctttatagatgaagcttatgcattgtcttctgcaaagggagaaaatgattttggccaagaggcgattgataccattctaaaggctatggaagacaatcgtgatgactttattgttattgttgcaggatatcctgatctgatggatgagttcctccattcaaatccgggccttgaatcaagattcaacaagcatctttattttgaggactacaaccctcaagagctgtttgatatatttgtgtcaatggccagtgaaaccaatctaaagcttgatgaaaaggcagaggaattccttaaaggtcattttgaagacgtttataattcaagggatgataattttgcaaatggtcgttatgtgaggaatatttatgaaaaggtcttgtcaaatcaggccaataggctggtgggcatggaagatatctccgatgatgatttgaatacattaacccttgaagactttaaggatttttag

SEQ ID NO: 1859 - DNA, 1977 bp, Methanobrevibacter ruminantium
  source 1..1977: mol_type = genomic DNA
atgggaattaaagaatttttcctaaataaagaaaaaagaaaaatcgttgctattgagaaagacttaaataataatttaagcattttaggaggctattctatgggaattaaggaatatttcatagagaaaatcgacattattttcattctaatctccataattgctattgccttagaccttttaggtgtagatatttatggaatcagtcttatttggatagcaattatattctgcggcattccaatctttaaggaagcggcaataggtctttacactgaatttgacataaaggcagatgttcttgtgacaattgcaatcatatcttcaatactcattggggaattgtttgcagcaggggtgattgcagtcatcatggcaatcggcggctatctggaagagtatacagtttctaaaacaagagcgggaatagaaaagcttgttgatttgaccccaagaaaggggagattgattgaaaactacaacaagtccaatgaatctgaaagggaaatctcagctgatcttattgaagttggagacatattgaaagtggttcctggagagactgttccagttgatggaaaaatcataagtggcgagacatcaatagatcagtccgtattgactggggaatccattcctgtagataaactggaaggggatgaagtatttagcggaacaatcaatctttatggttcctttgttatgaaagcaatcaaaaagggtgaggacagttcacttcaaagattgattaaattggtagaattctcaaatccaaatgatgcagagattgtaaagactgcagataaatgggcaactctcattgttgtaattgcatttatctgtgctgtcttggcattggttttcactggtgagataatccgtgctgtaactgttttggtggtcttctgcccttgcgcattggttcttgcaactccaactgcaattatggcatctattggaaacctaagcaaaaggggaatcttggtaaaggaaggaataaccatcgaaaagttggctaaagtggatagggtcgtctttgataagactggaactttaacctatggcaagcctacactaactgatgtcattgtctatgatgaggaaactgaagagaaggaacttattcatttgcttgcttcactagagaacttatctgagcatcctcttgctaaggctatcgttaaatattatatggataattatgacgatacccttttaaagttgagcgattttgaaatgatcattgctaaaggggtaaaagctaatctgaatggcagcaatatctgtgcaggcaatttggaattcttcaaatcattagggattgatattccagaggaatttattgaagaaattgtttctccatcccttgaaaaaggggctacagccatctacattgcaaaggattcaagattcttaggatgtgcattgctctctgatgtcctaaggaaggatgcttctgatttggttgttcaattgagaagacttaaggtggtttcaactctccttactggagacaataagcaagcagctgaatacatagccaaagaggcagatatcgttgattatcagtataattgcctccctgaagataagatctccacaatcaagaagtttcaatcacttaaattgaatgttgcaatgattggagacggcataaacgatgctccatcattaagacaggcaaatgtggggatttcaatgggaggggtaggcagcaacatctccatagaagcatctgacgtctgccttgtaagtgatgatattaaatatgttcctcatctcttggctctctctagaaagactataaggacaatcaacagaggaattgcttttgctttaatcttgaatatattggcaacagttcttgcgatgtatggaatgattggacctattgaaggtgcttttgttcataatattggatctgtgatcgttattatctattcatccttgcttttaaggtatgaatatgctaattag

SEQ ID NO: 1860 - DNA, 261 bp, Methanobrevibacter ruminantium
  source 1..261: mol_type = genomic DNA
atggattctgaaaatctacatagaagacttaaaaagattattggccaacttaatgccattgatcgtatgattgatgaagatattccatgtgaaaatattttaatgcagataaatgcttctaaatctgctttgcatagggtcggatatattattgtagaaggtcatttagataactgcattaaaaatgcaatggaaaaaggagacacagacgaggctttagccgatatttcatcaattttagagtattattcaaggctttaa

SEQ ID NO: 1861 - DNA, 450 bp, Methanobrevibacter ruminantium
  source 1..450: mol_type = genomic DNA
atgtctagtgaaaaacgaaatagcaaagatcaatcctacttaggctttgaacttattgaagtggaggactactatctcctatcaaacacagaaaagctgcttgaaacagttaaaaaagactggtttaaaagcctaatggacgaaataagagaattggttggaaagcattatccagactttgtaatttacttagcctatgttgatcatggagatgacggtacaattttaggctatgtgaatgtaagggaagatgacaataagagagatgaagagtattcagaagttgctctaaacaaagaaatgcttgagatatgtgaaaaacacaaagaagataaaatattatttgtaacaattccaagaaagagaaaaagctttataaagttaaaaaaaggaagcatcagagaacatttcaaagaggctctattaaaattaggtgcaaagccactataa

SEQ ID NO: 1862 - DNA, 1089 bp, Methanobrevibacter ruminantium
  source 1..1089: mol_type = genomic DNA
atgactggtgaaagtactcatgaacacactcacaaagaacaaagaagacaatacacattcaataagcttaaggctttcggccaagagatcatagaggacattgagaagaacaaagtgccaactctaaagattccttcaagaggaactggtaacattgtttatgatgaggataaacgttactacatccttggtgatagatatggtagaaggtctctcggaaacgttaagcaaatcagaaaattaggtcagatggtctatgtagctaatttctgtaaggatttagtccaaagggacaagactgctaccatcagggagatgtattatatctctgaaggttggggtattgaattcaatacacaacaggaatccaacattgttggagaggacttggaagttgcattaggtgcaacccgtgaagacttaggattaatgcctgaagaagacggagcatctgtatatggtgatattacccttcttgacggagattatgaaatcaatgcggcaagagcaggtaaatcaggctataccatttctccaactatcgaccaggttgagttattggactgcggagcagacttcctccttgcagtggaaaccatgggaatgttccataggcttgttcaggaaaaggctcacgaaagatataactgtcttattgtaggtcttaaaggtcaggcagctcgtgctacaagaagatttatcaaaagggtcaatgaagaattgggccttccagtttatatctgtaacgacggagacccttggggattccacattgcacaggtaatcatttccggaagtgcaaagttagctcacgttaatcacgatttggctacacctgatgccaagttcattggtgtaactgcaagtgacattcaaaattatgaccttccgactgatccgcttaaggacattgacgtcttaaggttaaaggagctttctaaagacccaaggtatcagactgacttctggcagacagaaatcaaaaagatgcttaagcttggtaaaaaagcagaacagcaatctttctcaaagtatgggcttgaatatgtagtagatacatatttccctgaaaagttaggacttaactaa

SEQ ID NO: 1863 - DNA, 1800 bp, Methanobrevibacter ruminantium
  source 1..1800: mol_type = genomic DNA
ttgtctcaacaagctcaagaactctttgaaaactttaatgagttaactccatcagagttctttagaaaaaataaacagatgttaggattttcaggaaagattcgttctttaactatcgttttccacgaacttataactaacagttttgacgcagcggaagaagcaggtatcttacctgaaatcagcattaaattagatagattaggtaaggaccattatgtattgacccattcagacaatggtcctggaattcctgaagaatttgtaatgaaggtatactgtcagatgtttgcaggttccaaattcagaaacatccaatccaggggacaacaaggtttaggttgtagtggatgtgttcttttatcccaaatgaccaccggtgagtccacccatgtaacttccggatggatggaaaatggggagcttaaaggggtcaagatggaattcaagatggatgtaaagcaaaacaaaggtgacttaatcaagaaaagcgaatttacacctacaggaactggtgtatgcattaagctccactttaaggaagtatcctactctttagctgagcaaggtgcattcgaatacatccgtagaaccatgattgcaaaccctcacgctaaaatcacattcagggatcctagcgctcataaatacatctttaaaagggcagcagaaatcgttccagtactccctcaagaggtattgcctcaccctaaaggggttacagctgacgatatcattaccattgcaaagttcactgataagagaaacttcaaaagcatgctgacaagttccttgtcaagaatgtcctctaaaaaggtttcagaacttcaggagcttaccggaatagatatgaagaaacgtcctaaaaacatggaatgggcagaagctgaaaagatcgtagaagctttcggcaaaatgaaattcatggctcctccaacttcaggattgatacctatcggtgaagagcaaatagaaaagggtatgaaattgattctaaagcctgaattcattaccaccatcacaagaagccctgtaacctataagggtggtgtggctttcattgtagaggcaggtatcgcttatggaggagatgcaggaagaatcgtaaacgaacaaagaaaatcagagatcttaaggtttgcaaacagagttccattgactttcgatgcaggaagctgtgcaattacagaagcgttaaggtctattgattggagacgttacggtcttagagacttggataacactcctcttaccttgtttgtaaatattatctctactcaagttccttatttatctacaggaaaacagagcattgcccctgaacctgaaatagttcatgagataaggcaagctaccatgaaaatagcaagaagacttcaaaagcatatccgatccaaaaaggctgaaaaggaaaaggccatgagatccaagatatttgaagactatgttccagtcatcattgaagaggcagcttcacttgctgagactgaagttccagattataagcctgttcttgctaaggtaacaagaagggcattggcagaaatcatgggtgaaaaggtcgaggaagaagaagaggaagaagatttcgtcgattccttgcttgaagagcttgacgaattcggccacactgtcgataaggagcattcagcaagaaaggacagaattcaggaatctgacttggatgaagcctttatagatgatgaaaagccaagaaagagatccaaaaagtccaaaaaatcagaaggcgctgatgaaggacagtctactttatttgattcagaagaacaggaggaatga

SEQ ID NO: 1864 - DNA, 612 bp, Methanobrevibacter ruminantium
  source 1..612: mol_type = genomic DNA
gtgaatgaattgccggaaactgactatcttagagttccatctgataggattggcgctttaatcggaacaaaaggtgaaactaaacatttgattgaaaatgcaactaatactcatttagatattgacagcgatgactgcactgtagctatttatcctggagaaaatatggaagaccctcttggagtatggaaggcaaaccatattgtaaaagctatagcacgtggctttaatccacatgttgctttaaaattaaataaagatgatacttatttggaaataatcaaattgcctttatatgttggaaagtccaaaaaggctatggcaaggtataagggcagaatcattggaaaggatggaaagacaagagagattattgtagatatggcagaagtggatatggcaatttatggaaagactgtttccttaataggcgagcttgataatgtcatggttgcaaaggaagcagttgaaatgattcttaacggatcaagacataagtctgtctatgcattccttgaaaataagaagaatgaacgtaagatgaaagaattcaaggaagtcgttggaattgaaaaggatgaaattgaattccgtgatgacttggatgactaa

SEQ ID NO: 1865 - DNA, 234 bp, Methanobrevibacter ruminantium
  source 1..234: mol_type = genomic DNA
atgagcttattagataatattgataaaattcatacaacagagatgggtgttggaagaattcaaaggaatcttggaattgatgtggatccagttgaatattgcattttaaaaattaaggataaggacgctgtaattgaagagaagggcaaaaactattatgtaactgttgatgactgtataataacagttaataagcattcttttactataataactgctcataagaagaaatag

SEQ ID NO: 1866 - DNA, 780 bp, Methanobrevibacter ruminantium
  source 1..780: mol_type = genomic DNA
atggatgatgaaaatccaagagtggctaaggcagatgcagaagttcaaaaactgatttcaagaaaaagaactaaagatgcagatgatagaaaggtctcaagcgagatatttgataaggcaactttgcaagtcctttataagctggcgaatcagggccatttggatgttttaaatggtgcaatcagcactggaaaggaagctaatgttttaaagggcataaaagaggatggatctatcgttgctgttaaaatctataggatagccacatctgactttaagaagatgcagtattacattgcaggagaccctagatttaatgtcagatcaagcaataaaagacaattaattaacaattgggtaaataaggaattcagaaatctgactcggctaaaggatgctggagtaaatgttccagaggcaatcacaagccttaacaacgtgcttataattgagtttattggtgatgaggatggaaatcctgcacctacagttaagaatcttcctcctcaagaccctgcccacttctatgagcaattggtggagcagatggacaggttcattaataaggctaatctgattcatggagacctctcctcttacaatattcttaattttgatgagaagcctgtaattattgacgtttcccaatctgttgtaagggatcatataattgcaaatgagttgcttgcaagggatattaagaatattagctttgaattttccaagatgggggttgacacttccattgaggatttgactaatcgattgattaaggattag

SEQ ID NO: 1867 - DNA, 321 bp, Methanobrevibacter ruminantium
  source 1..321: mol_type = genomic DNA
atgtttaggaggcaaattttggcgaaaccacaaaataatcaacaagaatatagaagagtacgtactccaaagaagggagaaattccaggagtcgtagagcaaattatgggacatggtaaacttaaagtaagatgcgctgatggaaatatcagaatgacacgtattccaggtaaggtgaaaaagagaatctggattcgtgaaggggatgttgttcttgtaaagccatgggatttccaatccgatcaaaaggctgatgttatctggagatacacaaggactgaatccaattggcttgaaagaaaaggttatttaaaaatgtaa

SEQ ID NO: 1868 - DNA, 1215 bp, Methanobrevibacter ruminantium
  source 1..1215: mol_type = genomic DNA
atgggtgtagagtttttaaatattatagaatcagatgaagctaaagagatcataaaagaaaagttcgaagaatgttataccgctcaatctgaaatcatagacatagcagaaagtgctaatagaatcacatatagcaaaattgaaagtaagatcgattttccaccattcaaccgttcattaaaagacggatttgcaatcaaggcagaagacagctatggagttaatgaagaaaatcctaaaaagcttaaagtcattgactttcttgaagcgggatcatttacagataagaccgttgagcttggaagctgtgttgaaataagcacaggggctcctattccagatggtgcagatgctgtaataatggtggagttttcatataagtctgatgaaaatccagagcttgaagatgatgaggtggaaatcctaacaagcgtcactccttcacaggatatcggccaaaagggctcagacgttaagaaaggacaggtcatccttgatgagaatatcctattgaaccctccaaagattggagttattgcagctcaaggaatagacactgtagaggtctataaaaagccaaaagtaggaataatctcaactggaaacgaactcctaaccaaccaagaggaattaaggccgggcaaaatctatgacgtcaacagcgaaatgatcagagcgggggtaaacgcatgcggagccgaaggtgaatgccttggaatagtaagagacaattatgatgacttaaaaaacaagataaccgaatcattaaaggaatgtgacattctcttatgctctggaggaacctctgcaggggttggagacaacatccgccacatccttgatgaattgggaacagtctacattcatggaattaccgtccagcctggaaagcctaccatccttggagttgtagatggaaaaatcataataggccttcctggaaaccctgtttctgcaattgtcatatttaatgtgtttgttgcacctgcaatcaagaaattagctggattcaaacaagaggaagagcaaaaaacaataaagggaaaattggcaaaaagaatacattctcctattggcagaatgcagtaccaattggttaaagtagaaggagacagtgttattcctatatttaaagattcgggagcaatattctcacttgcaagtgcagcaggttatacaaaaaagtctcaaaaacagaacccgaatttggtttga

SEQ ID NO: 1869 - DNA, 468 bp, Methanobrevibacter ruminantium
  source 1..468: mol_type = genomic DNA
atggagattcaagaaaagacaattgaagaccagaaagtcgctataatgaattataaaggctatcttaaagatatggagattttaatttccaaattaacaggatggattgagttagaagaaatagaaaccgtcggagacttatttgcaatattttacaacaatccaagaactgcaaaggaagatgaagtcgtttatgatgttggaatcccaatcaatccagaattagaccctgatgaaactgaagagataaggattgtaacaatcatcgaacataaagtcctatccggactccattatggttccattgacaatattcaagagacctataacattatggcagaatactctatcgaaaataaatatgacattatcggctctccaaaggaagtctacattaaaagcaaatttgatgttgaagatgaagaagacatgattactgaaatccaattgccagtaattaagatgtaa

SEQ ID NO: 1870 - DNA, 309 bp, Methanobrevibacter ruminantium
  source 1..309: mol_type = genomic DNA
atggcagaagaagaaaaaagttctaaaaagaaatccaaaagagaattagaaaaggaacttaacagcaaagtagataagatcatagaaaagaacttcgaagattttaaatctcaagatgaacttgaagactttatccaaaaggctttcgacgataaagcttcacaatacaataaaaaaatcgaattaaaagaaaaagagttggataaaaagttcaaagcttcaagagaaaacgataataaaaaaatcgatagaaaaataagagaaatggatagaaaattaaaattaaggtataaaactatgttaaaataa

SEQ ID NO: 1871 - DNA, 1314 bp, Methanobrevibacter ruminantium
  source 1..1314: mol_type = genomic DNA
atgatttatgaaatagcagaagaggcaaaaagagaaatatcaaaatattcagacacttatgaaatttatattgacaggactgaattattggaacttgattctcaaaagactgagcttaattttgcaaaggaagatttaagcttaggagtggggattaggattatcaaggatggagcaataggatttgcattcacatctgatatggatgagattgcaaagacttgtgagaatgcttatttgaattcaaagctcaatacaaaggatgaattttattcatttgcagaatatgaaaaactccctgttgtaaaaggcacttatgataaaagatttaaggatttggatttggatgagcttacaggctcacttaaatctgtcttgaattctgttgaggattatggatgtcaggtaagctctggaggattttccgctgctgaaggtgaaaccttaataataaattcaaatggtgttgaagcctatgacaattctacaggctttgcaataggagtgtcaatcaatgcagttaaggatggtgaattgaccactgcttatgattccgattcatcctgcctttatgatttagatggtatggccttggtagaggatatttgtaatcttgcaatggactccttaggtggagaagacattgaaacttcagatagggatgttgttttagattatcatgctgccactggattattgtctacctttttaagcggattcaatgcagataatgttcaaaggggaagatccagaatcgctgataagatggatgagaagatcattaccgaaaacctttccatttatgatgattccactatcgatggtggattgaattcctctcgctgtgatgatgagggcaccgcttcaaagaggacttgtttggttgaagatggggtattaaaaggatttttatatgatatctacacagcaaataaggatggagttaaaagcagttcaaatggatttagatcatcctatttgggaactccttcagttggggcttcaaatctattgtttgactttaaaagccatagaaacttagatgacattgatgatgcatttttagttactgacgttttaggagcccatacagccaatccaattacaggagacttttcagttgaggcaagcaattcatttttagtttcaaatggtgataagaagcctattaaaaaagccatgatttctggtaatatttatgatcttttggctgatgctgaagctgttggtactgagactaaacaaagaggctctttcattattcctaagatatttttacctaatgtgagagtggttgggaataattcaaattag

SEQ ID NO: 1872 - DNA, 705 bp, Methanobrevibacter ruminantium
  source 1..705: mol_type = genomic DNA
atggttaaaatagaagcaatagctgttgatgttgacggaacaattacggatggcagaagaagagtctgccatagtgcattggatgctcttagaaaggcagaggatgctggaattccagtgattattgcaactggaaacatttcccacttttcctatgctgtggcaacccttgtagggactactggaggccttgtttgtgaaaatgggggagttatctatcatgatggatataatgacaatcgagtgatcgtcttaggagatatctctaaagctcaaaaggcttatgattttctatttgataagtttggaaaagacattccatttaggatagtggaagattccgatgcaagggtttcagaaataactttctataagaatatgagttcagagccacttaaggagatgttgaaggactttgatgtagaggtctatgacagcggttttgcacttcatcttaccgatcctgcggtcgataagggaacagggcttgcaaaattggctaatctcgttggatataatgttgagaatattatgtgcattggagatagcgaaaatgatattgattttctccttgcaggaggatttaaggttgcagtggccaatgcatgtgatgagctaaaagagattgctgattatgtttgcgagaataagtatggtgatggagtggcagaggctattgataagtttgtttttaatcaggaatag

SEQ ID NO: 1873 - DNA, 954 bp, Methanobrevibacter ruminantium
  source 1..954: mol_type = genomic DNA
atgatggctagtatgaaagagatggctgatgctatactaaaaagaattaatgatttagctgttcctgtaaagattatgcatgtttgtggttctcatgagcatacaatcatggaacatgggattagatccttgcttcctccggaaattgagattgttgcagggccgggatgtccggtttgtgtggttccttcaagggaaatcgacgaatgtctgcaactcgtagaaaaaggggttactgtaaccacctttggagacatgttaagagttccaggttctaatggctctcttgcagaggctaaagctgaaggtgcagatgtaagggttgtctacggtattccaaatgctgtggaaatcgctgaaaagattgataatgatgttgtattcatgtctgcaggatttgaaacaacagctcctgcaaccgcttccgagctcttgaaaaagcctcctgaaaacttttcaatcatttcatgccataggctgatccctcctgctcttgacttcttgatcaattcaggagagaccaatctaaacgctctcattcagccaggacatgtctgcaccattcttgggacagagccatttgaaaaattctctactgaatatggaattcctcaagcggtggctggatttaatcctttggatatattaatgtctgtttatatgatattaagacaaatcgatagaggagagcctagaatagacaatgagtataagagagcagttagaactgaaggaaatgtcattggaaaagagatgatggatgaggtcttccatgttgaaagcagggaatggagaggatttcctaaaatccctgattctgttttggaagtaaatgatgagttttcccagtggaatgcaagggaaaagtatgatattgaagtaaaggacgttactgaagctcctaaaggctgcatctgcggacctattcttagagggcttgcaaaaccttactga

SEQ ID NO: 1874 - DNA, 1725 bp, Methanobrevibacter ruminantium
  source 1..1725: mol_type = genomic DNA
atgtataaagataataaaatattagttgtaattcctgcaagaggaggatccaaaggaattccgcgtaaaaacatacgttttttaggtaaaaagcctctcattgcacacacaatagaaatgggaaaggcatccaaatatgtggatgagctagttgtgacaactgacgatgaggaaatcaagttcatcagcgaaaaattcggagcagaaacaatcaaaagggatggaaagctagctgaagactctatcccacttgatccggtaatctacgatgccgcaattcaaaaggaaggaaaaagcaatgaaaaatatgatgttgtaattaccgtacagcctacttccccattgcttaagacaaaaaccttagatttagctattgaaaaactattaaaccccgacaatgaaaacaaagattatgacacaatcataagtgttgtagacgacaggcacttaagctggggctatgatgagaaagaaaaaaagtatttcccattatataaggaaagggtaaaccgacaatatcttccaaaggcatataaggaaaccggaagcatatttgcaacaagaagagaatttgtaaaggaagatagccgtcttggagaaaatataggtcttattgaagtatccaaacaggaaagcatagacattgacaactatgaggactggtgggtagctgaaagaatcctaaacaagaagaaaatcctaataaaggcagatgcctcccacgaaataggaaccggccatatttacagaggcctctcaatagcttcaaagcttgtaaaccacgaagtgattttccttcttgatgaggctcaggaattaggaattgaaatagttaaaaacaacaactatccattcataacccataattccaataaaggaaagggtaaagaggcagatgaaaaagctaaggaagagattatagaaaagatagtggaatacgacccagacattatcataaatgacatactaaacaccaattcaaaatacacaaagacccttagggataatggatttttcatagtaaactttgaagacgttggcggaggagtcaaatacgcccatttagtatttgatgcactatatgaacataagatacctcttaaaaacctttattcaggacacagatattatatcctgaaagatgaattctattaccaatcatttaagaaaatagacaaggaggttaatagaatccttcttacatttggaggaaccgatccaaacaaccttacagaaaaaacgctggaagcaatactggagagcaaataccaaaacgagattgaaataatcctaggattgggatacagcaaaaaagaggaaatccaagaaaaatataaagacaacgaaagaatcagcatctatgaaaacgttaagaacatgagcgaacatatgcataatgcagacctgatattcacttcagctggaagaaccatgtatgaaatagcatcccttggagttccttgcatatgcctctgtcaaaatgaaagagaattaagccatatctttggaaacatagagcatggattcattaacttaggtcttggatccagagtaagcaaggaagacctaatcagaacacttgaaaacacaatcaacgattatgaacttagaatagagatgaataaaagaatgggaaacgtagacttaaagcatggatttgataatattagaaaactgataaagaaggaatataaaaattggaaagcagaacagttaaacaaataa

SEQ ID NO: 1875 - DNA, 840 bp, Methanobrevibacter ruminantium
  source 1..840: mol_type = genomic DNA
atggaatcaaaagacattacaaatattgaagagattataccaagcaatgacgtatatcctttagtaaatctactattccaaagcaaactcttcaaatcaaaagaaataaacacaaacagccttgcaatcagctgtcttgacctaatcgacaaaaacagaataaaaatcacattcaatgaggaaatcgaatcaatcaaaatcagcaagaaccctcttcttaagacaaaaggccaattggaaaaagaattggaactcatgaaaaacatcaaatttacaatcaattcaaaagagatgaaaaaactggataaaagagaccaaatcatcttgaagatgtttaaggacatcaacaaaaaccatgaatttgacttaaaatccatgtatgataagatcctaaagcaggatatagcaatcaaatttgcaaaatacttcaaagattattccaaatcccttgaaagggaaaccaaatactcattggaaaactataaagacctcatcaaggatggagagtttacctttaagggaaatgaaataagcaatgaatggaaagaattcaaaagctctttaaaatcagataagtccttatacagccaagacgcagaaataattgacaaatatctgatttatggaagatgccttgaaattgaaaaggatgttctaaaaaacattgaaaaggcaaatccagactacgattcagagctttacagattcctaaggcataatggtgcagacttattgaagctaatatttgataaggcacttgcaaacagcaagatagaaagaaaaggagacggttcagtacctgttggaaacagcaaatacttcgtcccaggattcggataa

SEQ ID NO: 1876 - DNA, 1071 bp, Methanobrevibacter ruminantium
  source 1..1071: mol_type = genomic DNA
atgaccatattcaatgaagaaccattcctaatagccgaaataggcgtaaactactacgacattgcaaagaaggaaaatatatccaatatggatgcagctaaactaatggttaaggaggctcatgacgcaggatgcaatgcagttaaattccaatcatataaggcaaacaccatagcatccaagaattctccagcatattgggacacaaacgaagagcctacccaatcacaatacgaactattcaagaagttcgactcctttggagaggcagaatatagggaaatcgcagactactgcaaagaaatcggaatcctattcctatcaacaccttttgattttgattcaatagactatctagacgacttcatggacgtttataaaatatcatcctcagaccttacaaacatcccattcataaaaaagatagccaataaaggaaaggacataatcatatccaccggagcatcaacccttgatgaagtaaaactagctatagaaacaatagaaaacgctaacgacaaatacaaaaaaggagaagctggaatcggaatcatgcactgtgtgctctcctatccaacagcaaatgaagatgcaaaccttcttatgattaaaaaccttaaggacctttatccaaattatgaaataggatattcagatcatacaaagccagatgagaatatgctcattcttacaacagcctatctttatggcgccactatccttgaaaagcactacacattagataagacacttcaaggaaacgaccactatcatggaatggacccagatgacattagaaagttcaacaaaaacatagaactgataaaaacaattaacggccaatatgataagatacctctcccatgtgaaggagaatcaagaaaacaggccagacgctcaataattgcaaaggaagaaatcggtgaaggcacaataatcacagaggatatgcttacatataaaaggcctggaactggcatttctccaagtgaaatagataatgtagttggcaaaaaagccaaaataaccattccagaagatgaactgattcaatatgactttttagaataa

SEQ ID NO: 1877 - DNA, 1527 bp, Methanobrevibacter ruminantium
  source 1..1527: mol_type = genomic DNA
atgacttttacagtaaaggaaatatgccaacatatctggtctcttgaagagaaatatgaactgaaccacaaagagattcaaggctgctatccatggcaattaatcagaatgtatctctactacgaaataaccagaaagacaaatgtctttgagtcagctcaacagtccagtctttccctagcggataaagtaaatacattccttccttttataaaaaacagcattctttcaaaccccttaagcggaaaggataccaaagatgttttaatattcgaccatccaagaaaagtcatattaaatggggaataccaagacatctatagctattttctaaaggacattctaataaaaaacaataaaagctttgaaacaatagaatccccatatctaaacaatcatttcagaagcagtgcaaataagaaagaaaataatgtcaaatacaatgaccgaatccttttaggctcttttataaacaaaaccaaaaatagaggaaaattgccatttacagatgaagaaaaagactttatcgaaacaataaaaagagaattagagtctgcattcaaaatagaaataaatctattcaatattattgaagatcacatacttaatttccaatatgattataaaaaatatatagagcttcttgaaaagagaaagccaaagcaagtctatctggttgtagcctatgaaaacaaggcattagttgcagcatgcaagaaaaagaatatagaaattattgaattacagcatggaaccataagtccataccatttaggatatagttacccaaaaaatacaatgctgatgaacaatacaatcaaggaaattgaatatttccctgataaaatactaagttttggtgactactggcaaaattcttcaagcttccctatagaatccgataagataatctcaatgggatttccatactttgaagacaactctaaaacttttatgaagatggcagatgaggataaaaacaaaaagcaaattctattcatttcacaaggagttattggaaaatacctttctgaattggcttatgaactggctaaagaactaaatgaaaaaaataagaaaaatgatttagagaatagtgaaaataatgaatctgatttagaaaataataattatacattcatttacaaattacatccaggagaatatggaacttggagagagaattacgaatatttaaataaagcaaatgaatttgataactttaaagtcattgataaaagcgagcctcctttatatgagctatttgcaaaaagcaactatcaaataggggccttttcaacagcaatctacgaagggcttgcatttaactgcaaaacattcatcatagacgttccaggagtggaatatttagatgacttgattgacaagaatattgtaaaaaaggttaaatcaagtgaagagctgattaattttattgaagatgaagataatttagatttaaaggaatatgataaggattatttctttaaaaacttcgacgaaagcatatttgatgaaatattataa

SEQ ID NO: 1878 - DNA, 1443 bp, Methanobrevibacter ruminantium
  source 1..1443: mol_type = genomic DNA
atgagtgaatacgtgcgatttatacaaagaataggtctagtcgggattacaaacatcctaatatctcttagtagcctaatctttattccaatcattacaaaatcctttactacagccgaatacggaatgtgggctcaagtaaacactaccatcgcacttgttccaaacatagccaacctaggtcttccatacaccatggtacgattcctgtctgctgaaaaggataaggaaaaaataagagattccttctatccaatgataagcctgacattcatatcaacagtgatcatctgcctattgtttttaatatttggacaccctattgcagatgcgctctttaatggaagcatgcaggtattgtacatcacaactgcaatatccttctttgcatgcatgaacctaatgctcataacctactttagaaccttccaggaaatgaaaagatattccctattccttgttcttcaaagctatataggggtttttgtaagcatctaccttacatatgcaggatacaatatagaaacagttgttctcggtcttttaacaggctatgcagcagtattcatcatgatggcatttctcattgtaaggcatcttggattcagctttggaaaatggtcaaacctaaaggaacagcttgcctttgcccttccaaccattccaagcaatgtttcaagctgggtagttgattcaagcgacaaatatgttattggaatccttttagggtcagtggcagtgggatgctattcaccaggatatgccttaggaagcatattgctaatgttcctatctccatttgcagttcttcttccaacgattcttccagagcattatgaaaagggagatatggcagaggtagacaaatatctcagctattcaatgaaatactatcttcttctcactgtgccagcagctgtagggatgagcgtactctctaagccattgctttacataataacaaccccagagattgctcttggaggttatatggtaactccatttgtctgtctaggtgcaatattcatgggaatgtatggaataaccaataatatacttatactagagaaaaacacaatgatccttggtaaattatggataattgtagccatatccaacattgttttaaatctgattcttgtgccttatctaaatataattggagcggcaatagccacacttctctgttatatgctagcatttggagtgactgccattgcaagcagaaagacaatgagattgcctttcaatagaaaggaacttgtaaaaatacttattgcatcagcgattatgggtgcagtggtttatatgatgaatccaagtggaatagttaatgttttagtggctatattagtgggagttgtggtttattttgcaattatatttgttttaaaggcagttacaagaaaagaaataggtatatttaaagatttagtaaaataa

SEQ ID NO: 1879 - DNA, 507 bp, Methanobrevibacter ruminantium
  source 1..507: mol_type = genomic DNA
atgatttcaaagatttttaacattaaacaaagcattaaaagggcttattatacatatagggtaaagagagtgtcaaagtcctgtggagataatctcactgtaaacaattactcctatgtcactccaaagacaagtctggcagataatgttaatttcaatggcatgaagatacaaggaactgccaatgtaagcataggaagcaatttccactctggaatcgactgtatgataatcacagacagccataactatgagggggaagcgattccttatgatgagactgtcatttcaaaggatgttgttattgaagataatgtatggattggaaatcgtgtaataattcttccaggagtctgtattggtgaaggggctataattcaggctggaagcgttgtggtaaaggacattcctaaatgtgcaattgctggaggtcatccggcaaaggtattttcttctagagataaggagcattatgaaaaattaaaagaagaaggtaagtttcattaa

SEQ ID NO: 1880 - DNA, 1986 bp, Methanobrevibacter ruminantium
  source 1..1986: mol_type = genomic DNA
atgaaggttgtagtatgtgagaactgtggtgcaaaatatcaattaaatgatgatgatgatattaatgcatttgaatgttccaattgttctggaagtttaaaagaacttgaaagcttttcagatgaagagattcctaaacaatctgatgaatcatctggatctgattcagttcttgtttattgtataaattgtggtttaaaattccagattgaaaaagatgacaatatcaatgattttgaatgtgcaagctgtggaggtcctttagattatctttccaataaatctgaagaatctcaagagtctcaaatctctcaagactctcaaggttctgatagttattatgaaactgtttcttatgttcaatctgatgacatcattcctattcatgccgaccctaattattctgattctgatgacatcattcctattcatgcagaatccgattcccaaaccccatattacgaagaacttatagaatctgatgaaatttatgcaaatcaatacgaagatgatgatcaatactatgtaagcgaatatgagaaagttcttcaatctgatgctgattcctactatgaagacgaatatgacgatcaatactaccaaacagaccttcaagaagaaggctcaggtcaaatcagcttagatgagctttattatacttcagaatatcctgcttatgatggaactgatgaaattattcctattcatgctgaaaaaagatatatggaagattcacaggattcaggatttgcatatggtcctaatggaaaatacgctgaagactacttagaggaagagtatattgaagaggagtatgttgattctgtcgaagaggaatctccttatgtagaggttatagacataccagaggatgagttgccagaaactcctgttgttttaacaaggcaagtcctatctgaagaggatcaaaggctatttgacagggttcaaaaccaaatggtatttgacagccctgaagaatatgaggcatttaaggcagccagatacaaatattatgtaggattattggatatccttaaggaggaatatctcctttcaatggaaaatgaattcaagtctggccgttcagttaaaaacctaatcaaaaaaggcggagagacagttaagcaaagcaatttatatgctgacgattctgattcattggtctcacctgaaactgtggaattgatgaaatcaaatcgcaaatatgagcctaaaaagtccaatgctgatgttataatcatagcaggattttttatagttatagtttcccttgcttactatttctttgtaagccaaataatgtatgttctcattgcatttgcattaggtttggttattttggcctatggcgcttataagaaatatgtcttcaatgaatatattgcaagaggcagaatcatccgtgaaaggttgcttgcccttccaaatgatttctatgtattctatgcagttcagccaccacaatcaaaggacattataaatcacgttgttgttggacctactggaatatttacaattctctctcaaagatatgattcaaaggattataagaataagcttaagtctgacactgaaacaggagatatgttaagcgaatccgcttccattcaagactataggcaaaagaagaatactctagagcttcagactgattatgatgacaatcaatcaagattccaatttggtaatgaagagattcatttcactcaaaacagccaaatcaaacgtaaggcattggaattaaatgaagacttggctattttccttgataagaaaggattcaatggaatctatattgagccattgatcggttttgtaaatgatgatttggccatattgaatgtaattctaaccaatgaggaccttttcattgatgagctattcaataaggtaattcgtggaagaaaaagattggatgagcttacagttgctaaaatagcaaggctactttcttattattctgcaaactgtgatgtatattaa

SEQ ID NO: 1881 - DNA, 1173 bp, Methanobrevibacter ruminantium
  source 1..1173: mol_type = genomic DNA
atgaatattttacatgtggctcatttcttctatccatgtctgtctgctggaggagtagttaatgcaagttatcaaattgctttaaatcaagtaaaagataataatgtgcatgtttacacatcagactcctgtaagcagcgattgaaatttgaagatggtcgttatgatgtagatgtggatggaattaaagttgattactttagaaatctgtcaaacagatttaaattagctaccatgttagacactccactttccgcttattttagaattagaaaggatataaaaaatcatgacatcattcatattcacgaacataggcagaccttagctattttagtaagccattatgctcgaaaaaacaatattccatatattgttcaggcccatggatctgtacttcctttcttccaaaaggaaggattaaaaaacatttttgataaggcatttggatttaagatacttcataatgcatcttgtgtatttgcccttactgaagtggaaaaggagcaatacattaaaatgggagtctctgaagacaagattgaaatagtccctttgggaataaatattgaagagtatgagaatttgccagaacctggaaagttccgttcaaggttcaatattgctgatggggataagctgattctgtttgttggaagaatccatgaaatcaaaggccttgatctattgattgatgcctttaatcttttaattaaggatagttcttcccctataaagttagctattgtagggccagatgatggctatttggacactttgaatgaaaggatagcagagaataatctggaatctcaagtaattattacaggacctttgtataaaagagaaaagcatgaagctttagtggactgtgacttgtttgtaatgccttcaaaatatgaatcctttacaacaagtgggcttgaggcaatggcttgtggcaagccattggttttaaccaaaaacaatcatattcatgattgggttgatggaaatgtaggcatttcctgtgatgatgatgaaatttctctaaaggaagctatgaaaaaacttttatttgatgatgatttatcagaaacatttagttcaaatggtaaaaaattaattaaagaaaaatacaattgggatatgattaatgaacagattttaagtatttataatagatttatctaa

SEQ ID NO: 1882 - DNA, 1788 bp, Methanobrevibacter ruminantium
  source 1..1788: mol_type = genomic DNA
atgatgttttctaatatttccaaggatttaaatattgaaagaaaggattatttatgcctattccttttattggtctatagcgcaataataactgtccttttaatcaatttcaatgaaagtattggaatatattgttcagatgtctatatctatctttataattcccttgtatttgcccgaatgggctataacaacacttatctatatctctctcctttggattttggtcttgtggaacttcattttttatttagactcggttttgtgaatgaagtgtccatttatgctgttactggtgtattttcaatctttggaagcttaggaatttatgttttgctgaaaaggtatttcaattctcttttaagccttgccggaggagtgctttttacaagcttttcattgaatctgctttggtgggcaaatggaactttagacttgcctgctgtaggattgtctgtttgggcgattctatttttaatccttgcagttgatgagagtccaaaatattatatcctttcatttgtctttttggtcttaagcatcttcactcgctacacctgtctctttctgattccattgtttttgctctattacttatctaaacatgatttgtttggctttttagattcattaatctccgatagaaaagaagccttttcaagtctaagatcatttttaaaaactgaagagttcagatatcttatgattgcattggttctggctttgattgttgctgtgcttttcatttcagtgattttatattatggggctgaactttcatttctagagcagggaagcacattcgcttcaggttcaaagggagcattggatgattatgcacatactacagataccttattctacttccatgactttttaaactttttattctcccaaaaggtgattttccaggagaatttcattccaacccttaccggcgcaagctatcttgcttatttgattctatttatattgataattggaatttcactgggtatttatagatttttcaataagaacaaatcagaggataaaaagcaatttgataatgttaattcttcaatttcaaatcttaaggaattttcttttaagacaagccattttaaaacacttttgtatattggattgttactttcattggctattgccattttaggattcaagataaattcaataatcacaattgcatttctattgatagggctggttatcatattttccttgctaaagtctaagggtcttgatagaaaagactattctgtccctatttttatgataggatggtttttagtctatttcatattctttacctttttaaacataaaggtgaataggtatataattacagttttcccagcattcatctattttgtaattctggctttaaatgaaattattgggcttttagacggcaaatctttaaagattggtgacttgaatttgtcaaatataattccaatagtgttgattgtattgtgcatgttttctgcattttcatttacaagcacttttgaggataatttagactttaatgactataagatagttgcagattatttgattgattatgatggggattatgcatcaaaggacattgctgtatttaagcaaagaacctttaattggtggttaaaggattccactattgctgttaccacagatcagttggatttcttggaatcaagcaatataacttactatatctgtgatgaagacttaaaactggagaactatacaaagatttataattataaagacatattcttatatgaaagagtaaataattag

SEQ ID NO: 1883 - DNA, 882 bp, Methanobrevibacter ruminantium
  source 1..882: mol_type = genomic DNA
atgaacccatatttagaaattattaggccgggaaatgcagttatggcagccatatcggttgtcttaatgatgattgtaggccattattacgacttgccaatcattctttgtgcagttatcgtctttgtttgcactggcgctggaaatacaatcaatgatgtattcgattataagatagatgaaatcaataagccaaacagaccaataccttcaggaagaatcagtctgaagaatgcaagaaactattcctaccttctttttgcaatcggaatcatcctaagctttgtgattgattatatgatcaattccatatggccttctgtaattgtcgttccagcagttgtaatcatgtatctttatgcaagaaaccttaaggcaatgcctttgattggaaacatcacagttgcaaccttaacagggttctgctttgtaattgcaggaactgtaatagcttgtgctacctcctctttaaggatattgtttatttcaatttatttgggattgtttgcactatttatgactttggcacgtgagattgtaaaggatatggaagatattgaaggtgacaagctagagggagcaagaacatttcctatattatatgggaaaaagattccttccatcgtttcaatcattctaatcgttgtaaccactttgatgtgtccggttctttatatatttggaatctttaatgttttctatatgattgtgatgatagttccaatatgcatgttcctatactgcgcttatagtttgaagcttaatcccccagaggaagtttgtgcaaaggtctctaagaatctaaagatagctatgctaataagctttgttgcttttgttttaggttcatttgattggtttagcatttttgctgctctttaa

SEQ ID NO: 1884 - DNA, 1371 bp, Methanobrevibacter ruminantium
  source 1..1371: mol_type = genomic DNA
atgaagaaagttattctaatagcattttattttaatcaggtaaatgaaatagcttctaagcgtttaagggctttagctaaatatttgcctcaatttggctgggaagttgttgtaatagttccagatttaggttatgaaccttcctcaaatgcagatttaagctctagaataataactactgaatatgaagacatgttttcccatatatttactaagtttaagcctggagataaaagcaagcttaatgataaatcagataatcattccacctcagacagtcaaaagctaaaggattcctcttctgtttctaatccaattgcctcaaaggcaatctctatagctggagaagtctttgcatatcctgatggaatgaagtattggtatggtcctgcttatgaagcagcttccaagatagttgaagaagaaaagatagatgccataattagctcctcttggccgattacatgccatacaatagcaaaggacatcagcgataaatataatattccttggatagctgatttaagggacttatggaatatggatccttatatttcacacacttttattagggattattttgaaaaaagattagaattgaagacatttgaaaatacggatgtattgacaactacaacagatttggctgctaaaacattagcaacattgcatcccaataatcgtatagtgcctattttatctggttacgatgaagatgactttaagtttttagagagtgttttagaggaaaataatgattctgattctagtgaagattctgtttctgctggggattctaattctagtgaaggttctgtttctgccgagaattctaattctagtgaagattctatcactacagttgattcaactgatagaaaacttaaacttatctatgcaggttccttatatggtgggaaaagagatccaacattattatttaaggccattcgccaattagaagacgaatctaaattggatagttcaaatatttccatagagttctatggagatagcggcaatctggaagagattgctcgtgaatattctctgcttgatattatcaaaatcggtggcaggatctcccacgaagaggttttaaaaaagcaattagacagtgatgttcttttactcatatcatggaataatgaaaaggagaaaatgtttattccaggtaagatctatgagtattttgctttgcaaaagccagttctatcaatagggtataaggaaggatcccttaaggacttgatagaggataccaatgtaggatatcatgtctcagatttagaatctacaaaaaaggttattttagatatttataatgaatttataagccttggcaaggtggaatttaaaatcagaaattaa

SEQ ID NO: 1885 - DNA, 1095 bp, Methanobrevibacter ruminantium
  source 1..1095: mol_type = genomic DNA
atgagtaaaattaaaattgcgattgtaggaatcggaaactgtgcaagctctcttatacaagggatttactattataaagataaaaaccctgaagatgcaattggacttatgcattggaaaataggagaatgggacccaacagacattgaagtggtagctgcttttgacattgacaaacgaaaagtgggaaaaaccattgatgaagccatctttgcaaagccaaactgcaccactgtattccaagaggaaattcctaaaagtgatgttaaagtttgcatgggacctgtccttgatggtgtaagcgaacatatggctgactttgaagaggattatacctttgtagtggcagatgaagaaccagttgacgttgttgaagtcttaaaggaaagcggtgcagaaatcttgctcagttacctgccagtaggttcagaggaagctgccagattctatgctcaatgtgcattggatgcaaatattgcttatatcaattgtatgccagtatttattgtaagtgacccagaatgggatgctaaatttagagaaaaaggaattcctattgtaggtgatgatattaaagcacaaatcggtgcaaccattactcatagaacattaagcaatctctttaaagaaagaggagttaaattagatcatacttatcagataaacaccggaggaaataccgatttcatgaacatgcttaaccgtaaacgtttagactctaaaaaggaatctaaaactgaagctgttcaagcggtccttgctgaaagaatggaccctcatgacatccatatcggcccaagcgattatgtgccatggcaaaaggacaataaggtatgtttcttaagaatggaaggcagaacctttggtgacgttcctatggaaattgagttaagattaagtgtggaagactcaccaaactctgcaggatgtgttattgatgctattcgctgctgtaaattaggtttggaaagaggaattggtggacagctaacttctatctcttcctatgttatgaaacatccacctgaacaatttacagatgatgaagctgctgcaaaagtagaggcatttatcaaaggcgaaattgaacgttaa

SEQ ID NO: 1886 - DNA, 1722 bp, Methanobrevibacter ruminantium
  source 1..1722: mol_type = genomic DNA
atgaaagtaaaaataactgaaaccgcattcagagatgctcaccaatcccttttagcaaccagaatgagaacaagagatatggttcctattgctgaagagatggataaagtaggatatcatgcaattgaagcatggggcggagcaacctttgacacttgtataagatttttaaacgaagatccatgggaaagacttagaatattaaaagaaaactttaccaacactcctctacaaatgctcttaagaggtcaaaacttactcggatacaaacattatgcagatgacattgtaaccaaattcgtagagaaatcctatgagaacggtgttgacatctttagaatattcgatgctatgaacgatattagaaacatggaacaatccattaaggtagctaaggctcaaggagctcatgttcaaggaacaatcagctacacaatcagcccagttcatactgtagacaagtttgtggaatttgctaaagagcttgaagcattggaatgtgattcaatagccattaaggatatggcaggtttaatcagtcctgctgttgtctttgaattggtttcaagattaaaggaagaaactgacttgcttgtcaacttgcattcacactgtacaagcggtatcactccaatcagttattacgctgcttgtcaagccggagttgacattttagacactgcaatctctccattggcttggggtacttcacagcctcctaccgaaagtattgtagcatccctgcaaggaactgaatatgataccggattggaccttaagacattaaaccaaatcaagaaatactttgaaacccttagggcaaaatacgaaggctatattgacccaatcagtgaaagaatcgacactgacgtattgatgtatcaaatccctggaggaatgctttccaacttaatttcacaattaaaacagcaaaacgcattggacagataccaagacgtattggaagaaatgcctcgcgtaagagaggatatgggatatcctccacttgtaactccaacaagccagattgtaggtattcaagctgtaatgaatgtaatcaatggagaaagatacaaaatcgtatctaacgaagttaaagattatatgaaaggttactatggccgtgctccagcaccaatcaatgaagaaatcgccaaaaagatcattggtgatgaagagcgtatcacctgcagacctgcagacttgattgagcctgaatatgacaagttcaagaaagaggctgaagaccttaagaacttcgagaaggaagaggatgttctcacccttgcaatgttacctccagtagctaagcaattccttaacggagaaatcaaggaagaagacttcccagagaaaaaggttatagatgatggcggaatcagtgccattcctactgaatactctgtagaggttgatggtgatgtctttgatgtaaagatcatgccaaccggatacataaagattgatggagaaggcagtgagccagctccagttatcgaaggtgctattactgcatccatgcaaggtatggttcttaaaatcaaggtaaacactggagataaagtacaaaaaggctctgttgtagcagttcttgaagctatgaagatggaaaacgatatttatgccgaagaggatggtattgttgaacaaatattcgtagaagaaggagacactgttaacgcaggagataatataatggtaattaaaggattagatgaataa

SEQ ID NO: 1887 - DNA, 606 bp, Methanobrevibacter ruminantium
  source 1..606: mol_type = genomic DNA
atggataaaagaataaattttgtatcaatctctagatttaccctccttgtggctatttttctattgataataaataagatacagtttcatgcaaagattttagattatatggccttagctttagccatatttgctataatttgtattatcatctttatcatacaatttaaaaagggattggttgagtttcctattaaagttgttgttgaaactaatgttgataaggctttggctgatggggctattactgaagagcaagcggaaaatattccaaagagggttgttcttaatgcaaacgatatctttttaaatttagtctttaatcttgcaattgccaatcattttgatctcttgcctgtagacgttcttagggagtatataccagacattcctccagctaatcttatgagattgtatgaaaagtctagagagataagtgatgatttgaatgattactttaggtctcaaaagttcttaaataaggccgatgttattacccgttctgatgagataaaaacatatttgagagagacttatccttggatggatgatgttactttggataatacttttgattacttctttttaggaattggtaatggataa

SEQ ID NO: 1888 - DNA, 1275 bp, Methanobrevibacter ruminantium
  source 1..1275: mol_type = genomic DNA
atggtttttattattgaccctcaaaatgcaggaatatctgggaatatgattattggagctcttgttgatttgggagcagatggcgaaaaggtcaagaaccttatggaagatgtggcttacgactttggagaggtagaggtttccataactaaagtcaataagtcaggtatcgaagctaacttctgcaatgttaaaacaatccatgatgaagatgaaaataatcatcatattcattttccagactttattgataagattgattcactaaaggagcttgatattgaaaacttgactgatgaaatcttggatatggctaaaaatgtctttaagcgcatagccatttctgaatctagagttcatggaaaatctttggaggaagttcattttcatgaggtcggggcagctgatgctgtggcagacgttttaggtgcaatctgcgcttattttgacttggatatggacaaggaaagggttgttggattgcctatttctgttggaggaggcactgtaaagacagcccatggaataatccctgttccggcacctgcaagcttggatattcttaaaggcttgaatgaggatgaattcaatgacttctataagggagaggcacaatgccgaggagggcctgttgaaagcgagcttgcaacacctactggttgcgcattgtatatggaattctgtgatgaattccttgagtttgctccaatgatgtctccagagagaatcgcctatggctgcggctctaaggaatttgatttccctaatgtcataagagtcataaagtcaaaggatacaaatgagaagcatagagtttgtgttattgaaaccaatatagatcatatgtctggggaagaattaggattcctatttgacttgttgcttgatgctggagcttccgatgtttctatggttccaatagtgatgaagaagaataggccagggcaattgattaaggttatctcaaagccacttcttgtagatcatctagtgaatatattatttaagcaaaccggaacattaggcattagggtttctgaaaacactcataggggaattgctgaaaggcattttgttcctttagacattaatattaatgataggatttataccattaactttaagataggtcttattggggatgagattatttcccataggccagagtatgaagaccttaaaagaatctctttagaagaggacattcctttaacagagattaaggaagttgcaaatacaatgattcgtgattttttagagaataatagagaataa

SEQ ID NO: 1889 - DNA, 1218 bp, Methanobrevibacter ruminantium
  source 1..1218: mol_type = genomic DNA
ttgtctaaaaaaaataaggctaataaaaacaagaaaaagaaagaaagtgaccaaaccattcatgaattagagattggaaaactgattaaaaacgaagatgtgctatacataaacaatccagattactttctgacattcagcgacctggagataagcgatggaatagacataattgaaaacatcatgattctctctaaagattatgttagctttaataggcaatatgaagatgaaaagattagtgacgttgaactgatggaaattactgaagaatataaggaaaacaacaatatagaaggaggatacataagccaaagctttgataactcccaattcatcataaattcctacaatgacataacaataatcacagtaatttctaacgatttggaagtccagaagttcacagacaatctgaaagttgtaaacagctggaaaggattccacaatgcaaagataaactttggacagatcattctaatagaccatgcattaagccctaagctgctcattcagctttataagaccgcaacaaagcaaaaggcaaaattctttgaatcccttcacatgcccctccatataaacaatatcctaaacaatgaagatttcttggttattgcttccaatctgccagaagagaccttaaatcaggattatataatggaaataggattggacatcacaaatatggaatatgaagatgacaaactggaccttgaagagtttcaagaaagaattgaagatggggtcaccataagctgcgaggacgcaataagaaagatcaatctgaatattggaattctagattactttgttagcgaaggaattttaattggagatttggtagagcttggaatggaacttttagaaaacacagagcctacagatgagctaaaggaaaagctgaaaaagcaattgcttaaatctgtcagtgacagaaacattaatgcattgattatggctgcaatacgactggaagatgattttagaaagcaaagagttcgtgagatagatttaaatgaaaaattagttcatttctatccagatgagattattggagtagcaatagccaatcaaatatccggaactaaaggagtcttaaattacagaagatattcaaggcataaaccaggtatcttgtatggattaggccctatattatccaatacctttgcaggacttgttgcaggttgtatgactaaaatattggaagaataa

SEQ ID NO: 1890 - DNA, 837 bp, Methanobrevibacter ruminantium
  source 1..837: mol_type = genomic DNA
atgaaagaaaaaaacaatgatgactattttgaaaagcaaaacccttccattttacgctcaattggaggattattcacattttcaaccatcctgccattaaatatctacacaacaattgatgaaatggcaaaaatgacatggttctggccagtattaaatggaattgttggtttgatagctgcaatcatcgcatttatcctatgcagatttgcacatttggacggattggtcattggagcaataatttatggattcctattaataatcaacggatataatcactttgacggattgatggactttggagatggagtaatggttcatggagatcctgaaaagaaattaaggattatgaaggacccgatgactggagttggcggaatagccacaggatttatcgtcggaactataacaattgcattatattcatcattgattgattattcctatatgataagcccagatttcattttgctaatcatagttgctgaaattgcagcaaagataggattaacaacctgttgcatcacttcaaaagcaggaaaagaaggaataggcaaatactttataaaatatatgaatattaagaactatattgttggacttataatttgcttaatcattgcatccttacttagcatgaggataggatcccagataggaattttaggaataatcggaggagcatttggaggtgctttaactgcactaattgcaaaaagacatcttaagattgcaaatggagatgttcttggaacttctaatgaactaggaaggttattttcattgcttgcgatgctaattgcaatttcaatgcattttagtgtattaatataa

SEQ ID NO: 1891 - DNA, 558 bp, Methanobrevibacter ruminantium
  source 1..558: mol_type = genomic DNA
atgacaataaacgttttaagattagatcacagaattggaagagacacacgtattacaacccatgtatgcctaactgcaagagctttcggagcaagcaaagtatggttagcaggtgaagaggaccacagcatgatgagaagcgttagagacattgcagacagatggggaggagactttgaaatcgaatataacaattcatatatggaagtcataatgaactggagagaaaaaggtggaaagatagttcatttgaccatgtatggtgcacaggcccatgaggttgtagatgaagtgcgtgaaagctctgatgacattttaattatagtgggcggagcgaaagtgcctacaaaagtatataaaaacgcagactggaatgtttctgtaaccacacagcctcactctgaagttgcagcacttgcaattttccaacatttattgatggaaggaaaagagtttgacttggaatttaaagaccctgtatttgaggttattccaacagcccatggaaaaacagtaaatgttcataatgaaaatagaaaattaaataaaaaagaataa

SEQ ID NO: 1892 - DNA, 1122 bp, Methanobrevibacter ruminantium
  source 1..1122: mol_type = genomic DNA
atgcaaagaagaggtacaaccaatctgccactacatggaggtcatacgccacgttggctatttgatcgtatgaccaagctttcaggtgcaattactgaagtagtaattgacgaatatggtcctaatgaatttttaaacagaatctctaatccttactggtttcaggctttttcctgtgttctgggctttgattggcactcttcaggtacaaccaccacaacccttggagcgttaaagtcttcaattgaccctgaaaagcatggaatttacatctctggcggaaagggctctgcttcacgaaagacccctcaagggattgtaagggctggcgagatattcaatctaaaaagctctcatgtggataatatggtaaactccagcaaattatctgcaaaggttgataattcctgcattcaggatggctatacattatatgttcataatttcttcataaccgaaaagggagattgggctgttgtgcaacagggaatgaacactgaaacaaagtatgctaggcgctatcattggatgggggagaatgtagacagtttcctgcaagaccctcataatggaatttcctgcgataaaaaggaaaaggaagctttgaatatggcttcaaaggatagtgttgaggctcaaaagataagcgttgatttaatcaatgacaatcctaaccatttaagggactattttaaaagaaaagattcaaatcagcttcttttaactgatttcagcattagccaagagaatacccttacccttcctcctcatcatcaggtattggatatggatttgtctgataaggaatttcaagtattaaagaatgcttgggaaatacagcctgagaattatgaagagcttattttattaaatggaataggtcctaaaaagattagggcattggcattgatttctgatttggtatttggtgagcctgcaagctggaaggatcctgttaaatacacattcagtcatggaggcaaggatggatttccttatcctgtggatagggatgtctatgacaattcaattgcaactgttaaggatgctctttatcaggcaaaattagataagtatgataagatgaaggccttaaagagattggatgattttatttcttaa

SEQ ID NO: 1893 - DNA, 501 bp, Methanobrevibacter ruminantium
  source 1..501: mol_type = genomic DNA
atgaaaagaataactactccaattagtgatgatgatattaatgatttaaaaataggggataagatttctctttcaggaaaaatgtattgtggaagagatgcagttttgcctaaattatccaaatctattgaaaatggccaagaggataagtatccatttgattttaaaggcatggcaattatgcatactgcatttagtgtagcaggtatagctccaactacaagcaataaggcagaaattgaatcttctatggaagcattatcatctgctggagttaaatttcatataggtaaaggttccttatctgatgagactaaaaaaactttggataaatataattctatttttattgtaactcctcctgttgctgcacttttaacaaataatgtaatttctaaaaagtgcgtcgcatatgaagaagaaggtatggaggccttctttgagctggaagttaaggatattccaggtattgtagcaattgctcatggaaagtctttataa

SEQ ID NO: 1894 - DNA, 1167 bp, Methanobrevibacter ruminantium
  source 1..1167: mol_type = genomic DNA
atgaataaggaacctattagcgaagaagaaatttttaaggaattggatttttaccaatctcaagattgcaaatattcagatggtagaattcttggatctatgtgtactcaagcacatcctattgctcaaaaagcttttattcaatttttagaatctaatcttggagaccctggtctttttaaaggaacaaaagccattgaagataaggttttaaaaatgattggttctttcttatccattgagaatcctgttggccacattgtaactggaggaactgaagccaatattatggccattagggctgcacgtaatattgcccgtgatgaaaaaggaataagtcaaggagaaatcatcgttcctcaatctgctcatttctcatttaaaaaggcctcagacattttaaatcttaagcttagggaaatcgttttagatgattcctatcagttggacgctagttttgtagaggatgaaatcaatgaaaacactgtagctattgtaggagttgcaggaactacagaacttggaatgattgaccctattgaagaattgtctaatattgctttggaaaataacattcacttgcatgttgatgcagcctttggaggattttccatacctttccttaaagagataggatatggccttccagaatttgacttttcattgaagggagtcaagtccataacagtggatcctcataagatggggcttgcccctattccagctgggggaatcctatttagaaatgaagagtatttagactccattagtgtaaattctccttatctaaccataaaacatcaatccacaattgtaggaacaaggatgggagcaacatctgctgccacttttgctgttatgaagtatttaggaaaggatggctatgcaagattagctaaggaatctttagataatgcaatatttttagcagagtcagttaagcagttaggttatgagttggtagtagagcctaaattgaatattgtggcattcaatcatcctaaacttgaaacagatgacttggcccaattgattgagaagagagattggaaagtctcttgctcatcttgtcctaaggcgataagagtaattttaatgaatcatattaaaagagagcatatcgttgaacttatatcagacttaaaagacatttctgaatctatttag

SEQ ID NO: 1895 - DNA, 2271 bp, Methanobrevibacter ruminantium
  source 1..2271: mol_type = genomic DNA
atgtatgttataaagtttgaagacttaggtaaagatgacatcggtattgctggtggaaaaggtgctaatttaggagaattgactcaagcaggcattcctgttcctccaggatttgtagtaacatccgaaacttataagaagttcatgatggatacaggaattttcaatagtgttatggatatattggaccaaactgatatcaacaacactaaagagctccaagaggctgctgaagaaatcaagagaatcgttatcgaaactccaattccagaagacatttccacttacatcattgaagcttacaatcaattatcccaaaaggtcggcgtagatgaagctgatgtggctattcgttcttccgctactgctgaagacttgcctgaagcttcctttgcaggtcagcaagacactttcttgcacgttcaaggaattgacaatgtaatcgaatatgtaagaaaatgttgggcttccctttttgaagcaagagctatcttctacagggaagagaacaactttgaacactctcaagtttacattgcagttgtagttcaacaaatggtcgattctgaaaaggcaggagtaatgtttaccgtaaacccatccactggtgaaaacattgccttaatcgaaggatcttggggacttggtgaatctgttgtcagtggaactgtaactcctgataactatgttgtctcaaaggaaaacaatgaattgttgaatatcactgtcagtgataagaaaaccatgtttaccaatgacgaaaatggaacctccattcaagtggacgtccctgaagataagagaaatgaaagggtcttatctgatgaggaattagaaaaattagttgaaatggctaaaagggttgaaggtcattacggcaaacctcaagacaccgaatgggctttccatggcggaaacctattcctattgcaatcaagaccaattaccactcttggagacgctgaagaaaaagcttctgaagaggatgttgacttagaagtattgattaaaggtctcggtgcaagtccaggacttgcttccggtactgtaaaggttatcttaagccttgatgagcttgacaaggttcaagaaggtgatgtgatggtcactaccatgaccactccagacatggtacctgctatgaaaagggcaaacggtatcgtaaccgatgaaggtggagtaacctgtcacgcagctatcatctcaagggaacttggaattccttgtgttgtaggtactggagatgctaccaccacattaaaggaaaacgacaaggtaactgctgacggtaagaaaggtttagtctacaaaggaatcatcaaaggagaagaacctgctgaagcagctgcagtacaagtttctgcaactcctttaatcactgtaaccgaagtaaaggctaatgtaagtatggctgaagcagctcctaaggcagcagcaactggtgctgatggtgtaggattacttagaaccgagcacatgatgttatccactggcgttcacccaagaaaattcatcttagatggcgaagaagacaaattagtggatgttatcgctgaaggcgtattgaaagttgcagatgaattctatccaaaaccagtatggtacagaactcttgacgctcctaccgatgagtttatcacccttgaaggtggagaggatgagccaagggaacacaacccaatgctcggttggagaggtatcagaagagaattggatgagcctgaaatcctaaaggctgaattcaaggctatcaaaaagcttcacgataaaggttacacaaacattggaatcatgattccattgtcacaacacccatctgagcttagaagagcaaaggaaatctgcagagaagttggcttggaacctcaagtggatgttgaattcggtatgatggttgaaattccagcggcagctattctcattgatgaatacattgcagaaggaattgactttgtaagccttggaaccaatgacttgacccaatacactcttgcagtggaccgtaacaatgaatttgttgcaaaacactacagagaagagcacccagcagtaatggcattgattgaaagaacaatcaagcactgtgcggcagcaggtgtaacatgcagtatctgcggtcaagcaggaagtgtgcctcatattgttgaaaagcttgttaagtttggaattacaagtgtttcatctaatactgatgctgttgaagaggttagaaagactgttgcaagagctgaaaagaaaatcatgctcgatgcagctagaaaacaattataa

SEQ ID NO: 1896 - DNA, 483 bp, Methanobrevibacter ruminantium
  source 1..483: mol_type = genomic DNA
atggttcgtgcttattcaagaagagaatatattagaaaaataccaaataacagaattgttcaatatgatatgggtaatttatctgaagatttccctgtaagattatctttagctgttaaaaaaccagctcaaattagacacaatgctttagaagcagctcgtattgcttccaacagatacatgcaaagatctgctggtagattaggataccacttaaagttaagagtatatcctcacaatatcgtaagggaaaaccctatggctaccggagcaggagcggacagggttcaaagtggtatgagaaatgcattcggtaaggctatcagtgtagaagctcttgtaaagaccaatcaaaaggttatgtctattgacgtaaaccctaaaaacttcgaagatgctaaagttgctttaaaaagagctggaatgaaattacctgtttcctgtaaaattgttgtagaaaaaggtgctgaattaattaaataa

SEQ ID NO: 1897 - DNA, 237 bp, Methanobrevibacter ruminantium
  source 1..237: mol_type = genomic DNA
atgaaaataaaatcaaatataagacttaaatataataattcaaaaaatgctgaaattgtatataaatctttagaagtggataatgagggatttttagaatctgaattaaattcagatgaaatagaatacaatatcaaaagcgacaagcttggaagttttttaaatactgcagatgatttaatagcttctgagatattaatagaggatccttttaaaaaacaacctaaaaaagattag

SEQ ID NO: 1898 - DNA, 1230 bp, Methanobrevibacter ruminantium
  source 1..1230: mol_type = genomic DNA
atggaatgttataatcaccctgatagagaagcagtcactacttgttctgtttgtggaaaggccgtctgtccagattgtgctatggaaattgcaggaaatgtctactgtaaagattgtgttaatgaaattgtaacacaaagcataatggaaaaggcaagcactcaagctcctaaagaggcagccgaaccaataactgaagaagttcaagaagctgaagcagttgaagaagctatcgaagagcctgttgaaatcatcactcctgttcaacaagaggaagttgaagagattatcccagaaactccgaaaaaagctcctgaaaactttgagcctgaagttgaatacgaaacagaatatgtagagacatatgatgaagacggtgtggaagacagctattatgaaaatcctgaaataattccagaacctgaacctgagtataaggaaagagaaagaattgttaaagaggaagcaaaagctaaagaggaagaggaaataattgagccagttcataaaactgaagacattccaaaagaagcctatatggatgatatggaagcagacttttatgaggaacaacctagcaaagctccaagtaaggaccttgaagccaaatatgagaaatatttggaagacctttattacgatgaagatgaaatagaggaagaaatttacgaagctccaaaaactcaaaaaagacgttcaaaacctagaagacctcaaagagaagatagttactatgatgaagaccataaaagaagtcctagaaactattccaaccaaggagaatactacatcaaccctagagaagaagaatttgaggaagaagaatttatcactccaagccatagcagaaaaagagctagaagcgaagaaactgaaagctatgaagagttaaaaagaagaatcgaaagaaattatgctaaagagcaagaagctaaagaaaatcgtagattcagaaggtctaaaaagtctaaaaaacaaaaaagacctgactatgaatatgatgaattagaaaacatacaagaaatgcactcattcccagagtatgaaaaagaggataagattggtatcttagatattatcttagcaataatccttattgttttaattatactgcttatattgtatgttatttatttattcagattaaatggagagtacttcagctttattgactcacttttaggattagtcagagatcctagcggttatataagctatgtacttaactaa

SEQ ID NO: 1899 - DNA, 771 bp, Methanobrevibacter ruminantium
  source 1..771: mol_type = genomic DNA
atggcaatccaagatggtgactttgtaagagtagactttactggtagtattaaagaaactgatgaaatttttgataccacttctgaagacattgctgaagaagctggtattttagtagaaaataaaaaatatggtccaattccaatcattgtaggtggaaatcatttattacctgcaattgaagaggcaattatcggatctgaagctggtgaatctgttcatgtatcagtcactcctgaaaacggtttcggtcaaagaaaccctaatttaattcaattaattcctatgaaagagtttaaaaaacaaggcatgactcctgtaagaggcatgaaaatcagcactgaaaacggtaacggtaaaatcatttctgtaaatggcggaagagtaaaagttgatttcaaccatgatttagctggtaaaaacttagaatatgatgtaactgttgtagaactcattgaagatgatgaagaaaaaattaaaagcatgattgagttacattactcctatcctaatatggattatgataatattgaaattaaattcgatggaagcaccgtttctattaaattagatgagatcactagattcgatcaacaatcctatatggatgtaacttttgctagattcagaatttctaaagacatttgggacaatatggattacgaaaaagttcaattcgtagacgaatttgaaaaaatcgtagaagaagctcctgatgaagaagtagaagcagaagtagaaactgaagtagaagcagatgcagaagaataa

SEQ ID NO: 1900 - DNA, 1188 bp, Methanobrevibacter ruminantium
  source 1..1188: mol_type = genomic DNA
atgccttcaattgattttataagaaatattcttaaagaagataagaaaacattttgcaatgattataaaaaagctcaaaagtctttatctgatgatgatggatattctaatggctcttcacagtcaaaacagtcttatgaaaaaactaatgaagaatctacatccaatcctttaattgcagactttactgagtattctccccttcataatggtcattttcattgcatgaaaacagcaaagtctaaaattccaaacggtctttttgttgctattgttccaggtctttttgagcgaagcggtcggggattgccttatatcatgcatagaaatgtccgggcagaaatagctattgaagttggggcagatattgttgttgaaggacctccaatgggaataatgggatccggccaatattcattatgcttatgcaagatgtttcaagctttaaacacagatttcattccacgaggctataggccttttgatggctatgatgaaatcttaaaaagaatttctatgggacatggtgtagctccaaaaccttataaaatcgttgatatggatacaaaagaaactattcttgaaggaaagcttgaggaagacaattatgttatcgtttccttttccaaatctttaaaaagaataggctttgattttaaggataaatttatttttgtccctcgtattgaaggtgttagcggaactttaattcgaaaagcctgctccgaaaacaaattggaagatgtagagtcaatgcttcctccggaaacattaagaattttaaaaagagaattggataatgataatgctcctttacatgatcagcgagattatgaagtgattttaaactcagcaaacaacttgtcctatgatgagctaattaaattaaacttcttcagtgaaaaattggctaatgaatttattgaaaaacgggaaaataaggagtttgaatctatctctgaaatagaggatgctattttttatggatttagcagccattataaaaatagggttttaagcattttggaaactcaaatgagaggggatgtcatctctaattatattaatacctatccatttaatgttagggttttaaattataagaatgagacagttttaacccaatttgaggaaaaggttttaaatgatcatccttttgtaaattcaattgaattgactaatgaataa

SEQ ID NO: 1901 - DNA, 198 bp, Methanobrevibacter ruminantium
  source 1..198: mol_type = genomic DNA
atgtctgaagaaacaaagattaaacgagtaactatacatgttgaaagtgagttagattatgaatttaggcgattagcttctcagaagtttcgatttgagccgaaatggtacagtaaggcgattaaggaagccattttgttatggattgagaataatccagaagaggactttgaagaccttcctgaagaagatacttga

SEQ ID NO: 1902 - DNA, 1254 bp, Methanobrevibacter ruminantium
  source 1..1254: mol_type = genomic DNA
atgtttgatttggtcttaaaaaacttaaagcttgtaggagagtctggagaattttatattgctattcaggatggaaagatagcaaagatgtctaaaactccaatttcagcagataacgagatggatattaaaggacaatatgtcttgccaggacttatagaccctcatgttcactttagagaccctggactcacctataaagaagattttaaaacaggttctatggcagcagccaatggaggatttacctttgttatggatatgcctaatactcttcctaaaacaaacacatacaaggcatttaaggataagttagaaatggccaattcaaagtcagttgttaatttcggccttcattcaggtcattcctcatttgaagagatggaaagaatactggaattgaatccaatgtcctttaaggtttttatggatcttgaaagtgatgaacgtcttagggagatatttaaaaacatttctaatcttgatggaaatcctattttaactgttcatgctgaaaagcaatccattgttcgagaaaatacagaaagattatctgaggacttagaacttaaggataagccaatcagctatagctatgcccgttctgccgaatctgagatagaatcaatctctcaaacgatttccctttcaaaagaatttggaaataatttgcatatatgtcatttaagcacaaaaaagggaatggaacttgcaaaggagaacaacattagctatgaattcactcctcatcatctattgtttgacaatagttattttgataagtttggcacaatcgttaagaccaatcctcctttaagggaatctaaggataaggttaatgtttcagatattgattcagattcaatgattggtacagatcatgcacctcacagcttggaggagaaaaataaaggtgtgtgggattccagtccgggaattccttctttagaaacagttctatcattattattgactgaagtgaataaatccaatctggatttcaatttaattcctaaaatatttgctgaaaatccagctaaaagattcaatctaaaaaataaaggatttattaaggaaaattatgatgcagactttgttgttgtagatttaaataaagaaggaactttcaatattgatgagttttatacaaaagcagaatattctccatttgatggaatggactatcaaggggctgctacaatgactattattggtggagaggtaattatggaggataatgaattatttatttaa

SEQ ID NO: 1903 - DNA, 1233 bp, Methanobrevibacter ruminantium
  source 1..1233: mol_type = genomic DNA
atgatagtattcaatgaagatagctgtattaaatgtggagcatgtgaaggagtctgtcctacagcagctattgaagtaggcgatcatatcgtttactgtgatacttgcagcgaagaaccaaaatgtgcagaagtctgtaccaaaggtgctttgcaagtagacgacatagctattgatgaagaaggaaacactcaagtaagattaatctttaacaaaacaaaatgtgacgaatgtggagactgtgtagacgcatgtccttctaaaactcttaaattagatccagaagattctcaactccttaaaggattctgtgtaatgtgtcaaaaatgtgtggacatctgtcctgttgacgttatcggagttcctggaattaaagaacctgcttctagagtaattgaaccagaaggcgcggtatacattgatgattgtaaaggatgtggagtatgtgttgctgaatgtcctgtagatgcaatcaccttatctgcttacggagaacctatcgaagtggatgaagacaaatgtatccaatgtggagtatgttcacaatcctgtccttggaatgcaattttcatcgctggaaacgcaaaacctgcaaaacgtagcaaagtaatgaaatcctttactttagacgctgatgcatgtattggctgtaattcctgtgttgacgcatgtcctggtgacttcattagtcctaaatctgacttgactgtagctcttcctgaagcatgtgctgcttgtggtctttgtgtaaatgtatgtcctgtagatgcaattgatttagatgttgaatatggcgcatctaaattcgattcaactgaaggaatctgttgggatggcgaaaaatgtctctatgatggaggctgtgctttaaaatgtcctactgaagctataagagtagtgactaagagaggaatggaagtaccttcccgtcagaaagatatgggcgaacaatctttcatcatgtgtgtaagatgtggtgcttgtgcaaatgtttgtcctaacgatgcattacaattagactatgttgacaaagagattgatggcgagactgtcatgagagacagaatcatattcaacccatccaaatgtgacgaatgtggagaatgtattgacgcatgtccatatgatatgttacataaagcatacaaagttaacttgccaatcgcaggtttttgtaccctttgtgaacaatgtcttgcaaaatgtacccctgaagcacttagcttaaaatag

SEQ ID NO: 1904 - DNA, 1413 bp, Methanobrevibacter ruminantium
  source 1..1413: mol_type = genomic DNA
atggaacctgtaactcgtattgaaggtcacgcaaaaattactgtacaccttgacgaagcaggaaatgtagaagacactagattacatgttatggaatttagaggattcgaaaaattcttacaaggacgtccagctgaggaagtacctcgtattgtacctagaatctgtggtatttgtgatgtacaacaccacttagcagctgctaaggctgttgaccaaatctacggatttaacgatgatgacatcttacctgctgcttacaaaatgagagaattaatgaactggggatcttacatgcactctcacgctctccacttctacttcttagcagcacctgatttagtagttcctaacggaaccagaaaaacaagaaacgttttccaaattatccaagatatgcctgaagttgcacttcaagctattaaaatcagaagaaacggtttagacatcgtatccgcaaccggtggtcgtccaattcacccaacttcctctacccctggtggtatttccaccgaattagatgaagaaactcaagctgacttattagcaaaagctaaagaaaacgtagaattagctcaagctaccattgaattagctgtacctatcttagaggaaaaaatcgacttagtcaaaaccttaggttacttcggtgacacccgtcactgtggtatcgtaactaaagatggtgactgggacgtatacaacggtaaagtaagaataaaagacaaagacggttctatctacactgaatacagaaacctcgaatacaaagatattgttgcagaacatgtaaaaccatactcctggttaaaattcccttacattaaagaattaggatacccagaaggtatttacagagttgctccattatcccgtattaacgtttgtgataagatgcctgatgcagctcctttagcacaaggtgctttagaagacttcagagacagattcggttacgcacaatacccattattattccactgggcaagattaatcgaattattagcttctgctgaaatggctgttgacgcattagaacaagacttatctggtgacaaattccctgacgcattagaaagaactgctggtgaaggtgcaggtatcgtagaagctgcacgtggtactttaatccaccactacacaactgatgacgaaggattaatcacccaagcaaacattattgtagcaactatccaaaacaaccctgctatggaaatgggtattcaacaagtagctaaagactacatcaaacctggtgtagaagtagatgataagattttcaacttaatggaaatggttatcagagctcacgacccatgtttatcttgtgctacccacactatggacagtcaaatgagattagctactgtagaagtatatgacagtgaaggaaacttaataaacaaaatctaa

SEQ ID NO: 1905 - DNA, 927 bp, Methanobrevibacter ruminantium
  source 1..927: mol_type = genomic DNA
atggcagataaagctaaagtaggaactatgtggctcggaggatgttccggttgtcacttatccattgcggactttcacgaatctttattagatgttttagaattagcacaattcgaattctcaccagtattatgtgatactaaatacgatgaagtacctgaattagacgtactcattgtagaaggtggaatcagaaacgaagaaaacagagaattagcagaaatgttaagagaaaaagctggcctcgttattgcatatggtacttgcgcagcttacggtggtattcctggtctcggtaacttacacactgttgaagagttaacaaccgaaggttacattaactcctgcagtactgtaaacccagaaggaatcattcctaacgaagatgtaccaaccttagaaagcagagtaagacctttaggcgaagctattcaagttgacttattaattcctggttgccctccaaaatctgacgtagtagcagaagctattcttaccttattaaacggaggaactattgaattacctaccacaaacctttgtgaagtatgtcctagagaaaaaccacctgctggtctcgctatggacttcattaaaagacaatttgaaatcggtaaacctgaagacgacttatgtttaattgctcaaggtttagtatgtatgggacctgcaaccgtatccttatgtggagcacaatgcccaagtattgctatcccatgtagaggttgctacggacctactgcaaaagtaaacgatgcaggtgcaaaaatgatttctgcgattgcatctgactacggtgtaaacgaagataagaccgtagaccctgaacaagtagctgatcaattagatgacattgtaggtactttctacacttacactttaccagctgctttagtccctgctaaaatgcaaaaaggaggaaaataa

SEQ ID NO: 1906 - DNA, 426 bp, Methanobrevibacter ruminantium
  source 1..426: mol_type = genomic DNA
atgtctgaagatgtaaaaattgtaatgttttgttgtaactggtgttcctatggtggagcagatactgcaggtactgcaagaatgcaatacccacctaacattcgtgttataagagtaatgtgttctggaagaattgaccctcagtttattttaaaagcattcagagacggtgctgacggtgtattcgtagcaggatgccacatgggtgactgccactacgatgcaggtaactataaacttgacagaagaatgagattagtttataaattagtcgaagatatgggaatcggaagagaaagagtccaccacgactggatttccgcttccgaaggagaaaaattcgctagttctgttaaaatgatggtagacagaattaaagatttaggaccttccccattaaaagcacaattagatgctgaaggatag

SEQ ID NO: 1907 - DNA, 420 bp, Methanobrevibacter ruminantium
  source 1..420: mol_type = genomic DNA
atgagtaaatattttttggatgccaatttcataattgcaattttccgtgaaatcgaaacaaacaatgaactggcaatttccacttgtgaggagctcttgtccaaccatgaatgttatataagcaatggggtcttcaatgaaatcattacaatccttatgatgaggacaaaggatattgaattgacagtcaaagcatactactttatgaaggacaatctaactattatcaatgagttcgagataagtatgttcaatgatagggtatttgagatgtttaaaagatacaattcaaaatcatttaaagtgggatttacagactgttccattgcttttttatataaatattatggcttggattatattgttacctttgataagaactttaaggtatttgatgatgtgaatctattggatttatga

SEQ ID NO: 1908 - DNA, 246 bp, Methanobrevibacter ruminantium
  source 1..246: mol_type = genomic DNA
atgatagatattatagcaaataccaaaatgtataaaaacaagcaaaccataattcccagtgaagttagggataggttcaatgtagatgaggacactatcattgaatggggcgtggatgagtttggagatttaagaatcactttcagaaaaaaagttactttaaaggatgttgcagggatgattaaaaaggaaaatgatgttgaaggggattggaaaattgataggggagtttatttaaatgagtaa

SEQ ID NO: 1909 - DNA, 1224 bp, Methanobrevibacter ruminantium
  source 1..1224: mol_type = genomic DNA
gtggcaaatgatgctttaagggcaaaggataaaaaggcagctttaggtactgatatagttattgaaaacttctctaaagaggaagtaaatgcttttgatgtccttgatgatattgatgacgttgacaaaaagaccaaaaggacattattgaaagttggtgttgatacagagtctgaagaaagggcagggtcattcctccagatggatcagtccaatgtattctccagttccatttccaattctgtagaggtcatgaacactggaattgcacttgaaaagtattcctggctaaaggattacatgtggaatgctgtaaagcctgatgcagacaaatacactgctcagactgcacttcgtgaagtggaggaagagtcatatagcggatactttgtaaggtcacttcctggaaccaaagaggttttcccagttcaggcatgtatgtttattgcagatcaggatgttatgcaaactgctcataacattattattgcagaggagaactctgagcttcaccttatcacaggctgtgcaacaggggaagacgtttcatcagctctccacgttggagtatctgagatgtatcttaagccaggttctaaaataacctttacaatggttcacaattgggctgaacaggttgaagtacgtcctaggactgctattcttcaagcggagaataccacttatattaataattacattttgacaagccctgtcaattcaattcaatcctatcctaccacccattgtaatggagagaatgcaagggcattgttccagagtattcaaagcggaacaaaagattcaatcattgatgtaggttcaagggctcttttaaatgctcctaacaccagcgctgagattatttcccgtgctgtagcaaatgacgaatcaagcatctattcaagaggtcacttggctggaaacgttcctaatgtaaagggacaccttgaatgtcatggattggtattggatgatggctcttcaatctatgctgtgccagagcttgaggctaatgctgcaaaccttgaaatgtctcacgaggcagctgtaggtcaaatcgatgaagaggagatttattaccttacctcaagaggacttactgaagaggaagcagcttccatgattgtaagaggtttcttaagcatggatattacaggtcttcctgatgaattggctgctgagacccaaagaatgattgatatgagtttggatggtatgtaa

SEQ ID NO: 1910 - DNA, 759 bp, Methanobrevibacter ruminantium
  source 1..759: mol_type = genomic DNA
atgttgcttgaagtaaaagatttagttgttgaagttgaaggcaaacgcgttttaaatggcgtaaaccttgctataagagaaggagagactcatgtgctcttaggccctaatggtgccggcaaaagtacattattcttaactattttgggatttcctaaatatgaagttgttgaagggtccattatcttcaatggagaggatatcactggtttaagtactaccgaacgtgttcaaaaaggtcttggagtaagtttccaaaaccctcctgcaattcgtggggtaagcgttagggacttgcttaagttcgaatccaagcaagatccagatgaagacttgaatccaaggatgcaagagcttgcaaagaaattaaagttcagcgatgagtttttagaccgtgatgttaacagaggattctccggaggagaggttaaaaggtctgagattcttcaattgcttgctcaagagccgctatttacaatgttcgacgagccagactctggtgttgacattgagaatgttgagcttttggctggagagttgaatgtattattggataaggataaaaagcctggccaaagaaaaagagcagggcttcttatcactcacttaggttatattttaaacttcgttaaagcggacaaggcacatgtgttgatgcatggtataattgcctgttccggtgaccctgatgaaattttagaagatattagaaaagaaggatttaaaggatgtgttggctgtgcggaatgtggcaaatga

SEQ ID NO: 1911 - DNA, 270 bp, Methanobrevibacter ruminantium
  source 1..270: mol_type = genomic DNA
atggaaaatgctgttgctaaacctaaccctcacagaagggaagaaaaattatggagtgaaattaaaaattatcaagtagctactaataatgcacgtattttaggagttcttgatgaattgattattaatgaaaaaacaggtaaaattgtggatattgccgttaaaatcgaaagtggacgtaatatccatgtaaaaggtgctaaacgtagaggagacttattattaataccttttacaaaattgagaaagttggagaattcattattgtaa

SEQ ID NO: 1912 - DNA, 633 bp, Methanobrevibacter ruminantium
  source 1..633: mol_type = genomic DNA
atgattatagctttggtaatggctggtggaaagggtcttagactaaaatcaaatatagaaaagcctctttttccaatcaatgacaaacccttaatggattatgtcttggataatttaaaaaagtccaaatacatagaaaagacagttgttgccgtaagcccaaatggggaaaacaccaaatcctatttaaaagatgatttgaatttttctgatttccatgatgatttttacaatagcacaaaaaccgatttttatttagacaccaaaggaataggttttgtcgaagatctctctgaaatcctcacttgttttgaaaatcattcaaaagatgacatcttacttttcataaatgcagaccttcctttagtggatgaaaatataattgactacatcattgaatactatctagaccatgacaagcctgcattatccacattggtgccagtagaaatatttgaagaatatggcattccttatacctatgattttaatggaaaagtccctgcaggaatcaacatacttaggagtgaaaatgtcgttcaagaggaggaagttttaattattccaaggtatgagttagtttttaatataaatactatcgagacatctatattagccagtaaatttttatga

SEQ ID NO: 1913 - DNA, 1479 bp, Methanobrevibacter ruminantium
  source 1..1479: mol_type = genomic DNA
atgtcttttttagataaaatttttaataagggacctaagccaattattgctgaaagtcaatcaagggatttaagtattttaaaagcaggtaacaggcctcaaggcccaggtgttatggtagcacaacaggatgaatattatgtcactgcttctgtagagttaggaaacaccactaccaaatgtgttattatggctactaacctaaacaacagccaatcttatctaatcaataaaactgtgaatatgacaagggatgttagagcccctaaacctgatgaagaggtcttcggtaaaacagtttggggtattgaactttctaaagaatctgttgcagatatgattaaagacactgtattagaatcacttaaaaaagctcatgtagatatggatgaagatttagactttgtagtaagatccactggggtaactgcaggttttgccactactcaagaagtggggcaaatggtaaaagctttagcagatggctgtttggatgcaggaatatcccatacaaaaatggctccagccatgtcttcagcacatcttccaaaaagacttcaaaaatacactctcctggataatgtaatgtttgatggagcggtagtaagtgtagttccaccaaaaggtaaggaagttgtagcaaatgaaatggaaggtgaacttgtaactgcaggaatcaaattaggtgctaaatggactgaagtagactatagaaacccttgtgtatctttagactttggttccaccttagcaggacgtattgtaaacaaggatgagccttatgcaagcactgtaggtaacttcctaggtttggctggtgttatttcagactcattagctaaaggttccaagcaaatcgaccaaaagaatggtgcagcattggacctatttgatcctaaactacttaaaaaggcagatggtaagaaacaccaagaaaaagcaaaacaatatgctaaagaagctcatgagctcattaacatctgcaaggttccagaaggaatcgatagattcggtactgtcccattagacgctgcaggagcaaaggcagcaggtacatgtcttataggatgtgatgtgggaacaaatgcagacggccttgacggattggttgaaataggagcaaagatctatgaggatgaaggaattccaacactccttgccactatggaccacgtaagcgcaaacatcgtatacagagttcttgatgttgcatttgaagagaaccttatccttgacggttccattttaggagtcactggaagagctggaataactggtaagaagccagagcttattttagagtatgctcaagacaagttcaaggatgttgtatttgttgaggatggtcttgctctcggttctgcaatcatggctcgttgtatgaactccatgggaactcaaaagaaccctcttggaggaaaccaaggagaaagatgtattttaaagaagagaatgcaagctcaaggtactatagaataa

SEQ ID NO: 1914 - DNA, 882 bp, Methanobrevibacter ruminantium
  source 1..882: mol_type = genomic DNA
atgggaggacaacctggagaataccctaccgttttagcaggaactatcttttacggcggacacaaaattattagtgatgaaaaagcaggagactttgataaagacgctgctgaaggattaattaaaacaatggaagaaatgtctgatgtaaccggaaacccttgtgttgtacaaactttcggtgctactgcagaagctatggttaaatacttagaatttgtaggggacatctgtgacaaacctttccttatcgactcaactgctgcagctgcaaagattgcaggtgtagaatacgtacaagaagcaggattagctgaaagagctgtatacaactccttaagtatggcagcagaagctggagaaatcgaagctgtagctaactctgacatcgacgcatccattctcttaggtttcaacccaatgacccctggtgtacctggtaaactcgaaatctgggaaaccggtggatctgttatcgacgaaggtattctcgaaatggcagaaagatgtggtattaccaaaccttggatggacgtagcagttactcctttaggtcaaggtgcaggtcctgcagtaagaacttcctacgctgtaaaagctaaatggggataccctgtaggttccggtattcacaacgtaccttccgcatgggattggttaagacaatacaaaaaagaacacaaagaagcatggcctgtatgtgatataggttctaacatcgtacaacaaatggctggtggagacttcgtacttttcggtcctatcgaaaactcaagactcgcattcccagcatgtggtatggcagatattatgattgctgaagcagcaagagatatcggtaccgaacctattgaagcacacccattgaacttgttattataa

SEQ ID NO: 1915 - DNA, 252 bp, Methanobrevibacter ruminantium
  source 1..252: mol_type = genomic DNA
atgtctgaagaagaatcagtacctcaaattattgtatctaccgatgatatggcagctgcaattaataaattggatgaagctgaagaaaaagtagaattcgctgttggtgaatacttccaacgtttaggacaacaaaacggtagagatattggtattttatatggtattattttaggtcttgtaattttaatagtatctattgaatttggtttggtaagtgcaatgagtactatgcttacaagcttagtctaa

SEQ ID NO: 1916 - DNA, 207 bp, Methanobrevibacter ruminantium
  source 1..207: mol_type = genomic DNA
atggttagattttcaaacaaaccaaatactcgtggtattagaaatgcttctaataatgtagaataccgtgcaaagctcttaggtagagaaggaagattatttgctggcgtaatcagcaccagattttctggaatggctattggtattggattagctcttgctttagcagttgttattccatacttagctaaattatgtggtttatag

SEQ ID NO: 1917 - DNA, 738 bp, Methanobrevibacter ruminantium
  source 1..738: mol_type = genomic DNA
atggctgacaaaaaacctgctgctgataactggcctgtagtaagtggagactacattgtaggggaccctgaaagtcctgttgctgtaactaccttagcttctcacaatgaagatattccagctgctgctggagcagctattgctggaccttgtaagactgaaaacttaggtattgaaaaagttgttgcaaacattatttcaaacccaaacatcagattcttaatcctttgtggtgctgaagtgcaaggtcacattactggtcaaagtatccaagcattacatgaaaatggttgcgaccctgaaaagaaaaagatcactggtgctaccggtgctattcctttcgtagaaaacattcctatggaaggtgtagaaagattccaacaacaagtagaacttgttgacttgatcgacaacgaagacggtggagcaatcactgcaaaagtaaaagaatgtatcgagaaagatcctggtgcttttgaagaagatgctatggttattgaagtgaaagaaggagatgacgacgaagatgaaggtgaagaaattcgtcctatttccgctgaaactgcattacttgaagcaagaatcagaaacattgacactcaagtaaaattagttggtgctgtacaaagaaatatggcaggtaactattcaggaaaagtccaaggtatcatgattggattaatattcactttagtaatcggtttcttgttattaatggcaccattattaggtgcataa

SEQ ID NO: 1918 - DNA, 321 bp, Methanobrevibacter ruminantium
  source 1..321: mol_type = genomic DNA
atggtattacctttaatacaatttattcctgaattaaacttaaatcttgatcctgaaaccggtcttctcggtgcaggtggtggagatttaatcattctttcaatggatgagataaatggagaaatcgcaaaagtcgaagcggctgctgatgaattaatgaattccttagatcctaattccgcaccattaggttccttcccaggaagagaaggtaactttgttattgcaggaacattgaccaatatggtttatggatttattataggaatgttccttatcatggcagcaatgcctatattaacagctatgggggttttatag

SEQ ID NO: 1919 - DNA, 819 bp, Methanobrevibacter ruminantium
  source 1..819: mol_type = genomic DNA
atgtctgctggaggaagtggagcacctgcagaaggtgctgtaaatgctaatgtaatgttagcagttggtattatcggtggattaattggtatttatgcgtcaagttttgagcctactattggaccagtcattgcatgtcttggtgcagtttgtgcaattctttggggagttcttgctattcgtagtgtagcaagttacggtttaggtactggtgtaccttctattggttacatgtctttaggtataggtgtaatcggtgcattagcaggtgtaggtataattgcagcatttaaattaaaaggattagaaatgctcggaccaatacttgcattagtatttgcaatgctcattggtttattagttgcaattgttgctaagaagattgttggaatgaaaatccctgttatggaaagatgcacagctgaaatcgctggtgctgctgctttagctgttctcggattctcctctgcaattgcaggtggatactctattgatttattattaaccgctgttgtagctcctggattcattgctctcttttacatattagttactatggctatccaacacccattcaacgcatgtttaggacctaacgaagatcaagttagaactcttaaatgtggtgcatccactgcattcttaaccatgattattactggtattctcgcaatttccgctggaggatacgcatggtttgcaattttagttgttggacttatcggctggtacgtctcatttaaaatgtttgttaatgcttcctacgaagctgcagcatctgttaaatggtccggattatggccaaaagttgaggaataa

SEQ ID NO: 1920 - DNA, 702 bp, Methanobrevibacter ruminantium
  source 1..702: mol_type = genomic DNA
atggatcttttaatatttattatatgtgttgtaatcgcaggtattattatgggtggaggtgtacacttcattcctgtaggtggtgctcctgcagctatggctaccgctaccggtgtaggaactggtaccgcaatgttagcagctggtgcaggattaactggactaattaccgcagcttctatgaccggtcaaccagtatggttaatcgtattagcaggtgcagttggttccatgttaatgatgggtatcaccatgcttattggtaactttatttatattttcggtgttggtgtagtaccagcatctggtaaagcagcagtcgacccaattactggttggaaccaagaaaaatacaaaaccccaggtaccgaaggacacggtattcctaccgtctgttacataagtggtatcatcggtggtttacttggtggtgctggtggaggattagtctactgggcaattaatgaatttgctactgcaaacttaactggatttgacgctactgttatcgctggtttagcagctattctctctgtaggtatgttctttatcaattcagtaactgcttcctataacattggaggtactattgaaggtttcgtagaccctaaattcaaaagactcccaactggaatcctcgcttgtgctgttgtttctcttgtagctgctattttcatggttttaatgataggaggtatttaa

SEQ ID NO: 1921 - DNA, 873 bp, Methanobrevibacter ruminantium
  source 1..873: mol_type = genomic DNA
atggaccctattacattaggtgtagtcgcattgatgggtgcagcagcaaccattgcaggtgctgcagaggacttagaatctgacatcggttcacaaagtaaccctaactctcaggttcagctcgctccacaaatgggacacttacaccgtatgataaataaggcagcttctggggaaccagtagcatacggatgctggtgtggtatttccggtgctattgcagctcttgctatgggtatgggtattatacctatagtggcaattgcaatgggttctactgtcgctgcacttgttcacgcaatttatacagtcacatcacacatgggaaggattgtcggtcaatctcaatttgaacaaccattatttatggacgtattaacccaatccttaggccctatcgcagctcatggttttatagctagtttcggtattgtaggaatcgcttatttaatgactcttccattagacggacttggacacccattcccattaccattactcgctgtactttggggaattactattggtgcaatcggatcatccacaggggatgttcattatggtgcagaaagtgaataccaaaaattcgactacggtggaggtactcctgtagcgattcaaggggatatcgtaactaaagctcctctcggtgctaaaaactctatcgatgtaggtaacttctgtgctaaatatggtggacctttaaccggattctgttttggacttattgttttcgtaagcttctggattactgttgtattcggagctttaggaggacaaattgtaggtattgtcatcgttattttattaatcgctgctaattacttacttgaaaagtctacaagagcaaaattcggaccatatgaggaataa

SEQ ID NO: 1922 - DNA, 1653 bp, Methanobrevibacter ruminantium
  source 1..1653: mol_type = genomic DNA
atggctgataaaaaattcttagatgcaatgactaaaaagttcaaagaagctccagaagaaaaaactactaccttctataatatgggcggttggactcaatctgaaagaaaaactgaatttgtaaacgaaggtaaagcaatcgctgaagcaagaggaattccaatgtacaacccagacattggtaacccacttggtcaaagagctttaatgtcctaccaattatccggtactgacactttcgtagaaggggacgacttacactttattaacaacgcagcaatgcaacaagcttgggacgatatcagaaaaactgtaatcgtaggtttaaacactgctcacaacgtactcgaaaaaaggttaggtatggaagtaactcctgaaaccattaccaactacttagaagttgtaaaccacgctatgcctggtgcagctgcagtacaagaacacatggtagaaaccaacccattactcgtagacgactcctacgtaaaagtatttaccggtgacgacgacttagcagcagaaatcgaccctgcatttgtattagacattaacaaagagttcccagaagaacaagctgaagctttaaaagctgaagtaggcggagctatttggcaaattgtaagagttccatctgttgtaggtagagtctgtgacggtggtacaacctccagatggtctgctatgcaaattggtatgtccatgatttccgcatacggacaatgtgcaggtgaaggtgctactggtgacttcgcatacgcatccaaacacgcagaagttattggtatgggtacttacttaccaatcagaagagcaagagcaggtaacgaactcggtggtgtcccattcggattcatggcagatatctgtcaagcaaccagagtaaccgacgaccctgtagaatctgcattagaagtagtagctttaggtgctgctttatacgaccaaatctggttaggttcttacatgtctggtggtgtaggatttactcaatatgctaccgcagcatacaccgataacgtattagacgacttctcttacttcggtaaagattacgtagaagacaaatacggagacttatgttccgcacctaacgacatggacaccgttcttgacgtaggttctgcagtaacattctactcattagaacaatacgaagaatacccagctttacttgaaactcacttcggtggttctcaaagagctgctgttgtatctgcagcttcaggtatttccactgcattcgcaactggaaacgcacaaaccggtttatctgcatggtacttagcacaatacttacacaaagaacaacattccagattaggattctacggttacgacttgcaagatcaatgtggtgcagctaacgtattcgcaatcagaaacgacgaaggtttaccacttgaattaagaggacctaactatcctaactatgcaatgaacgtaggtcaccaaggtgaatacgcaggtatcgcacaagcacctcacagtgctcgtggagacgcatttgcagttaaccctctcgtaaagattgcatttgctgacaagaacttaccattcgacttcaccaaagtcagagctgaattcgctaaaggtgctttaagagaattcgaacctgcaggtgaaagatctatcatcattccagcaaaataa

SEQ ID NO: 1923 - DNA, 753 bp, Methanobrevibacter ruminantium
  source 1..753: mol_type = genomic DNA
atggcacaatattatccaggaacttctcaggtagctgaaaacagaagaaaatttactaacccagatgttgagttagaagttttaagagaaatatctgatgaagatgtagtaaaattattaggtcacagagctccaggtgaagaatacaaatccgttcacccacctctcgacgaactcgatgaacctgatgacattattagagaaattgtagaacctattgacggtgcaaaagcaggagacagagtaagatacatccaatttgtagactccatgtactttgctccagctcaacctttcttaagagcaagatcctacgtatacagatacagaggaatcgataccggtaccttatccggaagacaaattatcgaagctcgtgaaagagatgtagaaagaatttctaaagaaattttagaaaacgaatactttgacactgcacgtactggaatcagaggtgcaggtgtacacggtcactctttaagactcgacgaaaacggtttaatgtttgacatgttaagaagacaagtactcaacaaagaaaccggtaacgttgaaatggtaaaagaccaaattggtcgtgaattagacgaacctgtagtattaggtgaaccattagacgaagaaactctcagagctaaaaccacaatctacagatgtgatggtgaagcttataaagacgacgaagacgctgtaactgtcttaagacaaatacacgtcactagatctcaatttggttacaacccagaatattaa

SEQ ID NO: 1924 - DNA, 597 bp, Methanobrevibacter ruminantium
  source 1..597: mol_type = genomic DNA
atgattggaagatgcacacatcttgtagactgcagggaaacaagaggacttggtgaaggaggaggaattgcccaaagaggaacttttgcagaatgtggaagcgatgttttggcagttgcaatgtctccaggtagaagacacattaccaagccagtctgtgaaatcaccttcggtcttcgcgaagccaacctattgaccagcaccatgatattggatgcaggaagcggcgtaccgcatgatgctcctgctggaggtgccggtaatgcattcggcttgactgacaaggaagtcgagcagatgcaaaagttcaaggtcattgtggttcatttaggtggagtgagaaatcatattacatacaaagcaagacttatcttgcgtaacgttaacaaaccttgtgttattatttgtgaatatcctgtagactttgaagattttgcaaaaatcggtgtcaaaaccgcaaaggtcatgcctgatgaggtaaagacagaaggtaaaatcatgaacatagtatcaggggttattaggggacaaacagtctctcaagaaaaattagatgagattattagaaaagttagattaacattaggagatgcataa

SEQ ID NO: 1925 - DNA, 456 bp, Methanobrevibacter ruminantium
  source 1..456: mol_type = genomic DNA
atggatattgaaatatttccacacagaattttaggtacagacacaactgaaaaggtattaaatgatttagaatctttagattcagttaaaagaactgtaattcaagggccaagactcccaccacaagatgagattgacagaatctatggagatcgcagaatcattgtggtaaatggcgaagaagttgaattaaaggttaaaactggtagaatttttgtagaactctatgatgaatctggtattgaggaaattagagccatatgcgataagcatattgacactggttttgatattaatactagcaaggctcaatacatccgtaagcaaaaaacagttactgatggattgaaatatggtgaaaatacagaaattcctgaagaactgattggtatcgcagatacccgttctaaatttaatgaacatgtctctattctaagaaaagatggtctggaataa

SEQ ID NO: 1926 - DNA, 1332 bp, Methanobrevibacter ruminantium
  source 1..1332: mol_type = genomic DNA
ttggcaaagtttgatgataaagtcgatttatacgacgacagaggttcattagtcgaatctgatgtaccaatcgaagctctaagtccgttacgtaaccctgctattaagaacattattagcggtgttaaaagaactgtagctgtaaacttagaaggtatcgaaaaatctttaaaaactgcttccgttggtggagcaaaatctaaaatcttaggaagagaaatggatcttgacattgttgctcaagctgactccattaacgcttctttaaaagaaatgcttcaagtaactgaagacgatgatactaaatgtgaaatactctctggtggaaaaaggattttagtccaaattccaactatcagattagattcttccgcagaatactccgtagcaaccttagctaccgcaactgcattaacccaagctattatcaaagagtttgacgtaagcatgtacgacgcaaacatggtaaaagctgctatcttaggaagatacccacaatctgtagaatacatgggatccaacttaaaaaccatgttagacgtaccacaaaaattagaaggtccaggttactctttaagaaacattaaagcaaacgacttcgtagctgctaccttaaagaatactttacaagcaactgctcttgcaagtatctttgaacaaactgctatgtttgaaatgggtgacgcagtcggtgcatacgaaagaatgcacttattaggtttagcttaccaaggattaaacgcagacaacatggtattaggtctcgtacaagacaacgcaaaagaaggaaccgtaggttctatcgtacaagacaccattgctaaagctgaagctgatggtgttatcgctgtagaaaaagaattaaccgactacaacatgtacgcaaccaacgatgcagctaaatggaacgcatacgctgctgctggatgtactgctgctattatggttaacgtaggtgcagcaagagctgctcaaggtattccatctactattttatacttcaacgacaacatcgaattcgctaccggtttacctggtattgacttcggtagagctgaaggtgtagctgttggattctctttcttctctcactctatctatggtggaggaggtcctggtttattcaacggtaaccacgtagtaaccagacacagtaaaggatttaccatcccttgtgtagctgctggtatggctttagatgctggtacccaactcttctctccagaagcaacttctggtttaattaaagaggtatacagtgagattgacgaattcagagaaccactcaaatatgttgctttagcagctgctgagattaaaggtgacatctaa

SEQ ID NO: 1927 - DNA, 1251 bp, Methanobrevibacter ruminantium
  source 1..1251: mol_type = genomic DNA
atgcaagttatagctgatcttggtggaactccggggaaggattgtagaggttattgcaagttttgctactttagaaaggtaaagccattaaccgaagctttaggatgtcagcactgccctccaaacaaggtgggatgtgagcgatgtcttgaaggagttcaggaagcaggcaagccatttcaacagccattcacagtcttaagcgaagtacaaatggctttgatgatgaaccctgttcgtgacgctaatcttaaggtcaatatcagcggtggtggtgatgtaagctgctatcctcagcttgaagagcttatcgcttcattgtaccaatggcaattgccaatccacttaggatatacaagcggaaagggaattgacgatggagatattgcaagcagattcctaaactatggcgttaatgaggttacatacaccatcttttcagttgacccggctcttagaaaacaatggatgcttgatcctactcctgaagagtccctaaaggcagcccaactctttgcagaaggggctgacttgcatgctgcagctgtaataattcctggagtcaacgatggacaggctttggtggatacctgcaataagcttgaggagtggggtgcaaaggccttgatgatgatgagatttgcaaattcctacgatcagggattgatccttggaaacgagcctgtcattgaaggagtcgttccacatgagccacttgaatttgaagagcttgtaaaggagatcaattctgaatatgatatgagagttaccggaactcctttaggggaccctactattggcgctccttttatcatagctaaggatgagtatgaggagtttttaggaatcctgcctgaagttaggggagaggcaactcttttaacctctaagattgcagctcctttcctaaagaagatctttgataagattgctcccgacaatgtaaatgtagttgcaactaaaaaggacattgcctgccttatgacaaagcaggaccttgaggctttagacttggatgagctaaaggatgctgtcattcttccgggaagagctttcattcatatattggatgctgaaagaatcctatcctctgatggaaagcaacgtttggtgggatttggccctgataccttaagtgttgacggagaattaagcagtgggatgagtgaagaagaagtcattgaacatgaattaggttcatttattgaattaatagaagctattaacttctttggtatgcgtaggttataa

SEQ ID NO: 1928 - DNA, 222 bp, Methanobrevibacter ruminantium
  source 1..222: mol_type = genomic DNA
atgaaaattagaaaaagaataaagaaactaaaaagaataaagaaactgaaaagaataaagaaactaaaaagaataaagaaactgaaaagaataaagaaactgaaaagaataaagaaactgaaaagaataaagaaactaaaaagaataaagaaactaaaaagaataaagaaactaaaaagaataaagaaactaaaaagaataaaaaaattagaaaaagaataa

SEQ ID NO: 1929 - DNA, 915 bp, Methanobrevibacter ruminantium
  source 1..915: mol_type = genomic DNA
atgtatgaaacattaacattcacaggtggaattcacaaaagtgaggaattaaaggaacttatagaggatttaggcggttttgtactccaatccaatatattgcagatggagcttgtcttaaacatggcagttcctattgatgatgttaagattatagaggataaggcaaatgagcttttaggagagctctctgtagctcctatggctggctctgagatagctatcgtctcccctacccttgcaagacatcaccttccacatgctgcctgtgacatctccgaataccttagacgttatggtgcaaaagacaatatgatcggtctggcccgtgggcatggaaagggaaccgctggaataagcgaaaccgaaaaggcattgattgaagagcatgacatagcaatatttgctcttggaagctttaagcagtgcattgtggataaggcttatctttataatgacattgacattccagtgattgttactggagctcctgaaattgacttggaagagcttcctggtgttgatgcatatgttccagggcttggtagaattcctcgcagattaaaaagaggggaaaacataagggctttaaagcatcttgttcaaacaattgaagaccttcttgaaaaacgtaaaaaggaattggctcaagaccctcctatagtcccttcaattctagttaaaaatgagatagaaaatcaggtccctgcaattgaaggggttttctctccaacacctgttacaagccaattaagcggcttgagggtaaaattagattatgacaattatcatgaagagattgagaatgttgtaatcggagagcaaaagctaaaagacattgcaaacattaaaaaatcacatttctatgattatatacttgtagaactcttgactgagagttctttagttgattaa

SEQ ID NO: 1930 - DNA, 1665 bp, Methanobrevibacter ruminantium
  source 1..1665: mol_type = genomic DNA
atgggtgttaatatgtatgcagaaaacaatatattggttggagctaatgagaatacagaagtttacttattatccaaattagctaatcgtcatggcttaattgccggtgcaacaggtaccggtaagacagttaccttaaaaacacttgcagaagctttcagtgacatgggagttccagttttccttgctgatatgaaaggagacgtatcaggacttgcaaagataggggaacctagctcaaagacaactgaaagaatggaaaagtacaatcttgcagataagggattcatcttcaagtcatatcctgttgaattctgggacctttacggcgagaaaggattgcctattagagttacaatctctgaaatgggtcctcagcttctatcaaaaatattgaaccttactgaagcgcaggaaggtgtcttgaacattgtattccgtgtggcagatgatgaaaatctccttctaattgacattaaggacttaaagtcaatgattaaccatgtaagcgacaatgccgaactctatgaatcaaaatacggcgcagtggctaaaaagtcagcaactacactcctcagatcattgcttgcccttgaagagcaaggaggagacatgttctttggagagcctgcacttgagcttgaagacttcatgcaatgcgacgatgaaggaaaaggaataatcaatatcttagattccgtaaagctttctaccgcacctgaactctattccacattcttgttatggatgatttccgaactctatgaaaagatgcctgaagttggtgacatggacaagccaaaattcattttcttctttgatgaggctcacctcttatttgacgatatggctccagcggtacagaagaaaattgaacaaatagtgaaacttatccgttcaaaaggagtgggactatacttcattagccaaagcccatccgacatacctgatagcgtccttgcacagcttggaaacagggtacagcatgcattacatgcctacacccctaaagagcaaaaggcagtaaagactgctgctgaaacattcagaccaaaccctgcattcgatacaaaagaagtaatttccaatttaggaactggtgaagcattggtttccgttcttgaagagaaaggtgctccaagtgtagtagagcaagtggacatactccctccacaaagctatatcggagcaatcgaagacaatttcagagcagaacttatgagcatttcgcctttaagaggcaaatataaggaagcagtcgatagggagtctgcttatgagatgctattaaataagattgataataatccaaacattcaaacagagatacctccagaagcccctattagggatattcctaatcaggccgagcaagctccaagtcagccacaagcacagcaagcccctcaacaggcacctagtcagccacaagcacagcaagcccctcaagaagaggctcctaaacagaaaggattgcttgatgatgttattggaatagctgttggaactgctgtagaccaaatgacaaaacaaaacaagactacaagatctagaaaaaccactaaacagacaactgttgagaaagcaacttcaactatggtaaatactgcagcaagagaggttacaaaaggaattattagaggattatttggaaatatgaaataa

SEQ ID NO: 1931 - DNA, 369 bp, Methanobrevibacter ruminantium
  source 1..369: mol_type = genomic DNA
atggtggaattagatagagaagaattatacagacaactggaagaaatggaaaacgatttaagactttatcccattgaagaaggattggaagatgatataattgattatatcaatggaaaagaattaagtgataatgagaagtgggaccttgaaaacagacttgaagacttcttctatggtgccaaactcaaatgcagaaagccaacctactactttacagacggatttgagttttatgttacagaaatctatatagactttagaatattggagcacgttcgtaaatcttttcctaaattcaatcaattatctgtatcatctgaaatagaacagggattttctacattgtctgttaaattgacattataa

SEQ ID NO: 1932 - DNA, 798 bp, Methanobrevibacter ruminantium
  source 1..798: mol_type = genomic DNA
atgaagttgaacattaataaagagacttgtactggatgtaaactctgtgagactgtctgcattagggacaatataattgttgtggataaaaaggcagtggaagtggataatggggattgttttgattgcggccactgtttagccatttgtccatcaaattctatctctttaaagggctttgatggtcaaaaagaccgtgttggcgagtacaatcctaaagagattccagtatcaagcgaggattatctgaatctgttaaagcaacgaagaagcattcgctggtttaaaaagaaaaagatagataaagaaacctttaataagctctttgaagcagcatattacagtccaagtgctcaaaatgctcaagatgttgaatttgttgtacttgataatgaattggatgaatttatgcatcttgtttatgatataatcagtgctgaagaggataaattctttagaataaagcaatttggcgagtatttgcgtggagaaggagattataagaatcaccctcttctttgggaaggccatcaaatgattttagccttttctagaaactctgccaatgccttgattgcaagtacaaggcttgagctatttgcttatacaatgggccttggaggattctattcccttttcactcttaaggcagatgagttggatcatgatagattgatggaatttttcccagggatagattcacacaagcatatgtattctgcttttgtaataggttatcctagagtgaaatacagaagaacagtgcctcataaggggattgatgtttattataggtga

SEQ ID NO: 1933 - DNA, 540 bp, Methanobrevibacter ruminantium
  source 1..540: mol_type = genomic DNA
atgtcaatatatgattttgaagtaaaagacatcaacggaaatatggtatctcttaaggagtatgaaggacaggttttattgattgtaaattcagctacagaatgcggtttcactccacagtacaacgaattgactcagatattcgatgaattgaatgaagaaggatttacaatactagattttccttgcaatcaatttggaaaacaagctccaggaactggagaggaaattgcagaagcttgtagagcaaccttcttagtccaataccctatatttgaaaagatagaagtaaatggggaaaacgaagagccattgtacacctatctaaaatctgagcaaccatttgtagacattacaggagaagatgcagaaagattaaaaggaatccttgaaagcattaatccagattatatggacagcaatgacattaaatggaactttaccaaatttttagttgacagagaaggcaatgtagttgcaagatttgagccaactcaaagtttggatgatgtaaaagctcaaattaaagaattattataa

SEQ ID NO: 1934 - DNA, 459 bp, Methanobrevibacter ruminantium
  source 1..459: mol_type = genomic DNA
atgagtattttagtagcttattattcaaggacaaatgttacaaaaaaggtagcggaatccattgcaaatcaattggatgcagatattgaagaaattgtccctaaagtcaagtatgacggcaagataggttatatgcgtggcggtaaggatgcaatttcagaaaagatcattgatttggattctttaaaatacaatcctgcggactatgacttgatttatttaggaactcctgtatgggctgggagggctgcaactcctgtgattagctatatcaagcaaaacgaaggcagcttcaatgatgttaagttctttgtaactgcagggggaagtggatttgaaggcaccattgaacagcttggcaaatatgtggggaaagctccattgaagactttgtctcttaccaccaagcaggttaaaagagatgaatttaaagatgaattggcttcctttattgaataa

SEQ ID NO: 1935 - DNA, 1113 bp, Methanobrevibacter ruminantium
  source 1..1113: mol_type = genomic DNA
ttgacaataatttcaaaaaaggtagaattgattgaactcttctatgatttaatattcgtatatgcaatatcaaggcttacttcaattataagtgaacctgtcaatggaggaatagctccattcagtctatttgcatatattatcacttcctttgtcattttacaggcatggctctactttactaactatgtaaaccgttatggccaatggaagtggtatgaatatgtcattgcaatcataaacatgattgccgtaatctatatggcaaataccatatcctcgacttggaacaattattttgtatttaatgtttccatgctgataatgctctttacggttgtatttttgtattctgttcatgccataaaggaaaaatcattaaagggagctgcaggtaattcaatcactattctgcttgttgtatgttccatttatattatatccacattatcaattctatttgggcatatggatgttgtcatttggctcaatgtccttgctatcttgactggagcctttttgccgtttttccttaagggaaaattcgataagtcaattatcaatttccctcatttgatagaacgatttgaattgctgacaatcattacttttggtgaagctgttgtgggaataacacatttctttaatgtaaacaactttgattttgttccaatacttgtattcctgattgtcataggcatgtttggatcatatgttcttcaaattcactatctagtcgatcatcatagggaagagagaagcctaagattgatgttcagtcattatttcattgtaataagcattaatctggttactgttgcctttgaattgattcacagcggggagataaactattggataccgagcctgatggtgataatttcattgattgtcttctatctctccattatggccaataaggaatattattatgatggcttagaattaagaaaaaaggacattgcattaatggttttgattagtttaataggaagtattgctattttactatctgttggcagcatttatgggttcttaattggggcattgattattacattagccaattttggagttttgttgaataaatatcagaagtttaatgataattaa

SEQ ID NO: 1936 - DNA, 351 bp, Methanobrevibacter ruminantium
  source 1..351: mol_type = genomic DNA
atgttatttatttactacccaagatgcagcacatgccaaaaggcaaagaaatggctagatgaaaatggattcgactatgatgagcagcatatcgttgatgacaatccagactacgaacagttaaaggcattgtatgaaaaaagcggacttcctcttaagaggttctttaatacaagtggtaaaatctatagagagatgcaattaaaagacaagttagctgatatggatgaagaagaacaattgaatcttttagctactaatggcatgcttgtaaaacgccctataattgaaactgaggatacatgtcttactggttttagacaaaaagagtgggaagagaagttaaagtaa

SEQ ID NO: 1937 - DNA, 831 bp, Methanobrevibacter ruminantium
  source 1..831: mol_type = genomic DNA
atggattatattaggcagacagaagttatacaatggaatgacggagcttatcagaccatcaatgaggaaagtgttgaagatgaatatacctatttgtttatagattatttgcctcctcgtaagttttcaacatatccaaaggatttagaggattttgcagtgggatactgccttggtgaaggcttgattaaagattattcagatatcaaatcaatccagttggacggcacaaacattttagttacaactacactctctcatgaccctgaagaggatttggagcaggaaggaatagttcaggagaaaaaaggcaattgcgaacatgcctgtgtatgccgactattggaatatcagggggtcaattcagataatgctggaggaattcgttctgaattaaagacaatagagcctaacacctctgacttaaagattgatgcaagccaaatcattaaggatatagagcatttgactgatgaggctaagatttggcaaaggactgcaggagttcacgttgcacaattgaagtatgaggataagatcattattcgagaagacgtaagtcgtcatgttgcagtggataaggtgataggagctgcatcaagagaaggatatgacttttcaaaatgctatatttcttatagtggaagaatgcctgcagatatgctgattaaggtcattagggttggaattcctataattttatcaaatgcggcacctgcagcttcaggtattgatgtggcccaaacaggaaatataacaatgattggattcattagggataagagattcactgtttttacagctcctgaaagggttaatttagatgcttga

SEQ ID NO: 1938 - DNA, 1206 bp, Methanobrevibacter ruminantium
  source 1..1206: mol_type = genomic DNA
atgaaatacaattttgaatctataatcgatagaaaaaacaccaattcactaaaatgggacttgtttggtgatgaatatccaatgtgggttgcagatatggacttttatgcagctccattgatttacgaatctgtaaatagaaaggcaaatcatggcgtctatgcatattcatttgtaaacgaggatgtctatgattcttatattaattggtggaagaaatatggtcttgatatgaaaaaagaggaattgttgtttgcaactggagtcatgccttcaataacaagcattatccgtgcctttacagagattggagataatgtactgattcagactccagtttatcatgtcttcttttatgtcatattggataatggtagaaatgtggtggaaaatcaattgatttataatccagactctgatgatgttgaaactgcatatgtgattgattttgatgatttggagaaaatattcaaagatcctaagacaaaactgatgctattgtgtaatcctcataatcctgtagggaagatttggaaaaaggatgatttggaaagaattgctgttttagcaaagaaatatgatgttatagtagtttcagatgagattcattgtgatttgacagatccagacatgacttatattcctttcgcatctttagatgatgatctgtccaaaaatagcataacttgcatttctccaagcaagacctttaatattgcaggtcttcaaagctccgcagtattcactcaaaacaaaggtttttatgaagttttaaaaggacagcttgcaactgacttcttcagccatcccaacatattttcaatagatgccacaattgcatcatataaaagcgaagattggttaaatgagcttagagaagtcttattcaataataaaatgattgtgaaagaatttttagaggaaaatattcctgaaatcagattggtgcctgcaaatgcaacttatcttttatggctggattgcagtaaattgaataaaaatgaggatattgaatcttctaactatgaattctctaagactttatctgagtttttaagagaagaggtcggtttattcttatctccgggagtacaattcggccaaaatggagacaatttcctaagaatgaatattgcatgtcctaaggatttattgattgaaggtttaaatgcattaaaagagggaattgataaatttaagagttaa

SEQ ID NO: 1939 - DNA, 519 bp, Methanobrevibacter ruminantium
  source 1..519: mol_type = genomic DNA
atggctgattttgaagagataattaaaataaggcgcagcatacgtgagtatgaagataaggaagttgaagatgaaaagattgaaaagatcttaagggcaggaatgcaagctcctggaagcaggcttggtgcagaaccttgggagtttcttattataaaaaataaggaagtattaactaaaattggggaaatcaagcctagggtgaccaatgctccagttgccattcttttgattgcaaacattgaaagggctttctataagactgtatggcaacaggacatgagtgcagcagctgaaaacatgcttcttgaagctgtaaaccttggcttaggaggcctttggaacggagtggctcctgatgaggaaagaatgggcaagattgcagatattgttggattgccaaaagatgataatctaaagccattctgcataataactcttggatatcctgcagaaggctgggaaaacaagtttatggataagttcgatgaatctagaatacattatgagacttattaa

SEQ ID NO: 1940 - DNA, 573 bp, Methanobrevibacter ruminantium
  source 1..573: mol_type = genomic DNA
ttgaataagcctgttttctatgatgctgactgtttggaatgtttcctatttgttgatgccacttatattttagaagagctattttctaaaataattattccagagcaagtttataatgagattatggaggaaaacactccctcacttgtaaaaagaaattttaaaaaattaaaggagggatttgtagaaattcaagaaatgccttttggttcttcccagtaccttgcttataagtcaattgaaaagggattttggagtaaggcaggtcagatttgtgggtctggtgaatcagcagcaatggcattggcccatttgaataatggaatcatagcaagtaacaatttaagtgatgtggaggaatatattgaaagcttggacataggactcattaccagttctatgattttaactaaagcccttgaaatggaaatcatttcagaagatactgcaagttcattatatcttgcaatgatagaaaggggtatcaagttacctcaggacagtttttgggagtattttgataaactttatgaaattgattgcaaaagattcttaaagaatgattttccataa

SEQ ID NO: 1941 - DNA, 723 bp, Methanobrevibacter ruminantium
  source 1..723: mol_type = genomic DNA
atgaatagcacagttttagctgaaatcttaagacatgaatggggcattgaaagctttgcttcagtaaacattcgttctctggtctataataatataagaaatctgactgtgctctggtttccaatgaaagccaatatcagtggctgttgctcaaagacaaatgaggacaaggtaatattcatcaacaccaaccattcaatcggtagacagaatttcacattggctcatgaattataccacttgctctatgaggatattgatgattttatcgtttgcggaatcaatatgaacacaccaagtgaaaggaatgcagatgaatttgcttcaacattattaatccctgacagtgccctatattggtttagaaataaaaatcaaattgatgattggtcagttgaggatctaatcaagtgcgagcaatactatcaagtcagccgttccacaatgcttaatcgcctaaaaagcttgaattggattagtcaagaccaatatgatgaatttggattaaatgttgttgctgaagttaatagattaggctatgagacaggtctttataagccatcccctcaagaccagaaatattcctcaattggagagcttgtgcgattgactgaaaaggcatatggtaagaaaaagataaccgggggaaaacgcaaggaaattttattaaaatgttttagaaatgatattctttatgataatgaggtgaacaagcttgaataa

SEQ ID NO: 1942 - DNA, 327 bp, Methanobrevibacter ruminantium
  source 1..327: mol_type = genomic DNA
atgattgatgttgtagcaaaaaatctaaaagatttaaggaagaaaaacggttatactcaagaacaggtttctgattatttgggaattactcaaagcaatctttctaaaatagaaaatggagaaagaaactttaacatgactttgcttgataaattgtgtttattatacaattgctctccagaatatttgattggtgaaacagatctttatgaaaagtcaactatagcttttagaagtgatgaaaaggtggatttaaatgtggttgcaaaaatgaatgaaatcactggatttttaaagcttttaagaagtttagatggggttgattag

SEQ ID NO: 1943 - DNA, 822 bp, Methanobrevibacter ruminantium
  source 1..822: mol_type = genomic DNA
atgaaaagatcaatcatatttttaacaattatattatccttatttttagtaattggctatgcaagcgctgggctttttgatttttcaagtgatgatgctggttccggtgaaaatactgatgatgtatttgttgttggattcaacagccaatttccaccatttggatataaggaaaatggtgaatatacaggatttgacattgaactggctaaagaggttgctcgaagaaacaactggacattcaagccagtgccaatcatcgattggaacactaaaagatttgaattggacagcaatgaagtagactgcatctggagtgaatttaccattgacggaagagaggacgactatacatggtcccaaccttactttaacaatacaaagcttgtcatcgttagaggggatagcgatatcaatgaccttgacgatttgaagggcaagacccttgaggttcaacagggaagctccattctaaacacaatcgaaaagaatgagactttaaagagaaaatttgcaaagattgagcaggtggatggctatgacactgcattcatggacttggaatctggagtctgtgatgtgataatcatagacagcggtcttggaagatatctagttagcgaaaagcataatgacactaagatattgaatcagacaatttccaatgagaaatatggtgttgcatttgaaaaaggaaacactgaattaagggataaggttcaaaagacattggatgagatgtatgcggatggaaccgttgaaaagatagctcaaaagtacagcaaatacggaattccagatggtgtaatctatcctgaataa

SEQ ID NO: 1944 - DNA, 444 bp, Methanobrevibacter ruminantium
  source 1..444: mol_type = genomic DNA
atgtttataatcttcccattatttagcgctaacctaatttccatcattattggaataagcgtattgatatttggtataggattggcatattcctcattcattacacatgaaatctcaggtgccctatcttcagttatgggaatctttgggattgtaatgataatctttggattatgtttcatatttgcaatcaatgcaatttccttccttgtaggattgcaattctacattgtagcatttatgctgattatgattgctgtagtcggattcctttcagatagcaatgttgctagaaccggcgctttattgtatttggtcctaggtatagttattttgcttattgcaatgtttgctgcagaaaaccctatactaattacaattattttaggtgttattttaatagcacaaggaataatgggattaatatatggcaatgaaatataa

SEQ ID NO: 1945 - DNA, 1278 bp, Methanobrevibacter ruminantium
  source 1..1278: mol_type = genomic DNA
ttgttagatataaagctatttcgagaaaatcctgatttaatatttgactctgagaagaaaagattcagaagcactgaaaatgcagagaaagttattgaatatgacaccttatggagagaaggtgaaagcagattgaactctcttagggcagagaagaacaaattatcaaaatcattcaaacaagctaaaaaggacggaaacattgaagaggtaattgcacaatccaaggcagttgctgaagagatcaaggaattaggtcctaagattgaagagtataagcaattgcgtgaagattacagatacaaggttggaaacatcattgacgaggatgttccagtctctgacacagaagatgacaaccttattgttaggaccgttggagaattgccagactttgattttgagcctttaaatcatgttgatttgattgaaaagattgacggtgcagacattgaaactgcagcaagcattgcaggtgcaaggttctactatcttaaaagggacatcttgcatcttaacttggctttaatccagttcgcccttaacgagcttgaagagagaggctacattccacttcagactcccttctttgtaaaaggggaagttgcagcagagacatctgagcttggagagtttgaggaaaccttatacaaggtggaaaatgaagacttatacctaattgcaacagctgagcagacacttgcagcattgcatagggatgaaatcatcaatcctgaagatttgccaatgagatattgcgccctttctacctgctttagaaaggaggctggatctcatggtaaggacactttaggaatattcagggttcatcagtttgaaaagattgaacagttcattttctccactcctgaagaaagcaaaaacgagcatcacaggttattggaagttactgaggacatctataagaaattaggacttccttatcaaatcgttgccatagtttcctcagcattgaatgacaatgcagcaatcaagtacgaccttgaggcatggttccctggttcaaagacctatagggaattggtatcctgtaccaattgtggtgactatcaggcaagaaagaccaagaccagatatggtagggcaggatctggagatgcccagactttacacaccttaaacagtactgcaatagcaactgaaagaactatgtgctgtatattagaaaactatcagcaggatgatggaagcgtaaaggttccagaggttttagtgccttatatgggtggaaaaacagtaatcgaagcaagaaagtaa

SEQ ID NO: 1946 - DNA, 582 bp, Methanobrevibacter ruminantium
  source 1..582: mol_type = genomic DNA
atgattgttgtaactactccaatgtgtaagcaaatagtggaatgggctggacttaaggaatttaaagttaacaagtttccagatgaggaagaaggggacttggctatactgctttctgaaagcaaggtcaaaatgaactctttaactcttaaattaaataccttttctcaaataagagaaagcattttaaaagtttccaattattgttttgaacatgatttaacagatcatcttcttagtgatgatgatattgacgatatcttttcatcttatgatttgaagtacgctaatttgggcgatgatgattttgataaaatcagggaatcaaactctaataagaaagttaaggtctattctgagtttctaaaggatattgttttggatattggggctcttgttgttgatgaggattattcatatgtcgtttatccggactatttaaaggacattgtagataagaatgaggactttacagactcttccattgtctttatagagatgccaagtcatggaaaggtttctaaaaatcctcttgagaggactgaagagagatattctattttaataaatagtttaatatag

SEQ ID NO: 1947 - DNA, 783 bp, Methanobrevibacter ruminantium
  source 1..783: mol_type = genomic DNA
atgcaaattataaaaacaagcgaaacagaggccgaaaaagtgataataaatttaagccaggaaaaaagccatagcaaagacgtttcaattatggtagatgctttaagagcaagtacaaccgtaacaatagctttagactactttaaagaagtaattccagcattcactccagaggaggcaagagaactttccctaaagcataacgctgtacttgcaggtgagagaaagggagttaaattagagggctttgatattggaaactcacctggtgaaataaaggagtttgaaaccaacaagaaatccatggttcttacaacaagcaatggaataatgacaatggaaaatatgcaaaaccctaaacatgtcttagttggaggattcataaatgccaaatccgttgcaaaggcagctgtagagctagcagaggaagagattgaaatagtcatgggaggatacaaccatgaatttgcaattgaagacttccttgcagctggagaaatactcttttatatagaaaaagagctaaaagaaagaaacatgactccaaaagaaaatgatggatccaattatgaattgaaggatagggaaggctttagcgaatatgcaatatctgctatcttagcaagcagaaatctggaattaaccaatgaacaagtattaaaatccaaatctggaaagcgattaagctatttaaactactctgatgatgtagaattatgcatgaagcgaaacataactgaaaatgtaggcattttaaaagatggaaagatagttctatactga

SEQ ID NO: 1948 - DNA, 1167 bp, Methanobrevibacter ruminantium
  source 1..1167: mol_type = genomic DNA
atgagaagagaatgtttaaaaatcataggaactgcacacgtgtctcaaaatagtgtggaagaagtaaaagaagctattttagaagacaaaccagaagtagtcgctattgaattagatagaggaagatacattagattaatgaatgaaagaaatggcattgtagaagatgaccaaatccatattaccaaaatcataaaagaaaacaaagtaggggttttcttagttacaaccatcctttcctatatgcaaaacaaaattggagatgacctagacatcaagcctggctctgaaatgatcggcgcaattgatgcagctgaagagacaggttccagaatcgcattgattgacagagacataaacatcaccttgcaaagggttctaaaccatatgagcacttgggaaaagcttaaattcatttatggaatcatcggaggcttgctctcatcagatgatgaggaactggatgtagaggcattgaaggaacagtctgcaatcgatgaggcaatgggatactttaaggaaatatctccaggagcatatgaggcattggtaaatgaaagggatgcatatcttgcaaacagcatattgcacattccagaagaccatgtcatagcggttgtaggtgcagggcataaggaaggaatcaacagataccttgataatccagaaacaataccgcctcatagcgaactgattgatatggacaagaaaggaggaattccttggcttaagataatccttgcattgattcctatctcatttgttgtgatattttttcttgcttggatgaatggaatccatatagaaggagacattgttcaattcattgtaataagcatgataatgggatttttaggctcaattctttcaggatcaaagctagcctctgcaataatcggaggattagttgctccactcactattatccaccccctccttgcggcaggctggttttcaggacttgctgaagcaaagttcagaaaggtgagaaagcaggacattaataatataggaaaaatcgaaagctttagagacttatggaacaataacatattcagaatccttcttgtagtggttggaaccaatttaggagttagcttggcaaccttagttattttgccttcccaggtctttattccactctttatgaaaatcttcggaggataa

SEQ ID NO: 1949 - DNA, 276 bp, Methanobrevibacter ruminantium
  source 1..276: mol_type = genomic DNA
atgtatgtaatattcagatgcgattgcggaagagtgctttatgcaaagcaaggtgtaaaaacaagaaaatgcacctgtggaaaaacaatcaaagtgaaaagccgcagaatccttcaaaaagtagaaacagcaaacgatgcatcattggcagttcaaaagatgcaagaggaaatctatggaggaactgcatttaagactgctgacgagtataaggcaaataaattcataaatcagcttgatagaagaatgaaggaatatgaagatggtgacttttag

SEQ ID NO: 1950 - DNA, 1347 bp, Methanobrevibacter ruminantium
  source 1..1347: mol_type = genomic DNA
atggaaatggactcgataatcataattagtgaaatactaataatcataatattaatcgtacttaacggacttttctcccttgcagaaatcgcagttgtctctgcaagaagaatcagaatgcaaaaaattgcagatgatggagataaaagagcattactcgttttagactctatggaccacaccagtgaattcttatctactgtacaagtgggcataacctttacagcaatcatcacaggggcattaggtggaactactttttcagaacctttaggaaactaccttagccaattcataccttacagctatcagataagcttcattatcgttatccttctcacatcctactttacaatattggtaggtgagatcgtacctaaaagaatggcattgaatgaccctgaaggatatgcattgagcactgcaaagttcatgcagataagctcaataatatgcaagcctattgtaaagctccttgacagctctacaaatcttgccttaaggattgttggcccatcaccaaaagaggatgtcgttactgaagaggaagtcaagctccttatcgaagagggcattgaagacggaacaatagccgaagaggaagaggacatcatcaaaagggtattccgtttagatgaccaaaaggtagatatgataatgacccctagaaacgagatcatctggctagacctagaagatgagattgaaattaacaaggctaaaatcattgcaagtaaaaggtctattttccctgttgcagatgcggaattggatgacttcatcggtgttgttcaagctaaagacctactcagcaaaatatttgaaggagaagatgttgacattagagctaatgtcaaatctccattagtagttcctgaaaatatgctttcaatggacttgcttaaggaatttaaggaaaacagagaatatgtacatatggttcttgtagtggatgaattcggaagcgttgtaggactcatcacattaaacgaccttcttgaaggaattgtaggagacattccaggaatcgatgaagaggacgatcctaaagcggttgaaagaaaagaccatacttggctaatagacggcagattctctatagaagactttaaagacctatttgaaatcgaaaaggaaatgcctaatgaagtggaggacggatacacaaccattgcaggattcatcctttcacatgcaggtaaaatccctgaaaccggtgaaatattccatgaagacaagttcacctttgaaatcgttgacatggatggaaaccatatcgataagatcctggtaacaataaacgaagaggatagcgataaattagaccttgaaagcaaggaagactaa

SEQ ID NO: 1951 - DNA, 942 bp, Methanobrevibacter ruminantium
  source 1..942: mol_type = genomic DNA
atggaactaattattcaaataatcttactaattataggatttgtgcttctaattaaaggtgcagatgtctttgtagacggtgcaagtaatgttgcatacaacttaaagataccaaccataattgtaggactcacaatcgtcgcatttggtacaagcgctcctgaagcagctgtttcaattacctctgcatttgccggaacaaatgcgatttcccttggaaacgttgtaggtagtaacatattcaacatattggcagttgttggtgtctctgcattgcttggaacattgacagtggataaggtattgataaaaagagatttcccatttttggttgtatcttcaataggccttcttctaatagccaccatatttggagagataagcagactctgcggtataatcttcttgataatcatcattgcttatgtctatgtccttgttcaagaggcaagacaggacaaggaagcaatgtctgaagagattgaagtaaagctttcaataccaaaagcggcaatctacattgtcataggtattgccggaatcataatcggttccgatttggttgtagactcatcaagctatattgcaagcgtattcggattaagcgatgtacttattggtcttacaattgttgctataggaacttcattgcctgagcttgtaacttctattactgcacttaaaaaaggagacaatggtattgtaattggtaatgtgcttggatcaagcatattcaacatacttttcattttaggtatcagcggagcaataatgccactcccaatagcacctgaaatggtatgggacatacttttaatgacagtgattacaatcattggcgcagcctttgcatacaccaaaaatgaagtggataaaaaagaaggtgccgttttagtagcattatttattctctatatggcatttgtcattttaagaaattaa

SEQ ID NO: 1952 - DNA, 504 bp, Methanobrevibacter ruminantium
  source 1..504: mol_type = genomic DNA
atggattctaaaaaactgattttagtgactgcattggcttttttagctattgtttccatagcttcagttagtgcatgggacttgtttggaacagctgatgagactagttccacagcaaagactaccattgcaggacatgatttcaatatacctgacggatatcaaaaaaatgagtcatatgtgttggataatgaaactaccaactcaaatggggctattttttattcaactgcagagagctattataagggtgcagatgatataatttatattcaggtagcagactacagttatcctggttatgaagctaatctaaccactgcccaacttctaaagtctggattgggagataaagaaaccatcaatggtcatgaaggtttaattgcagaaaatgaatttgatggcttaaaggttcatgcatttttctatgctgaagatggagattgtataactgtaataacttcagatgataatttatttgaacaaataattcctgaggcatga

SEQ ID NO: 1953 - DNA, 1356 bp, Methanobrevibacter ruminantium
  source 1..1356: mol_type = genomic DNA
atgaatgtgaataagaaaatatttttacttgtaatctttataatatctatttcaatagctggagtatattgtgcagacatccatcaggatagcgatttaaccgcaattctaagcaatgaaacagatagtggtttaacagctatcatgagcaatgaaacagatagctttggctgctgttcaattgtcctccaattagatggaaatgaatccataatgtgctacagacgtgattccaactatacagcagatgtatttattgaaaaggtcaattggcatggaaagcctgcaataaagcaatataaaactgacaataaatacttcaaccatgtcataatcacaaatgatggctggataataggattaggtggaatagacgatggaatcgacagtgaaatctgtgaaaacatcactgcaaagatgattacaaaggattacagcatctcagaagattatctaactcaaatccaggagattaaaaagaagtatggaagaggtcatgttgtaattaaggctcctaatggaaattacggctttgcaacacctacaaagctcaagacagggacattaaacgttggagaatacatatccatcccaaataattatgagctttccagaagaggatatgtctcactggatgagccagataaaatagaggcaatgataaatctatctagaactgacctttatggagatgacagacgtgaaataattacttatgacgttcatttaaatggcaacaacaatacaaccgacatttacatatccaatgaagatggatcacttattggaaaagactatactggctgtgttgacaatgtaatcttcaataatgtgactatagaaggaaaagacattcctatagctccaaactataaaagcctaggttcaatgagctttgaagtagataaagtcaatcttagcctaacagatttagcatttatagttgtaggagtagttctagttatagcactcttattcgtcttattgctaaggctcataagatttattaaaacaagaagatccagaagaagtgctccgagaagaactagaagagaaactccaagaagctccagaggaagcgccccaagtagaactagaagagaaagtccaagtagaactagaagagaaactccaaggccaaatctaagaaatgcaagaagaagagatacagaagaagatagaagaagaaatgatctaagaagaaatgtattgcaaaatatagtggaagataaaagaagaagcgagcctagaaggaatgtaagaagaaatacaagaaacaatcgaggaagaagaagaggacaaaatcgaggaaggcagcaaactaagagacctccaacattatataggaaagaataa

SEQ ID NO: 1954 - DNA, 858 bp, Methanobrevibacter ruminantium
  source 1..858: mol_type = genomic DNA
atgagcataaacaaggaagaattcaatgaaaagatattctctagaatcaataatctaatagacgattatcaattgattaaagagggtgaaaagatagccattgccttatccggtggtaaagatagtgttttaactcttcatgcacttaaaaattataaggatagtgctgattttgactttgagcttgtggcaattttagttgatgagggaatagatggctatcgccagcatggaatagatgctgcagtaaataatgcccagcttttggagattcctcttatacaaaagtcctttaaagaagaggagggctttgcattggatgatatctattcctattttaagagcgcttgcattccttgtggggtatttaggcgcaatatcttaaataaaaccgcttatgaaataggtgccgacaagattgcaacaggacataaccttgatgatgagattcagtcatttctaatgagcttttcaaggggagacactgtaaagttctctaaattcggtccggagcttgatcagattcatgaaaaattagttccaaggataaagccattgtggaacactcctgaaaaggaagtagggatgtgggcgattctgaatggtgttgagattcatttggatgaatgtccttattctaatctgtctttaagggctaaaattaaggaatttttaaataagactgagtcaaagcatcccggcactaaggagaatgttttaaactcatttataaagacacttgatgttgagaatgtaaggactgttttaagtgagtgtgaaaggtgcggagagccaacatcaggtagggtctgtaaagcctgtgaaataaaggacataattagtgaaaatagggattaa

SEQ ID NO: 1955 - DNA, 276 bp, Methanobrevibacter ruminantium
  source 1..276: mol_type = genomic DNA
atgggaattgaagagtcaggagtaggggaatacgtttcaaaggcagttcaaataatcgaagagagcggtttaaactaccaaataaccgctatgggaacccaaatagaaacagacaatctaaataaattatatgaagtttgtgcaaatgttcaagaagccatctttgaaatgggcgttcctagagtttatactgtactaaaaatagatgatagaagagataaggaaaataggacattgaaagagaaagtaaaaagcgttgaagatagaataaaatag

SEQ ID NO: 1956 - DNA, 474 bp, Methanobrevibacter ruminantium
  source 1..474: mol_type = genomic DNA
atggctcctgttgttgaacaacctgtagaagaatgggacaaagacattgcaatcgacttaaccggtgtattctactgctgcaaagcattcggagaatatatggtcaaacaagaatacggtaaaatcattaacatgggttcaatccactccagagttgcattaaccggaggattaattaccggatatacctctgcaaaaggaggagtatacaaccttaccaaaacattagcagctgaatgggctccatacaacattactgtaaatgcaatcggtcctgcatacttcgaatccgaactaaccgctgatgttgttggcgatgaacaattcgacatgttaattaaagcattctgtccaatgggcagatggggtaaagaaggagaattagatggtattgcaatctacttagcatctgatgcttccagcttctgtaccggtcaattaattaacattgatggtggatggactgcaatttag

SEQ ID NO: 1957 - DNA, 1104 bp, Methanobrevibacter ruminantium
  source 1..1104: mol_type = genomic DNA
atggcagatattaaagtttctatagctagtcctataattgaagaagaagagatcaatgcagttgttgaagtaatgaagtctggtatgattgctcaaggtccaaaggtaattgagtttgaaaaggaatttgcagactttgtaggtgcaaaatacggaattgcaactaattctggaacttctgcattgcatgttgcgcttttagctgctggaattggaaaaggggatgaggtaataaccactccatttacatttgcagcaaccggtaactccatcttatacactggagctcgtcctgtttttgttgatattaatgaagacacctttaccattgacccatgtaaaatagaagaggcaataaccgataagaccaaagcaataatgcctgttcaattatatggtcaagctgctgatatggatcctataatgaaaattgcaaaagaacatgatttgattgttattgaagatgctgctcaggcacatggtgctgaatataaaggcaaaaaggttggaaatcttggtgatatggcttgctttagtttttatccaactaaaaacatgactacaagcgaaggtggaatgatcaccaccaataatgaagagtttgcagaaaacgctagaatctatagggctcacggatctgctaccaaatatcatcatgatgtattgggatacaactttagaatgactgacattggtgcagctataggtattgaacagcttaagaagatagatggattcaatgataagagaatagaaaatgcaaaataccttaatgaaggattggcagattgcgatttggttgaaactcctgttgtagaggatggatataagcatgtctaccaccaatacacagttaaggtcaaagacggcaaaagggatgccctttctgactatctgattgaaaatggcattggcaatggaatttattatccaatcccattatacgaccaggtattgtatacagatatgggatataatcaaagccttgaagtaactgataaaactgttaaggaggttttatcacttcctattcatgcaaagcttactaaatttgacttggatttaattattgaaaaggttaaaaaggcaagtaaagagttataa

SEQ ID NO: 1958 - DNA, 1218 bp, Methanobrevibacter ruminantium
  source 1..1218: mol_type = genomic DNA
atggaagaatataaagacaattttccccaagaggaattgaaaacatacactgaagatgaattaaagatcatagaagaaggtaaagtcaaaataaaatttccagactttgataaggtctcctcagatgctccagtcttctataatccaaagatggaatttaaccgagacaattccatattagccctgcaagcctatcaaaaggaagttgaccgtgaaataaacatctgtgacctttttggcggaagcggaattaggggaatcagatataaaaaggaaatagaaggagttggagaagtatctgtaaacgacatcagccctcttgcaaacgaatttacaagaataaatgcagagcttaacgatgttgaagtaaacatagaccaaaaggaagcaaacatagagcttagaacaaacatgggacttttcgatgttattgacatcgacccatttggaactccttccccatttgtagactcagcagcatacaatctgaaaagggattcattgctctgtttgactgctacagacacatcatgcctatctggaacttatccagaaccctgcattagaaaatacaatgcaaagccttataaaagcgaatactatcatgaaaatggaattagaatcattataggatttgccgccttgacacttgcaaagtatcaaaagcatatagaggtaaagatgtcccacagcacagagcattatatgagagtctaccttaagatcataaaaggttcaaaggcaactgacaaatccttaaaaaacataggatacatcagccactgcaaaaactgtctatacagaacagaatcccatggacttgcaacaagcgttcccgacatatgtcctgaatgcggtgaaaagcttgttactgccggacctctttggctaggacctattcaaaataaggaatttattgaatcaatgattgagatagcagatgaaaaggaactcaataccaaaaagaaagtattgaagctactgaattcatgcaagatggaagcagatgcacctgccacattctatgacatccataagatatgtcgaagtcttaaaatcagtgcccctaagttggatctggtttttgacaagcttaaggaaaatggattctatgctgtcaagacacattacagccctttaggaataaaaaccgatgcaagcagtagagaattgatagaaatcgttaaggaattagctgaagaagtggaaaataaataa

SEQ ID NO: 1959 - DNA, 480 bp, Methanobrevibacter ruminantium
  source 1..480: mol_type = genomic DNA
atgtgtgcaaaagttaatgaagatattatacaactagatgaaactgacattagcatattaaaaatcataaatgatgatgttagaatttcatacagacagatctcccgcgatttaggaatttcagtaggaactgtacacaatcgtattgacaaaatgcttaagactggagtaattgaaaaatttgcacctgtcctaaaccataagaagttaggatatgcccttacaagcattattggagtaaatgtcaaaggtcaagaattagaacaatgggaacatgacatttccaaaaacaagaatgttgtaggcctttatgatgtaaccggtcagtacgatgcaatagtgattgccaaattcaaggacactgatgaattagacaccttccttaaggaattgcttaaaacaggatgcattgaaaagacaattactcaaactgtacttaacattgtaaaagaggacgtcggatctgctgacatcctttaa

SEQ ID NO: 1960 - DNA, 942 bp, Methanobrevibacter ruminantium
  source 1..942: mol_type = genomic DNA
atggtagtttgtctcccagacacacaagatgatgcacctagaatacctatccatttaagcagagtaggtgtgacaggtgttaagaagcttttaactcttaaaaggaaagaaaaaagaccaatcatattattacctacttttgacgcttttgtagatttgccaagcgatcaaaaaggtactcatatgtctagaactcctgaagctatcagtgaagtagtagaagaagttgctcaaagctcccaaaaaggagtggaatccctttgcgcagacatagtcacaagaatgcttgaaaagcatgaatacgctaagcgtgttgaagtgagcatggtcagcgactatatgttcatgaaggactctccagtaactgacaacaggtcccaggaaatgggcaaactaatagctaacgctgtcggtatccgtgaagatgacgacacaatcagcatcagaaaaagcattggtgctgaagtcattggaatgacagtatgcccttgtgcacaggaatctgtaagggaagtggataagaacaacttactaaaattcttagatgaagaaacttgccaaaaagtattggacactgtaactttcgcttctcacaaccaaagaggagtgggaaccattcttatagaagttccagaggatgaatatgtcgatggggaaaagcttattgaaataatcgaatcatcaatgagctcacctatttcagagcttttaaaacgtcccgatgaaaatgcagtggtaatgaatgcccacaagaaccctgtttttgtagaggattgtgttagaacaatgaatgaaaaaatcgtaaaagagttttcacatcttccagacgacactcttataaccacaagacaggaaaatcaggaaagtattcacagacacaatgcttttgcagaaaaagtttccactttaggttcccttaaagaggaacttaacataaattag

SEQ ID NO: 1961 - DNA, 282 bp, Methanobrevibacter ruminantium
  source 1..282: mol_type = genomic DNA
atgatatttatggaaaatttcgaaaatcaaaagttttgtcaatcttgtgcaatgcctatgactgaagaactctatggaaccaatgcagacggttctaaaaacgatgagtactgcatctattgctttaaggatggtgaattcacttcagatatgactatggaagaaatgatgaatttctgcattgaaaagatggtagaggttcatccggagatggacaaggaagaagcttctaaaatgatgaatgaagtatttcctatgttaaaaagatgggctaaggattaa

SEQ ID NO: 1962 - DNA, 1185 bp, Methanobrevibacter ruminantium
  source 1..1185: mol_type = genomic DNA
atgaacgtattagtttgttctatgtcagctatggctgaaactgcaggtccttatgggagagctagagctcttgttgaagctttaaaggcatctggtattgatgtagctacttgcatggcggaagacattaattataagccaatcgatgggataaaaaattattatttgaatgttcctatgcctcttggacttcctaagccaattgcaactaggacctttcctattgcacagaaattgggaatcattgaaaggaagaatgtaggaagctttgaagatgttctccattttaccggaaacattgactataagtatttgtgtgaaagtgtggctaatataagaaaggcaatcaatgacttcaatcctgacataatttactctgaatttaatatctctgcaatattggcttctaaacttgaaaataagagattatatgcaactataagctatcctacacaaactgaatatgcttctaatcccaaatatgctaaaggactaaagaagtttttaagagaaaataatcttccagatgttaattcctcattggatctttttaattgggcggataagtcatttgttccaagcatttatgaattggagccaatcgataaggataatgtgactttctgtggaacttggaagaatcttaatgaaggctctgtctttaaggaaaatgatgaaaatatggattctacagatgagaggaatgcaattttagtctatatgggaagtgggactatatctccaaacaagatgtttaaagaaatcaaagatgcatttattggaacagaatatcaagtttatattgcatctcttggacttgagaagtcagattttgataatattcatattgataagcgctgggatttctccaagcttttaaatgaatctgttctctttatcaatcatggaggtcaaaacagtgtggttgatggatttatttatggagttcctcaattgatttgtcctggaagagtctttgaacggatttataatggaaaatcagttgaaaaggttgatgcaggtaaaatattggaaattactgattttaaaggggagattatcaaatctgaaagtgaaaaaatcattaaggatgactcttttaggaataattccaaatcaatcggagataagttaaaatcactaaatggtattgatttgattatagattctatcaagaaaggctaa

SEQ ID NO: 1963 - DNA, 1344 bp, Methanobrevibacter ruminantium
  source 1..1344: mol_type = genomic DNA
atgaaaatgtataaaataaatgtttcaaatatttcacgattaaggacttatactgacggggatggtgtttcaactttaattgggtccatgggttgtcctttaagatgtgcatattgtttcaatcctttttcttgggacggttcccttgaacctaaaacttatgctgttgatgaattatatgaagaagttaaaagagacaatatctattttttatcaactggcggaggcttggtttttggtggaggggagccattgctctatcatgaatttatcaaggaatttattaagaaatataaatcaaccggttggaaattcacattggaaacatcactttcagttaaaaaggatattttaagggatattattgactatattgatttttttatagttgatacaaaggatatgaataaaaataggtatgaattatatacaaaaggagattatgaattattcttatcaaacttaaaatttcttattgataaagttggatctgatgggattagagttcgggttcctaaaattcctaagttaaataccgtagatgatgttaaaacaaattatcggactcttaaagatatgggcttttctaatatagatgtctttaattatgtggagattgctaaacacagaaaaatctctcgtgttgctctggaaaataaaaaagattttgatgaaaggctatatgaaaataagattaaatttgtagaggattatatcttatctgagattatgcttaaggttcctccgattttggattttcatataaagaaattcccaaattcctttaataaaaaatttgaattcttatttgaatacgattctatatttaatgacgacctgttctttttaaaggaagtcgttatttctaaattacaggagtgttatgattatttggatttaaaatatggcttctttgtaattttttaccctgttggttatttggaaaatagattagatgattcttgttttgatttgagtattatgaataatctagtaaaatcttttgaaggtttagatgaaattgataaggaaaaacatgcattggagttatgggaagaaaataaatgggaatatattgaatttaagtatttctgtcatgatttaaatcatttaaaaaatttttatgttaattttaaagatcatggctataaattagattcaaaatatattttatcaaatgcgtatgatgtttgtccatctgattttgtagtccatattaatcttagaaaaactggtaagacttataatatagtcgaagaagattattcaacacatcttcttgttcagaaatttgataaggatatgaatctaatttctcaaagcatttttgaaaagggaatataa

SEQ ID NO: 1964 - DNA, 270 bp, Methanobrevibacter ruminantium
  source 1..270: mol_type = genomic DNA
atgaaaggaaaagataaatgtgagttgcttaaaaatattagacaaaaaattgcagatgaaaataatatcgagtatacggctgtagagtgtacatttcaaggagattgcactggaacttgtcctaaatgtgaatctgaacttgaatatttggataaggaacttgagaaaaaacaaaatgctggtgaaaatataaatattaagaatatattttcttcagacgattttgataaatcagaatatggtcttcttgatgaaaatatattaggttag

SEQ ID NO: 1965 - DNA, 426 bp, Methanobrevibacter ruminantium
  source 1..426: mol_type = genomic DNA
atggtagatgaaatagacagattcgatggaaaatacctgtttttaagtaatttttatatttgtgacgttgaatatgatggaatactttatcctcacacagaggcagcatttcatgctcaaaaggtcttcgatgatgagactaaaatgaaatttactaatgtcactccaaagcaatcgaaaagattgggtcgtaaggtaaaattgcgtgaagattggaatgaagtcaaggacaatataatgtatgaagtctgtaaggctaaatttgaacagaatccagacattcgtaaattattgcttgaaactggcgatgcaaccttgattgaaggaaacacttggaatgatcaatattggggtgtttgcagaggaaagggcagaaaccagttaggaaagactttaatgagaattagagaggaattaagagaataa

SEQ ID NO: 1966 - DNA, 1533 bp, Methanobrevibacter ruminantium
  source 1..1533: mol_type = genomic DNA
atgaatgaaactaaaaaacaagtatcctggatgccattaatcctagtggcttttgcatcatttattatagctcttgatgccacattcatgaatgtatcaatatccccacttgttattgacttaaacacagatgttggaaccatacaaaccataatcagtttttataccttgattacagcttcattgatgcttataagctcaaagatgcaggatgtctttggaaagaaaaagatattcctaactggagcattggtctacggcttaggagcattcattgcctcaatcagccaaaatgcaataatgctctttatcggatggtcactattggaaggtattggcggagcattgatgacacctgctacaatatcaatcataagtggaacatatgacggccagatgcgtacaacagcccttgcaatctcaagcgcaatcgtcggaattgcagcagctatcggaccattgtttggaggtgttgtaaccacattcctatcctggagatatggatttgtatttgaactattaattattcttataatatttatcttccgcaagagaattccaaactttgcatcaactgcaagcaaaaaggatttggacattacaggatcccttctctcagccataggattaatattgcttgtcttaggagttttaatgatttcaggaaagacaatcggattaagcataggcctaatcattgcgagcataatcgtgctaattggatttggactctttgaaaagagaaggaaggcaaatggaaagatgcctttatttgatgtaagcctcttaaaggatagaaatctatcccgcggcacattgattagacttataactgcaattgcaatgggaggctcattgttttcaatatcaatctaccttcagacagttctcaagctctctgcattcaatacagggattgtcctattgcctctcacctttggaatgcttatattttcaataatggcaccgaaattcgcaatcagactaagccataaatatgcaatgataatcggtttttcaattgctattgtgggatgcctccttttaagctatcagtttacactaactacaagattcatcgatctccttccagggatgtttatctatggtgcaggacttggttttccaatggcattaagcgtagatacagcacttataaacacccctcccgaaagccaaagcagtgcatcaggatttgtaagcacaggacaaagtctgggaatgtctatgggaactgcaatcattggaatcatcctaatcgttggagcagttggaggaatgcatgatgcaataaatacctatgctccagataaggtcacaaaccaagaattccatgataatgtgcagggctactttgaaaaattaggaaatgttaatacaacagagcttaagcatgaaaacagcctaaaggaaaagattgtgagcaaggtcgtacaggatgctatgagattggtaatgtatgtgactgcattgctgcttgcaataggaggagcattgacttttaccttaaaaaaacaaaaaataaaaggataa

SEQ ID NO: 1967 - DNA, 1590 bp, Methanobrevibacter ruminantium
  source 1..1590: mol_type = genomic DNA
atgggaaataaagaagaaaagaaagctgcaagacaacgttttgatgagatcatcggcgttgcaaaaagacaccacttagcaaagctattaacaaataacgaagacgatgaagactttgaagtttcagacctaagatatgcaatggaagagctaggtcctgcattcatcaaattaggtcagcttttagctacaaggcccgatatggtaggaaatgatattgcagatgacttaaagcttttaagggacaacactccagcaactccttttgaagaaatgagaaaggtcattgaaggagagcttggaaagccattggaagaagtatactctgaattcaatgaagaaccattaggctctgcatcaatcggccaggtatatagggcaacattaaaggaaagcggcatggaagttgcagtaaaggttcaaaagcctggaatctatgacgtaatcgtaccggatgtaaagatcttgaataacctagctggaactgtagacaaacatgtatccggttcaagaacctataacttacctgcaatggctaaggaatttgaaaggtcaatattcaaggaattggactatatggaagaagtaagaaacatcaataagataacaaataactttaaggatgttgaatacattaagatacctgaagtctatcctgaatactgcagttcaaagctcataaacatggagctcattgacggatacgaagttacagaccttttcgacaatgagattgaaggcatcaacaatacagaaattgcccaatatggaacccaatcctacctaaagcaagtattgattgacggattcttccatgcagacccacacccaggtaacctctttgtaacaaaggatgctaagctttgctacatcgactttggtatgatgggagtggtaaacgacacattcagatcaaacttcgcccaattgatattgctcctattggatggaaactcacaccatttaatcaatcaattgctctatatgaatatcatctccccagaacagaacactgacgagttcagggaagatgttgatgacctcttaaacagctacataggcgtagaccttgatcaaatggatggaatattcgataaccttatgaatgtaatgatcaaccacaatattatccttccaagggaattcatcatgatcggaagaggaatattgctcattgaagatgcaggaaacagattagaccctcacttcaaccttacagccgaacttgaagaattcgctaagaaaatgattaggaccaaattcgagcctggaaaccttgtaggcggaggattcaactatattgtagagattgaacacttattaaaagacttgcctgacaggcttaacagcacccttgacaaggttgaaaaaggtgaattagaattaaatatgaaccacacaggtctcgatgacttgaaaaaccaattatccattgcattgattgtatctgcattgcttgtaggttcttcaattgcaattctagcagacaaaggtccaaaagtatgggacatctctgcaatcggattcttcggattcctattcagcgcaatccttggtgcatatttagttattaagtacattagaaaataa

SEQ ID NO: 1968 - DNA, 468 bp, Methanobrevibacter ruminantium
  source 1..468: mol_type = genomic DNA
atgtataaaaaattaatgatactggcactattttgttttatagtcattggctcagcaagtgcagcagactttaaaatcaatgatggctttaacagctcactgtctgattattctttttacaatgaagaccaaaacatgtacattaatatctgggattatgatgatgagattcttagcgaagcatatctggaaaacagcagcagctatcgcatagtttcaggagaaaacaatacatataactttgtttttgacagctataacgatatggatcatgtaatctcctatattaccaaaggatatgttgccttagactgtggagtattggaaatagctgaagttgatggcaaaaagcaaatcattttggtttctaaagagggaacaaatgtagatagcttgaaaacatgttatgatgaattaatgaaattcaatcagaacaataatatagagccaatagcagatgctatataa

SEQ ID NO: 1969 - DNA, 1938 bp, Methanobrevibacter ruminantium
  source 1..1938: mol_type = genomic DNA
atgagaattaataaatctttattaatgatctcactgcttcttatttcaattcttgctataagcgcagcaagtgctgcagatgacatggtagacgcagatattgacctagcaagttcagaaattagtgaagtaagtgtagatgatgtacaagctacagataaaaatgttttatctgatgcagatgaagtttcagtagttacacaaaacactccttacaatgaaaatgcaactattgatatcagcgtcaacggcactttagctgatgacagcaccataaaacttttcattgacggtgaagacaaaggagatttaaatctatcagcagaaggaaaagcaagttatgttattccagcaagcactctcgatgtaggaaaatatttcattgaagcagtagtacataatggaacttcctcatttggaggcagatccaccctcaacattactaaagtcactcctatcgtaagcgttagtgatgtaactgtaaaaagtggagattatataaccattccatttaatgtaactgatgacaaaggtaaagcaatccctggagatgtcattgtaacaatagtctgggaaaatgatgtaataagcaaacatattaaactaaacgacaatagctctgcaggatttaatattgctgatattattggaatatttggcggaaacagcacaggtaacggaacaggaactggaataggtgacttattcaacagaaacggaaccaacggaactggaaacggaaccggaataggtgacttattcaacagaaacggaaccaacggaactggaaacggaaccggaataggtgacttattcaacagaaacggaaccaacggaactggaaacggaacaggcatcccaggtattggcggaaacagcacaggtaacggaactggaaacggaaccggagacttcgatattgcaagcattctcgcaatgttaatgggaggaggcaataataccggcgctaaatttgcatatgtctttgaaaaaggagtctataatgtaagcgttgaatacttaagcaacagaaactacaatggagccattaacgacactgcaaaactaaccattactcctttagaagatgttttaatcaatgcaaccatcgaaactgctaaaaacatgtctgacaacacaactgtatccatccttttaaccgacggatatgaaaaaccaatagctggcggagaaatcaatgttttcctaaacggtgaagacaaaggaaaagtcactgccaatgaggaaggtaaagcaagcattgcctttagcaacttacttaaaggtgactatgaattattactcaactataaagaaaccaacaaaaccttcgacttctttgtaaatgttgaaagaatgggaaccgtcattgaatatgaagacatgaacaccacctctgtaaacgaaaaagtcgatggcagaatcggtgaatacttccaagtcactttaaaagacaacgaaggaaaagctttagctaacagattcgtccaaatcggattcaacggtaaaatctataacagaaccaccgatgataaaggacaaaccaaattgcaaatcaaccttttctacactggtgattacacctttgctgtatgttacttaggagatgacgcttataacgcatcattcattgttgcaaaaatcaaagtaagcaaacaaactccaaagattacaactaaagatgctacatacaaagcagatgccaaaaccaaaaacattaaggttacattaaaatctgcaaaagacaatgcaattaaagataaaaagatcagtgtaactgtaaacggcaaaacctacactgctaaaacagatgaaaaaggtgtagcaactgtaaacgtaagcttatctaagaaaggaacttacagctttactgcaaaatatgccggtgacagcggatacgctcaagtcagcacaaaaggtatattaaccttaaaataa

SEQ ID NO: 1970 - DNA, 246 bp, Methanobrevibacter ruminantium
  source 1..246: mol_type = genomic DNA
ttggaacttgttatcttcaaggcagaaaacaaattagaggaaatcttcttaaatgcacagttaaaaatgcaaaaggctaaaaatgaattgattaaaaacatggaaaaagacatcgagaaagctattgaattagctgctatcgaagttgaaacccaaataatcaaagaaaacattgatattgctgtagatgccttagaagaaaccattgaagaagaaaaagcagacttagccgaaagatttgaataa

SEQ ID NO: 1971 - DNA, 462 bp, Methanobrevibacter ruminantium
  source 1..462: mol_type = genomic DNA
atgtcagaaatattaccaaaaattacaggacaaataataggacatttcaatgcatttaaaggatcaagaccagcatttcatggtgaacacaccctcattgtaagaggaataagccgtgacaagattgaaatagaagaaatggaacctaaattagcagagcttgaagacattcttaaggcaagagaagttgatgtattatctgatgcaggtaaaaactttgtagaaaaagtagattcatatataagagatgcagaatccattgatacagccccagacagtggagggctccttagaatgaaagagcaattagaaactatgggattgcatgtggaatacaagctattcttaatgccatatgctggagcatttgtagcaatctggaaagacaaatctggatttggtccattatatgtggaagttacagcatctgaaagggaagagactgataatgatatgaaataa

SEQ ID NO: 1972 - DNA, 1092 bp, Methanobrevibacter ruminantium
  source 1..1092: mol_type = genomic DNA
atgtctaatttatccaatattgattttgaaaaccttagtcgcaacgacctaatatccattttagaatgcaaaaaggaagacattctaaaaatcatggatttagctaattccaaaagggaaaacactttcgtcacatattcaaaaaatgtctttatcccaatcacaaagatatgtaaaaatgactgtggatactgtgcattcaagcaaagcccagatgatcctgatgcaaccatattgcttgaaaaggaagagatattagccactttaaaggaagcagaaaaatatggctgcaaagaggcattgtttacaatgggagaggatgcagatgaagaacctgctgtaaaaatcaagcttgagaaattaggctatgagaatatgccagattacatttatgacatctgtaaaatgacagtagaggaaacagaccttctgccacacaccaatgctggaaacttctcatatgaagatatgaaaaagcttaaagaatacaatatctctatgggaatgatgctggaaaactcatcagaacgattgatgaatactattgcccataaaaagagtcctggaaaagatcctaaaatacgtcttgaaactatagaaaatgcaggaaaacttaatattgcatatacaactggaatacttattggaatcggtgaaacaaaagaagaaatagctgattccctacttaaaataaaggaactttgtgataagtatgggcatattcaagaggtaatcattcaaaactttacagtaagtcctggaattgaaatggaaagccatgaagagccaagccttttagatatggttagaaccgttgcagctgcacaattgctctttgatgaggatgtttcagttcaagtgccaccaaacctcaactatgaaacaagccagatattccttctttgcggaacagacgactggggaggagtttctccattaagtgaagactatgtaaatccatcctcaccatggccaacccttgaaaggcttgaaaagctaacaaacgatgcaggataccagttaaaggaaaggttagccatttatgataaatatattaatgaaaaatatattgaaaaatcctatattaattag

SEQ ID NO: 1973 - DNA, 1323 bp, Methanobrevibacter ruminantium
  source 1..1323: mol_type = genomic DNA
atgactaatgaagataataaaaatatgacaattattggagctagcagaggtctcggcaaatggatagcccaacacttaaaagaagactttaatatcaccataacaagccgaaatcaagcagaagggcaagaagtggccaatgaactaaaggttagctacaataatgacaatattgatgcaataaaggatgcaaatataattatcttcagcgtgcctatagagcatatggccaccaccataaaggaagtggctccccatgcacctaagggatcattattaatggatgttgcaagcataaagaaagagcctgctgaagcattggaaaaatacgctcctaaagatgtggagatattgccatgccatccaatgtttggtccaagagtccctacccttaaaaggcagatagtggtattgactccaattgaaaacaggtcaaatagttggacacttgtaaaggaatatctagagaaaaaggaatgcgaaatcgtcattacaagccctgatgagcatgacaaatatatgagcatcgttcaaggacttacccatttctcattcataagccttgcttcaacaataaagaagctaaacataaatgtcaagaagtcaagatcattttccagtccagtctatagcctaatgcttgatatgataagtcgtgttgtctatcaaaacccttacctttactattcaatacaaaagaacaataaggaaactgcatatgcaagagatgcattgattaaagaaagcatgcgcctatcaaaactgatagaagagggagacgaggaagactttgtaaaggccattgcagaatcagcagagcatattgatgaaatcgaagaggctttggtacgctcagataaggcaataagcatgttgaatcaaaaggcaaatatcctaacaaaattaattggagaagaagtgggattggaagatgcattctccaaaaaggcatatataggcattgttagaaaggtcagctcacagactgttacaatagagaatgaaaacaatgaagagattgaattgaagatttcatctattgacataatggataaagatgagctcttccaatggaaaaagaagaatttgaagttggaatcctttgatttaacagcaaaattcccttcaagcgctaatgaagactatttgcttaagatgtttaaaaggattgaaccagttattgatgcaaatatcatctttaaagacaaagagattgaaaaagatttaagaacttataagttccattattccctattcaataagcaagaaaaggattatgttgaaaaatacattcagggaattggtggaatcctaataaaataa

SEQ ID NO: 1974 - DNA, 771 bp, Methanobrevibacter ruminantium
  source 1..771: mol_type = genomic DNA
ttgaagtggaaaaagataggggacattctcatcattgatgataactttgatttggacttgaatgatgagaagactttaaaagatcttgcacataggcataaggtcaaatccataatccggattgaaaagattgaaggtcaaaagagagagcctacaattgatatcttgtatggtgaggatacagaaaccattcataaggaaaacggatgcctgtttaacttggatttgtctaaagtgatgtgggctaaaggaaataataatgagcgattaagaatagccaaactagtccaaaaggatgagactgtcttggatatgtttgcaggaatcggatacttttctattcctattggggttcatagccaggcaaagcagatctattcgattgaaataaatccaaattcctatcattttctaaaaaggaatattgagttaaataaaatcaataaaaaagcaggttatgataggatgattcctattttaggggattgtgcaatagaagcacctaaatactctgcagatagggttttaatgggttatgtgaagacaactcatcacttcttgcatccggcgatggaatgcgttaaggatggtggcataattcattatcatgagaccgttccggataagctgattgaaactaggccttatgagagggttaaggaaatggcatggaactgcggtgaaagggaagttgaggttttaaatattcagcgtataaaaagatatgctccaggtgtagagcatatagttctagatgcaaggatttattaa

SEQ ID NO: 1975 - DNA, 624 bp, Methanobrevibacter ruminantium
  source 1..624: mol_type = genomic DNA
atgagtaataaaaacacttttgaaggtactacaaccgttggtattacctgcaaagatggtgttgtatttgcaagtgaaagaagagcaagtatgggaaaccttgttgctcacaaagtagctgaaaaaatattcaaaatcgacaatcacattgcagcaaccattgcaggatctgtagcagatgcacaaaccttaatgaaagtaataagtgctgaaacttcattgtacagattaagaaatggaaaagacattagcttagaagcagctgctgctgtaagctctaacatattacactcctcaccagcatatgttcaaactcttatcggaggagtagacgacactggagcatcaatctattcattagatgctgcaggtggtatgattaaggataccttcatttctaccggttccggttccacatttgcatatggtgtgcttgaagacagattctatgaagatatcactgtagaggaagctactgaagttgccataagagcaatcaaagcagctacagaaagggataccttctctggaaacggctttttagtggcaaatgttactaaagacggatttaaaatgttagaaaaagaagaagtagacgctattattgaaaagatcaatagctag

SEQ ID NO: 1976 - DNA, 1911 bp, Methanobrevibacter ruminantium
  source 1..1911: mol_type = genomic DNA
atggcttccaatgttttagaacaaattaaagaagaaattacaaagaaacttccagaagaggttaaattagcaaatattgaatttgaaggtccggaagttgtaatatatacaaaaaatccagacatcattgcagacaatggggacctaattagaaacctcgctaaggacttaagaaaaagaatcatcatacgttcagacaagtcagttttagactcttacgaagacgcaatcaagaaggtagaggaaatcgtacctgaagatgctgaaattaacgacataaaatttgatgaagttacaaatgaaattgtcatagaggcaaccaagccaggacttgtaattggaaaatatggagttacctcaagagatatcgtaagaaacactggttgggctcctaaaatcttaagaacccctccaatgagatctgaaattatcgacagaataagaaacacccttttaaacaacagcaaagaaagaaaaaaattcctccaaacattaggtgcaagaattcaccaagggggaaaatatcctagcgactgggtaagattaactgctatgggaggatttaaggaagtaggacgttcctgcatgttgcttcaaactccaaacagtagagtattgcttgactgcggagtaaacgtagcaggccaagatgacaaaacctcattcccaatgcttggagttcctgaattttcaattcaagacttagatgctgttgtcttatctcacgctcacttggaccactgcggattcatcccttacctttaccactatggatacgaaggccctgtttactgtacaagtgcaacaagagacttgatgacattattgcaaatggattatattgatatcgctcacagagataacaatcctctcccattcaatgcaaagcatgttcaaaaggaagttaagcatacaattacattggattacggagtggttactgacatttccccagacatcaagcttacattgcataatgcaggacacatcataggatctgcaatgtgccacttccacattggagacggagcacataaccttctatacacaggagactttaaatatgaaaaaagcagacttcttgaacctgcaacaaccagattcccaagagtggaaagctgcattatggaaagtacctatggaggacatgaggatgtaaccccttcaagaaacaatgcagaaaaggaattgatgaaaaccatctacaaaacaattaaacgtggcggaaaagtattgcttccagtgtttgctgtaggaagggctcaagaattgatgattgtgcttgaagagtatatgcatcatgacataattgaaaccgtacctatacatcttgacggaatgatttgggaagcaactgcagtgcatactgcaagacctgaatacttaagcaaggaattaagagatcaaatccttcatatgagccgtaacccattcatgacagaatcattcaatcaggttcaaaacaatgcagaaagaaaggaaatcgttgaaggagagccttcaatcatattgtcaacttctggtatgatgactggaggaaactctgtagaatacttcaaatggttatgtgaagacaaaaagaacactcttatctttgtaggataccaatctgaaggttcattaggtagaaaaatccaaaaaggacataagcaattaccatttgaagatgaagacggtaagacaagggttttcaatgtagaaatggaagtcaagaccattgaaggattcagtggtcactccaatagaagacaattgatggaatttgctaaaagactacacccaagaccggataagattattacctgtcatggagacccttataagactgttgacttggcttcaagcattcatagaagctttaaagttgagacaaagactccagtcatactcgatgcagtaaggttacaataa

SEQ ID NO: 1977 - DNA, 1020 bp, Methanobrevibacter ruminantium
  source 1..1020: mol_type = genomic DNA
atggttacatattcagaatcaggtgttgacattgaccttgaagcattgactgtttctaaacttgcttcaaaattaaaaccaacattagaatacagaaatatcattactgacagtggacattttgcagctttagtagaacttggagataaggccattgcaatgagcactgatggtgtagggagtaaaatcttagtggctaaaatgatggagaaatacgataccgttggaatcgacatgattgcaatggtagttaacgacattctctgtgtaggtgctgagcctatagcattagtggactatttggcagttgaagagccagatccaaaagttgctgaagagattgcagacggattagtcaaaggagctaccgaatccaaaatcgcaataatcggaggggaaacagcatcacttccaggaattgtaaaggatttcgatttagctggaaccggaatcggctttgtagacaaggacaaaattatcactggtgcagacatccaagaaggagacatcttaatcggacttagaagtagcggaatccacagtaatggattaagccttgcaagacgtgcaatattcgaagatggaggatttactgtcgatgacaaaatgcctaattcagacaccacaatcggtgaagaattattaaagccaacccaattatatgttaaagcaatcattgaccttctaggacaaggatttaatataaaaggacttgctcatatgactggtggcggagtaaacaacctttcaagacttaaagatggaataggctttgaaatcactgattatccagaacctcaagatattttcaaattgatttaccaacaaggagttcctttagaggaaatgtataaggtcttcaatatgggaataggatttacagtaatcgcaagccctgaggaagctgatgcagtccttgaagcattaaataaaaatattgaaagttatattgttggaaaagttattggcgaagagaaaatagttgtaaaaacctttgaaggcactgaaataacttattaa

SEQ ID NO: 1978 - DNA, 990 bp, Methanobrevibacter ruminantium
  source 1..990: mol_type = genomic DNA
atgaatattagtgttaataaagaacgagaactagtaaaagaaatattaactaaaatcggagtaaaggaaaaccaagctgatgttgtaacagaagcaacaatagactctgatttaaaaggattcacttcacacggacttggaagattcccacaatacataagaggaatcaaaagaggacatattcaaattgatggggaatatgacatagtccaagaaactgaatcaatcgcattgattgacggtaaaagtctttttggacaatacatagctcatgaagcaatgagcttagcaattgaaaaggctaaaaagacaggtattgctgcagtaggtacattcaatgctaaccactttggaataactggatattactctgatttagccattagaaatgataccatcggtattgtaatatgtaatacagaacctggagtagcacctcttggaggtaaaaaagcaattcttggtactaacccagtggctataggaattccttccgacacttatattgctgtagacatggcaacttctgtcagcgctcgtggaaaattattggaagctcaaagaaaaggtgaagagattccaccaaacactgcaatcgataaggatggaaacccaacaaccgatcctgaagctgcattagaaggttccatcttaccatttggcggagtcaaaggatatgcattaagccttatgattgaaatcatgtctggacctttagtaaacgctgcatttggtacaaaagtaaccggaactgcaggtgactataaggaaaactgtaataagggagacttattcgttgctatcgatccttccaaatttgttccaatcgaacagttcaaggcagacgttgaagaattcgttactgaaataagagaatccggtgacacattcataccaggagaccttgaagtaaaaagaattgcagaaaacgaagtcaaaggtttagacatagatgaaaaactctatgacaccttagaaaacaatttgtga

SEQ ID NO: 1979 - DNA, 393 bp, Methanobrevibacter ruminantium
  source 1..393: mol_type = genomic DNA
atggtaaaacctgttaaaattcatgacaataatctttgggataagtttgttaaagagactgaatcctattgggctgttttaagtccaggtactgtgattgctatatttattggcgaaactgataagaattttttattgattgagagaaaagaaggaactgttgagtctaaattcaatataaataattctcttaatatgatggatactggtctctttttcacaataactgaagaggatgcatccgatttattagatgattccagtttattgactacttttattaaagaaggtaaattaggcatattctgtttagtggatgattatgcaatggctgaaaagggtcttgatactttattaagcgatttaggctttgcaccatcttgtgctatttaa

SEQ ID NO: 1980 - DNA, 384 bp, Methanobrevibacter ruminantium
  source 1..384: mol_type = genomic DNA
atggaagaaaaaattgctttagctgcttgcagtggtatgagtccaaatggtttggttgcaagagttgcagttcatgatttggctattgacgatcatgagattttatctatttgtatgggttcaacttctgcaaatgtggaaggatttacaagagttcttgataaatatcctattttagcaatcaacggttgtgaaggcaactgtgttggtaaaatcttaaaggaaaagggtgttgatattgtaggagaacttaatgttggagatattttagcagaaactgaatacaaggctaatgatgctgcaaggttagatgatgaaggagaaatctgtgtaaagattgtaaaggacattatagaggataaaattaatgaattaagtgaataa

SEQ ID NO: 1981 - DNA, 1917 bp, Methanobrevibacter ruminantium
  source 1..1917: mol_type = genomic DNA
atggttaaaaggaatattgttcttttagatattgattatataactcatgacgaaaaggcagtcatccgcctatttggcaaggtaaagggaggagaatctaatgacatcatcgctatagatgactcttttgtcccttatctttacattttgcctcttgaggatatagataaatgcataaaagacataaacggtctaaaagaagaaggagaaattgaatttaccaaattggaaaaggtaaacaagaaagaccttcaagttcctaaggaatttattaagatgaccttaaaccatcctcaggatgttccaaaatacagagacaaaatttgggacttaaactctgtaaagcaattaagggagcacgacattccattttatagaagatacctgatagataatgccttagttcctatggctgaattggagcttgaaggagagcttatagactcatttgaaacagtcgattctgacgatgaatcccttgaaatacttaagctaagctgccctccaaagactgcaaacactgattttcaggaatttcgaatgatgagctttgaccttgaggttcgaaaccctcatggaatgccaaatccagatcaagatgaaatcattatgattggaatcgacagcaatgtaggtgttagaaaggtcatctcaacaaaaggggatgaatttgatgatgatgaggaaatggactttattgaaattgtggaaacagaaaaggaaatgattgaacgcttcgttcaaacggtcaaggatgccaatatcgatattataataggatataactcagataattttgacttcccttaccttagggatagggcaaagagatgggaagtggatttggatttaggtgttgacggctctggacttaaatttttaagaagaggctatgcaaactctgcagcctttagaggccttttgcatgttgatttatatttggttatgagaagatacatgtctcttgatagatataccttggaaagggtctatcttgagttctttggagaggaaaagatcgatgttcctggtgagagaatctatgaattctgggacaacggcggagatgagctgaagaatctctttaagtattccttggatgatgtggtagccaccttaaagatagctatggaaacattgcctctaaaccttgaactgacccgtatcgttcgtcagcctttctttgacgtaacccgtatgtctacaggccagcaagccgagtggtttttagttagaaaagcttatgaggttgatgaggttgttccaaacaagcctaatatgaccatgaataacattcgtgaaagaggcagcaattctggaggctatgtaaaggagcctgaaattggtttgcatgagaatcttgttcaattcgactttaagagtctgtatccaaccttgattatttcaaaaaacatctctcccgatgttttggtaactgataatatttcttataatgccaagtttgaagactttgagacaggatatgatgaaattgacagtgttttggaagagactccaagtgaggatttggatgaggaggattattatgtctgtcctgaacacttctttaagtttaaaaaggagccacaaggtttcattccatcagcaattgaagacgtattgaatgaaaggtttagggtaaagaatagaatgaagcaaaccgaagatccggtactcagaaaaagtctggatgttcagcaacaggccttgaaacgtttggcaaatacaatgtatggagtttatggatttttaagattccgttggtattcctttgaatgcgctcaggctatcactgcatggggacgtcagcatattaaaaaggccatgaaggaagctgaagactttggatttaaggccatttatgcagataccgatggattttatgcaaaatatgttcctgaaatgaaaaaagaatga

SEQ ID NO: 1982 - DNA, 1086 bp, Methanobrevibacter ruminantium
  source 1..1086: mol_type = genomic DNA
atggtccttttaggtgccatgattgcatatggtttgacacctattgctaataagattcaaacaaagattaaatatccttcgatttctatctttttagcattgatccttgttgtaattccattgatactgctatttgcatatgtattttatgaaattacagtttttgcagatgtattctttaattctagtgatttggctggaatggatataaataatgccctaaatgccttcgttggtaatttgccagttgaattgcaaggcttcattaaaccttatatgggttctctatctactggtttggaaagcgctttatcttatgtattggcttatacagttaaattggtaaaaggattttctaatgttttaattcaattatttgtattaatctgttcaatttattactttactcgtgatggagaccttatatgggaaaatatctttgtatttatccctaatgagcataaggctttctttgatagaactttctatgaaattgctaatgtattgaagtcaatattctacggtcactttttgactgcagttataattggtgttatgggcggtgtaggatattacttattaggctataaatttgctttgtttttaggaataatcactggaatatttcagttgattcctatatttggcccttggattgtatattgggctttagccatttacgccatatttgtagccggagatattgttcaagcagtcttaacagttttgtggggatttgttctcagtttaagtgatatgtatatacgtcctgtattggcaagtaactatgcagatatgccttctttgattcttttggttggatttatggccggcccttatgtatttggaattgtagggtttattttaggtccattaattttaggagtttgttatgctgttattaagtctttaaaagaagaattagaaaaggataattggaactctggagatgaagagggttctgatgatggtgatagtgaagatgtaaaagaaatttctgataatcttgatgaagtttctgatgataaaaaggattctaatgaagattcaaaagatttggatttgggaattgaagaaaaaatttaa

SEQ ID NO: 1983 - DNA, 810 bp, Methanobrevibacter ruminantium
  source 1..810: mol_type = genomic DNA
atgaatgtgccacaagttttagaaattaaaagaatcatagaagaaactccttcaattaagacttttatttttgattggacaatggtaggtgaaaacattccaactccaggccagtttgtaatggtttggaatttcaatgacgaaaagccaatgtccatttcctatattgacatagctaaaggagaattgggaattacagtaaagaatgttggggaatttaccaatcagctccacagccttgaagttggagacagattaggtcttaggggaccttatggtaatggctttgacactgatttaagagacatgaaagtcttggcaattggtggaggagtaggaatggctcctattgcttcatttgctgaagaggcattgaaaaacaaggcgattgttgatgttgtatgtgcagcccagacaaaggacgagctcttatttgatgaaagattaaaggaaaaaggggcaaccgtttacacttgcactgatgacgggtcctgcggatttaagggatttgcaacccatagggctatagagctaatggctatgaaaaagtatgattgggctgttgtctgtggtcctgaagttatgatgaagccgttatacggcacattggaatcaaatatgattgatggagagtattccatggaaagatatatgaaatgtgccattggagtatgcggccaatgctgtgtggacaatacaggatggagaatctgtgttgaaggccctgtattttctacagatcagatgtctgagataattgaattcggtgagttccatagaaccgcttctggattaaaagagttttattaa

SEQ ID NO: 1984 - DNA, 837 bp, Methanobrevibacter ruminantium
  source 1..837: mol_type = genomic DNA
atgttaaaaactaaattatgcggaattagtttaaaaaatccattaatgcttgctgcaggtgttttgggaagccatgcatcttctcttaattggattttaaattctggtgcaggtgcagttgtatcaaagtccttctcaaaggaaccaaacgaaggatacaaaaatccaaccactgtagctgttgagggaggtatcataaacgctatcggactttcaagccctggcgttgatgcattcatagaggaattggaatctgtaaatagaatcaaaggcagatcaatcgcttcaatctatggagcaactcctgatgaattttcatatgttgcaggcaagattgaaagtttggttgacatgattgagatgaacatatcctgtcctcatgcaatggaaggatatggggcttccatcggtcaaaatcctgatttaacaagagaatttgtctctgcagtaaaggatactgtcagcgttcctgttcttgcaaaattaaccccaaatgtaacaaatatttctgaaatagctattgctgctgaagaagggggagctgatggtttgaccttaatcaattcattaggccctggaatgaaaatagatattataactggaaatcctattttggccaataagtttggtggaatgagcggccctgcaattaagcctattgctgttagatgtgtttatgacgcttatgaggcaacagacattcctattgtaggtgttggaggcattcgcaactacactgatgttgtagagttcttgtatgcaggtgccagtgcagttcaaataggaacatccattatgtatgaaggtcctgaaatatttggcagaatccgcaaatga

SEQ ID NO: 1985 - DNA, 1281 bp, Methanobrevibacter ruminantium
  source 1..1281: mol_type = genomic DNA
atggaatactatataacacaatttattgcaggatttattgcttttgatgaggatttgaaaatagccaattataaattatttgatgatgagaatattgtttcaaataatcttaaaattgaaaataaggaattattagaagaggagatagaattaattaatgaactgtcttctgatgattctacaatcattatagaaacaagaaaaagaagatcccaatataaagagcttgacaattatgaaaatataatagttgagactccaaataaaggtggagaacacttaagaaataatttagagagcattctattggaaattggctttttaaatgatgataaagagaatatcgatgatgtagaagaaaatataagtaatttagaagagccaaaccaagaaaaatactctgaaattacaaaaatttatgaggacatagctagcctaaaagtaaaagagtcctcacaagaagaagataaactacttattcaagcaataaacactgtagatgaccttgatgaatcaatcagcaaattagtggaacgtattcgtgattggtacaccatctacttccctgagatggacactataggaagcaatgaaacatatatcaaattaattgcagaaagcgaaaacagggaagacatcattaaaaaccataaagagcactttgatatagacttggatttcagcactggagcagacatagaagaatatgacttaattatggtaaaaagctttgcagagtctatctattcacttcaaaggtctagaaaagacttggaaaaatatatagatactaaaatggaagaaattgcacctaacttaagagatttattaggccctacacttggtgcaaagcttatcgctcacattggaagcataaaaagattagccacttatcctgcaagcaccgttcaaataatgggcgctgaaaaggccatattcagacatttgaaaactggagagagacctccaaagcacggtttgatattccagcacccaagcgtaagaggtgcgaaatggtggaatagaggaaaagtcgctagaaatctagctttaaaaattactttagccgttagaaaggatgtctttagtggagaatatgatccaaaaatagctgaagactacttgaaaaaggtagaagagatagaaaaagaaaatcctttccctaaaaagacaagcagccgaagaaagtctgaaagacagatggaaaaagataaaaagtctaaaaagtacaagggaaataagaaaaataagaagaataaaaagagaaagaaaaggaaatag

SEQ ID NO: 1986 - DNA, 651 bp, Methanobrevibacter ruminantium
  source 1..651: mol_type = genomic DNA
atggaaatatttttaaaagatcaagacatagtcacaaggaatctaaggcctggaatcaaggtctatgatgaaaagctaatccaagaagagggtagcgaaatcgaatatcgcagctggaatcctagaaggtccaaattagctgcggcattattaaacggtttagaaagcttaaaattagaaaatgactctaaggtattatatttaggagcatctaccggtacaactgtctcacacatttcagacattgcatatgacggattgatttatgcagtggaattctcacctgtaagcatgaaaaagctaattagactctctaagcaaagaccaaacattgctccccttcttgaggatgcgaccaagccaaaaaattatttaaacaaggtcgaaaaagtggatttggtctattgtgacgttgctcaggaaaaacaaagcgaattattcatgaataatatgaaattattcctaaaggaagatggacaaggcctcattactataaaagcaagaagcatagacgttgttcagaaacctaaaaaaatcttcaaggaagaggagaaaaaattaaaagctaatggttattccattcttgaaaaaattaagttagaaccttatgaaaaagaccatattgcttttttagttgaaaaatctttctaa

SEQ ID NO: 1987 - DNA, 1221 bp, Methanobrevibacter ruminantium
  source 1..1221: mol_type = genomic DNA
atggaaattgtattatgtgtaacaggcagtgtagctgcagtggaaactgttaagttagctcgtgaatttaagcgtcaaggccattcagtcaaggcatttatgacccaagaggctacaaagatcattcatccaaatgctttagagtttgcaacaggtcaagaggttgttctagagctcactggaaagattgagcatgttaaatattctcaagcagacctaattttagttgctccagccactgcaaatacaataagtaaattcgcttatagaatttcagataatcctgtaaacacccttctgataactgcctatggccatgacactcctatcgtatttgttccatctatgcatgattcaatgtatgatgcagtgagtgagaatgtggcaaagctaaaggaagagggaattgttttcttaaatcctcgcttggatgagggcaaggcaaaattcccagctattggggatattgttcttgaatccattcgcactgttaatcttgatagggttaaaaagaatttaactgacgattctttagatgaaagcgaaattgaagatttaaatatggaaatgctttctaaaattgcaggattaaatgttttgataagtttaggtggaacatttgaagagatagatcctattaggggaatatccaataggtcctctggtaagatgggtcttgaattggctaaagaggcttataggcttggagctaatttaaaaatccttgctgcacatcatgaagtggagattcctaaggtctttgatgtgattgatgcaaaatccagtagcgttatgagcgaaaagacaattgaattggttccagattttgatgtattcattgccactgctgcagtttcagactttgctcctattgttaaggaggattataagatttcttcatcattaaatctttccttagagttcgaacctgttgccaagattattcatcagataaagaagattaatccagacatatttttagttggatttaaggcagagtataatattccagaggaaagaatgattcaatgtgctaaaactcaaatgcaagacgcaggtacagatttggttgttgcaaatgatgtttataagaagggctgtgagtttggatctgattccaatgaagtgattcttgtaagtgatgagattaaaaaagtaggtcttaattccaagtctgagatagctaaatcaatatttaaggaaatcgctaataaaatttaa

SEQ ID NO: 1988 - DNA, 564 bp, Methanobrevibacter ruminantium
  source 1..564: mol_type = genomic DNA
atgaaaaagattattggtattatttttataatagttatattggttattggaggttctttagtttataaaaactataaggactctcaaaatactgtagataagtcccaagagtctatagagataagcaaaaatggaattacaatgttaattccaggtgattgggtggaagcgaaatctgaatctaatactacagctatagcagctgcagaccctgcttctaaagactcagcgggttttagtagtgttaatataaatattgaaaagaaaacaagttataattctctttcgtatgaattcaataataattataaagctttaggaagagactcttcttacgatattctatatgaaggaaatgtgtcaattgcaggtaccgaaggtatggaagcaggttatacctcaagtaagaccggttttttaaaacagcataaggccatttggtttaagcaaggggatgacctttatgttatcttatgtactgcgccacagagcaagtttgcagaggaagaaagcacttttgactttataataaataatcttaaatttaataattcaacaaattag

SEQ ID NO: 1989 - DNA, 735 bp, Methanobrevibacter ruminantium
  source 1..735: mol_type = genomic DNA
atgaatcaagataaaatgaagcttatgcagattttaaagaatcttgaaagagattataatgatggtctgatttccgaagagaaatacatctatctttcaaaccagtataggcataagatcgatacaattgatactagcaataggataaggactatgcaaggcaaaaagaaggtttctcctcgcccttattcaaaatatgaagatgctaattatcaaaaaagtcgtgatgaggatgaacgtttagttgaaaaatacatccacaatcctgaatcttataatattaattctagaggaaagaaaaccaaaagcggaggaactagcccgtggtatattgctttagcagttattttcttgctttttgcatttggtgctggaattagctttggaatatttagcgaaaatacaaatagtgatgtaggagatattattacagctagtgcaacaattaatgacacagcttttcctgaagtaaaacagacttataagtacaatcgtacttcaaattatactaaatactcctcaaactcttattcaagcgattattctagtggaagttcttataattcttataattcctatggcggatcaggttattcaagtggaggctctggttattctagcggaggttctggctattcaagtggaggctctggttattctagtggaggttcttcttactctagtggaggttctggctattccagtggtggttctggttcggtatcgattgattag

SEQ ID NO: 1990 - DNA, 828 bp, Methanobrevibacter ruminantium
  source 1..828: mol_type = genomic DNA
atgataaatgataaagttgcatttttaggccctcaaggaacattttctcacgaagctgcatcactgcttagcgataatttgatttcatactgttccatacagtctgtaatggatgcagttgagcgaggggaatgcagatatgggcttgttccaattgaaaactctatagaaggtccagttagtctaactttagattcattgattcataattttgatttgaagattagaaatgagataatcattccaatcaatcataatctattggcggcctctgatatttcagtggatgaggttgaaaacgtttattcgcatgctcaagccttagggcaatgccagccttatcttgaaaggcacaatatggtcgcccattatactttaagcactgcagctgcagctaaacatgtggctgaaactggggaggatgcagctattggaactttgaaggctgcagaattatatgatttaaaggtcattgacacaaacattcaagagaattataataatgagactcgttttgtggttttggatactgaagattctccaattaccggaaatgacaagacttccatctccttttcattatttgaagataagcctggtggactttatgagttattgggttattttgccagtgaaaacattaacttgactaaaattgagtcacgtccatctaaagaaggattgggccattatattttctttgttgacttggaaggtcataggttggatgagaatattgctaaaattctaaataatttggaggacaacacttcattttttaagattttaggctcttatccagtttattctagagaactattcgattaa

SEQ ID NO: 1991 - DNA, 819 bp, Methanobrevibacter ruminantium
  source 1..819: mol_type = genomic DNA
atgaaaatcaaaaatataatgtcagaaaatgtggtatcaattgataaaaacttaaatatctgtgactgtctaagaatgatgtataaggacaatttgtcaagaataccagttaccagtaccaatgaaaacaaaaaatctttagttggaattatctcagaaaaagatatagctaataaattaggatcagttaaatatggtaatttagctccttctcatttccatgtatctacagttatggtaaaagacttgattactgtagatgcagatgatgacttgacagatgtggctaatattctaattgaaaagaatataggtgccattcctgttttatcagatggtgaaatggttggaattgtaactaaatctgatttcatatacctttgtaaggcaaaagcttatgaaaaggtttcagttaaagatattatgacaccagatattatttcaatatctgctaatgaccgtttgattcatgcaagaaaagttatcatggactctggagtcggacgtctattattgactgaagataacgaacttgcaggaattattacttcaaaagacattgcaaaagcattggtttcatttaggaaacacactcctgaaaagcatatggcttccaagattaaggaactggttgcaggagattatatgtctacaaacgttcagacaattagtgaagatacaagtattcctgaacttgcagatgcaatgttggagactggatataatggttatcctgtagttgattcaaatgatcagattataggaatcgttactcagtcagaccttttaaaattaatttatgagatggaaactcaataa

SEQ ID NO: 1992 - DNA, 885 bp, Methanobrevibacter ruminantium
  source 1..885: mol_type = genomic DNA
atgaatcgtggttctgttgaacatgaaagcaaagtggctgaaaatgaaggcgaaatcatgactttagctaaaaaagaagtcattagcattcctcaaaccaagacaatcaaagaagctgctgaaatgatgatagaacatgaattcagaagattgccagtgactcaacctggttcaaataaacttttaggtatcgtaacagctatggatattcttgatttccttggaggaggaagtaaatttgacataatagaaaagaaacacaatgataatttcttggctgcaatcaatgatcaagtcaaggaaattatgactcgtggagtaatttctgttggccctaaggctactattagggaaagtgtcacaaaaatgactgaaaatggtattggatctttacctatcgttgataaggaaggtaaattggtgggaattgtcactgaaagagattttgctttagcacttgcaggctccttgaccaatgaaactgttggggacctcatgattaaagatgttatcacaactacttgcggaacccctattgaaagttgttctaagattatggttagaaacaacttaagaagaattcctgtagttgaagaagacaagttagtaggtattgtaacttctactgatattttaagattcttcggtgataaggaaatgtttgcatccatgacctcaaacagtggtttggatgtattgaaaaggcaaatctctgatattgtgaaacctaatatttcagtaactgaatcttatgttaaattaggagatttatgtgatttattagctgaaaagaacattggtggtgttcctgtagtggatgataacaagcttgtaggaattatcacagaaagagatattttaaatgctgtacttagtaaaaagtag

SEQ ID NO: 1993 - DNA, 1113 bp, Methanobrevibacter ruminantium
  source 1..1113: mol_type = genomic DNA
atggctgaaataaaaaaacaagttagaacaagagatttcataattagtacagacggattattattcgcttcaacaaactacattcaccctgaagatagaatcatttcattcttaagatacattccagacgagaacggagacagagaaaaggatggaatcaaatactcaaaggtaggctcagatgaagcttatgcctatttaagggaaaaccacccggattacttatatttctgcgatgtgacaaatgttgaaatgatgggagttccaatagataaggtcgaaagaatcatcaagcctgaagagagacttaaaggtcttagggaaacctatatcccaattatcaatgaaaagctagaaaagggagaggatttggattataaggaagaacttatgagcaagctaatagatctttcagactttttccactatatggctagcattgactacaacgaccttggaatatcaggatcaatattgcctggccttcaaaaggcaggaacctcagacctagacttcgttgtattcggtcttgaaaatcatagaaatgcaatcaaggcatataaagaaaacaaggacaaaccagtatacattgaagagctagacaaggaaatcacattaaacagaatcaatgacgacttctgggactttgtctatgacaaaagaataaaggacgatagcctcaccaaagaagagtttgcttggtatgaagaaagaaagagcaatagaggccttatcagagaaacccttttcgatatcttggcaaccagaaactatgatgaaatcgaaggaacctggggagacacagtatatgaacctgaaggatttgccaaagtcaactgtacaataaaaagcgcattaggagcatttgacaatcctgcagtatatacaatcgaagatgtggaaatacttgaaggacctgacattgaaatttcagagcttgcatcattaacccacacctatgctggagaggtaatcgacggagaggaagttgttgcaagaggaaaaatagaaaaggttcttaaaaatggagagttcgagaaatatagaattcttgtaggaaccactagagaatccttgaatgaatatataaagttaagagaaagccctgtataa

SEQ ID NO: 1994 - DNA, 4497 bp, Methanobrevibacter ruminantium
  source 1..4497: mol_type = genomic DNA
atgaaatacaaaaaagaattaatattcatttgttttattatttgtatgttaagtatggctagtgtatgtgctagtgatgttaatgatacatacataaatcaaaatgatttaaaaatcgataatcaagataattgtattaattatgaaaaagtagtttatacagaggaaaacttagaaaataatttaatttcaactgaagattctttggaggatagcaattctattgaaccgtctgattcatttaaacaaaaaaattcccttaatgaaggaaattccgatgaacgtttaaatccagaaatagatgttgctttgaattcaatccatgttaacgaaactgctgaagtcaatgttacagttagaaatgctagcggatatgttttagtctcagtggatgatcaatcttttaataaagaccttactgattatcaggctagattcaatattaccggacttggctttggaaatcacaatattgcagtctattatggaggggacgataactatcttccaggatttaaattggaaactatctctgttgaaaagtaccaaacccaaataagcgagattgaaatcggtgaagtttattatggggaagatgccattattgaagtcagcgttcccaatggtgttgaaggggatatcacaatcaaaatcaatgacactctccaaacagtgattactgaagccattcatgatggaatggcattattttcagtttctggtttggctgtaggcagctattctcttgatgccacatataatggaaatgattattatgaaaacgatactgcatctgccgaatttgaagttaaaaaagcagatccgaatttaagcgtggtatcatttgaatgcactgtttatgacaatgctacaatactggcttcaatcaatgaagagattcatgacgagtttgtaaacattactgttggagatgagaaatatgaggactgtcctattgaagattatggtatgatagcatttacagggggagttctctcaaatttttcctcttaccgcattctcatagaatatgggggcaatgagaatttcgaaagcgctatgatcgaagcctttgtgactccgaaaaagatcactacctatggccttgatatcattgcccagaatatttccatcaatgatgatgaaatcatttctgttgtagttccagaccatgttgacgatgtggtcgtttgggtagacgggcaaagctatcgcaactgttcctttgaaaacaatgtggctgtctttaacgtcacaggtcttggcgagggggtttatacagttaccgctacagtcaatgacacagagtttgaccataagaactttacaagcatctttactgtaagcaaggttcttccttcaataggcatttcaatcaatgaaactgaaatatatgtgggggacaatgttaagattattgtaagccttccaatcgatgtatctgaaaatgtctccattgtctttgatgaccgtgaactttcccaaaagccagtggatggaaatgccacattctacattgattgcttaagttatggaaacaagtcagttccagcaatctattatggtgatgaaaaatacagaaccgctgttgaatctattaatttcacagtcaataaagtgccttcatttttaaatgtggctgtggagaatatttcaattagcgataatgaagtgattaatttttcattggccaatgatgcaagcggcaacattacagtgattgtcaatgatgaaacttatatcgttgctgtaagcggtggaaagggaacccttacagttccaaaattgaatcaaggagtttattctgtaaatgcaagttataatggtgatggaaaatacctcccttctctaaacaattctgaaagctttaaagtgctggtcaacagtggtcaaatggagattatcgatgagagaaacaatacagtttctgtctatctatgggatggggcaacaggaaatctaagcgttaagattgatggaaaagtctacaatgcaactgtggtcgatggctttgcccaagttgtgataagcaatgcaagctatggggctcatcatgcctatgtgctttacgaggacaatgaaagcgatttgaaattggaatccgtcgttgatgtgtttgttccaaaatatctaagccctattggcataaactcctcaattttaaaggttggggatattggatacattaatgtgacagttcctatgggggcaagtggaaacataagccttgaaattgacggcaaatcttatttaattgctattgacaatggaattgcagagtttgaagttgagaatttaactgcaggggataaaacaatatttgtcaaatattccggagataaggtctatagccaaaattcaacatctgaaagcttgacagtattcaagcaggaatcctctacccattgctctattgaagatatctctgttggagatgtggctcaaattaaaataactggtccaagtgatgttttaggtacagtgattgtaatcataaatggaagcgagtacactgcaagcatttcaaatggagagggaatattgaatgtctataatttgcagaatggagattatgacattgaattaagctatttggaaaattcaaaatatttatcctctgaatatagggacaatctaagtgtttctaaaattcaaacagccatatcctcttctaatattgtttgccaatacaattatgaaggatatttgaatgtaagcttaaaggatattaaaggcaatccaatatcctgtgcagagctttctatcgatcttgatggagtgaaaaatttagtttccgatgtcaatggtcaagtaaagattccaactaaggatttggatgcaaatgattattctgtgcttataagttttgcaggagatgaaaaataccttccttcaaatgctaccgttaatgtgactgtaaataaggatattcctcagatcattgcttcaaatctaattgcagattataaatcagatgattatctcattattggattggaggatagtcaaagcaatcctttggctggctttgatttgtctattgctttgaatggaattgatggtgattatgatgtttattcaaccgattccaatggtattgtgaaagttcctattaaggatttagctgcaaacgactatattgcatctattgtttttaagggcaatgcaaattatgatgctataaattccactgttaaggtgactgttgaaaaggccctttcctctttatttgcattagatctagttactgttcatgaatctgatgattatatgatcattgctttgaaggattcttgtggcaatcctttggtcggctttgatttgtctgttgatttgaatggaattgatggggactatagttttaatgaggtttattctaccgattccaatggtatggtgaaagtatctacaaaggacttggatgccaacacttatgatgtaaaggttaaattcgatggaaacgaaaactatacagaatcaaatatcactggaagcattattgttcgcgaagacataatcatagttcctaatgcaagcattgcctttactgccaatgatagttctgtatcagcgattctttccaatctcgatggagtccctatttccaatgcctctttggatattagtgtaaatggcgatgaatccacacttattacagatgcaaatggcagggttgcaatcaaaataaatggaaacagcactgtgattgcaagctacaaagacgaaaacaatctaagcactacaggataccttaatgtcatcgtcaaagataatataactgtagtcgaaaagaacaacaccatttatgtaaatcagactgttgaggttcctgtctatatcaatcagactgttgaggttcctgtctatatcaatcagactgttgaggttcctgtttatgttaatgtaactcctaatagaactgcaactatgattgtttataataatatgactaccgttgcagttgctaaagtggatggaagagttggagaatacttctatgttagcttgaaggatgccaaaggaaatccattggcaaataaactggttcaaataggattcaatggaagggtttatgatcgtacaacaaatgctacaggtggagttggactgcaaataaaccttggaaacgaaggcaaatacacttttgctatttgcttccttggagatgataattataccggttcctttgaagttgctctcattacagtaagcaagcacagtcctaagctcactgcacctgcaaaatcatttaaagcaagtgctaagacaaaatccttgactgctacattcaaatccagcaatggcaatccaatcagtggcaaaaagctaagttttactgtaaatggaaaaacatatactggaacaacaaacgcaaaaggagttgccactgtaaagatctctttaaataaaaaaggaacatatagttgtactgttaaatatgcaggagatacaatgtataaggcaacaactacaaagttcaatgtaaaaatagtttag

SEQ ID NO: 1995 - DNA, 939 bp, Methanobrevibacter ruminantium
  source 1..939: mol_type = genomic DNA
atgttaagtatttcaacaattaagacatatatgttttgtcctttgaaactctattttcaaagtgaaatagatgaaatctatgacgaagaagagtattttgttccaaagaccttgaaagatctaagaattgacattcaagaccttttacacaagaacctaagacttgtaaaaaaggatatggaattaaaagaaatcgaagagacattgtcaaaaggagttttcaatcaaattgaaactaccttcgagataattgaagagctaaacgaaactaaaaaagaaaaagaaagaagagaaaagtcttcaatctataaggattcaaatatagaatttttagacgaagacagacagattctcaatgcatcccttgaagataatgatggaactcttgaagacttggataatgaagaagatgaaatcaagaagctgaaagatgaaatcatcgatgaagtaaacttaaatctaaaaatcctctcattgaaagcttcacaagctatgaagaaccttgaaaaggatggaaacgaaattcagaatttattcttccaaagttccatgtacaacactctaattagggatttgggaatagatttgattggagtcatagacaaaatcgaagtggaaaagggaaaatatttcccaattttattaaaaacttcaaatcctccatcaaaaggagtttggcagtcagatgaaatagagctaattgcaaatgcattgctggttgaaggagaattcaatacatacattactgtaggattcgtagaatatttaaaaataggcgaacgcagacctatagtcattgacacctttgcaaggaaaaagttctttaagcttttaaccaaaattaacaaaattgttgaagacggagagattcctcatgtgaaaacaagtgttaaaaagtgcagaaactgtgaatacagagagttgtgtgaaaaggcttaa

SEQ ID NO: 1996 - DNA, 660 bp, Methanobrevibacter ruminantium
  source 1..660: mol_type = genomic DNA
atgagtagtatttcattaacaattacaactaaagaagagaaaggagttttagatgagataactgatgttctcaccagtcatggagtcaacatatcctatgttcatctttatgtcaaggaggatgtaggaactttaaatcttgaacttgaaaatatcaatgagcttgatgaacttataagggatttaaaatctaaggatttcattttggatatagaaattcatggctcattaaatgatattttcggtaaaagggttcttatctttggtggcggtgcacaggtttcccaagtagctgtaggtgctattacagaagctgataggcataatatacgtggagagcgcattagtgtagacactattcctttagttggcgaagcaaatattacagaagctgttgaagctgttagtcgtttgcctagggtaggcgtattggttcttgcaggttctctaatggggggtaagattaccgaagctgttagaaagataaaagaagaacatgaagatattattataataactttaaatatgcctggcagtgttacaaaagaagcggatttgattgttacagatcctattcaagcaggtgtaatggctgttatggcagttgctagtactgcagttttcgatgtaaaacgtttaaaaggaaataataaattctag

SEQ ID NO: 1997 - DNA, 264 bp, Methanobrevibacter ruminantium
  source 1..264: mol_type = genomic DNA
atgaaatttgttataaggccttatcatatgatgagtcttggaggatatattgtagaatatgattttccatatagggacatcattattgtaaacaagacctctgagcacattaaattcgagattccggtatttgatgagtcttggattgaagaaaccagagcattaggtcttgaagttattcctgttcgaaaggaagacagttatttaaatatgtatagaaaagctcatgctgatttagatgcttttaaggcaaaactagattaa

SEQ ID NO: 1998 - DNA, 999 bp, Methanobrevibacter ruminantium
  source 1..999: mol_type = genomic DNA
atgtcttatgaaatatcacttatttcaattttagaagtcgttttaacactgataatagccttattcatcggtgttttgattcctggaattgaaagaaaatatgttcaggcaagaattcagcaaaggattggacctcccgttacaagccctggattatgggcatctataaagttcctgtataaggagaatatccagccaaattcaatggctccaggattatataaggcaatgccagttctttgttttattgtagttttagctatattcttagtattaatgccatataactatcaatttatggccttttcaagtttaatcgcaattgttggatttttaaaggttgaagaggttgcttatgttcttatgggttccttatctgaatctgtgatgtctgctaatttaaggttccctgatcatataaagggggctgcaagaccagattcattggtttcatccattgaagacatcagttcaaaaagatccttaaggatgattgtatttggttcattcccattgtatttggctttatttgttccggcagcattaagcaaaagcatttatttagcagatattgttgcataccaacaagccaatggcccattcctattcactttggcaggtataatcggagcagtggtgttctttgtcggatatatgatcattttgaatgaatatccgttttcatatattaaagcaaaatctgatgttattgaaggaccgtatatggagcttgcttccaaatatcgttcatttgtttatgtgactagaggatttttaatattcactttaggattggtattttcagtattgttcttgggaattcctccagttttattctcttggaagtttatagcagctgttattgtatccttgatattgcctgttataatggcatccatcagtgcattctctccaatatttactaataaacagttatatcctactattttattagtttctgctatgggagttttagctattgtgattgctttattctaa

SEQ ID NO: 1999 - DNA, 1176 bp, Methanobrevibacter ruminantium
  source 1..1176: mol_type = genomic DNA
atggaagaaaagaaagctaaaaagcaggagattatagaaacagagattcaaatgggtactgttcaccctgctgctttagaaccttatagggttagatttttcgtagaagacgaaatcataaaagatgctgaaatcactattggagttaaccataggggaattgagcgtgtcatggaaggtctccctgtagaaaaggctaatatgcttactgaaaagatatgtggaatctgttccaattcacatacatggaattcagtgcgaactgctgagaagggtcttggagttgaagttccagatagagcagtttatataagagtgattgtaggtgaactggaacgtttgcatagtcatttattgtatttaggtcatggttgtgaaacattggctcatgaaaccttctctatgagagtgttttacattagagaaaccattatggatcttttggcaatgattggcggaaaccgtgttcaatatggctgttcaattattggtggcgtaaggccaagatgtgaattggatgacaatagaatccaaagaatattggacggcatggaccttgtggaaaagaacgttctagactttgcaaataggtttgtaaaggacagcgttgtagcatcaaggatttctggaacaggatatattccacaggaacaggctcttaaactagcggtaagcggccctactttacgtgctacaggtgttaaaagagatttaagaacagatatgtatgaatatgataactttgattatgatataatcacccaagatacctgtgatgtacaggcacagcttcttatgagagtgtttgagatatttgaagcaataaaaatcgttcgtcaggccatcagggatttgcctgaaggcaaaatcacagacaggtcttgggaaatgattgatacagaccttattgaaagctatatagaggttccaagaggaacattgtatcactcctatgccattgaggacggaagggttcgccattgcattataagaactccttcaatgagtaatattggagcaatgcagtatgcttgtattgacaatcatataactgacggtcagttatgtatcgttcagtgcgatccatgtttcacttgctctgatagggcaatagaggtttatgatacaaattataataaattagacaagtctatattgaagtctaatattcattaa

SEQ ID NO: 2000 - DNA, 447 bp, Methanobrevibacter ruminantium
  source 1..447: mol_type = genomic DNA
atgagtcttaaaacactttcaagatcaaaagccattcatatcatgttagtttatacaggaggatgcaatggttgtgatattgaaatcgtaaatgctgttttatctcctaaatttgatatggaacaatatggtgtattcttaacttggaatccacgtgaagcagatattctagtcgttacaggtcctgtaacctatgacaacagaaagccattggaagacatctacaatgcaattccaaatccaaagcttgttgttgcagcaggttcctgcgcattgatgggtggtgtctataagaactgtcatggagacattccttctgaagagattgaaggaccagttgagaatgttattccagtggatgctaaggttccaggttgtgctgtaagacctcaagatgttttagcaggtgtagttgcagccttgccacatttattaaatgcggattaa

SEQ ID NO: 2001 - DNA, 669 bp, Methanobrevibacter ruminantium
  source 1..669: mol_type = genomic DNA
atgaaagatgtaataaaaattatgcttaatggaacttatacaaattttaaaagaatcctctttgcatctgacagggtaactgatatggaactccgtaatgctatccttactggaacagttgaacctgataagaaggttgatgagcaggcttgcattggctgtggaggttgtgccaatgtctgtccgactggcgcagttacaatgaagcctttgcagactcctgtaaagattaaggaaggttgggtaaagacagaagttccagagctagatccttttaaatgtgttgtatgctattggtgtcatgatttctgtccgatatattcattctttgaagaggcaggaaccattcaccctggaaatgtaggtgagataaatatagacacagctgaactgcttagcgaacctattaagatctctcaagaaaagatatcattcattgcccaatatctctctgacaagtcattgttgtctgaaaacatcgtatcagatgcagatgagattgagaatgtgggagcaggcttagaaagagtttccaagataaaggacatacaggataatattaatgagaagtatgaaaaggatgctaaaagaagttctgctttagctgatgattcaaacgagagttctagcgaatcagatgaaagttctaaaaatgagggaggtgaataa

SEQ ID NO: 2002 - DNA, 1461 bp, Methanobrevibacter ruminantium
  source 1..1461: mol_type = genomic DNA
atgtatttaacaactaataagtgtgatggacaaggagattgtataagaaattgtcctactgaagcaatacgctttgtagataataaagcctttagctgtatgtgttgtggtgcttgcttcgaagcttgtccgaatcatgccatatttaaaaataaatacggaggatatgttgtagatagggcaaaatgtaatggctgtggtgtttgtcaattcacatgtcctatagaaagcattcatattgataacggaatcgttaaaggaatctgttcacgttgtggagtttgtgaagacgtctgcagtagaaatgcaaggacagatactgataatctggttcttgacaagcaaaaagtcttgcttaactccatgaagatggttgcaaacactgtcggatatcgtgcaggggtaaagaagattgaaaatatgaagcttcctgtaaagtctgataagtctgcagatagggtttgcgtaagcacagacatggaaaaatgtgtgaaatgtggtagatgcgcatattactgcccgacccgtgccatagaggtcataattcaagatgagggattctgtgttggatgcaagatatgtgaagacctttgtccaactggcgccttaaaggatggccaatatgataaaaacctctgtacattatgtttggcttgtgttgaaaactgcataaatgatgcattaaaggttaaggactttaagattgttcgaaacataaaagacagctctatggacaatcctttatgttcaaacactaaaggaaccattgtcagttgcctcaattgcggcttatgtagggaaaagttcgacagtcctgcattgattaaaaaggaaaatgctttaagatatgacccttcacaagataaggacagtgaagagaataatgagaaacgtcttgaagcgatttacaactgtcctgtttcaacattaagcgaaaatgaggataataagctcttcggatactgtgtatcctgcggcaaatgtacccaagtatgtaatgaacaagccagaagcttccaaaccatctcttgggatggggaagtcagtgacgattgtatttcctgtggaatctgtgctgagctatgtccaaaagaggcaatcagccttaaaagaggaacaatcaatgttgatttagataagtgtattatgtgtgagacctgtggaattcactgtccaactgatgcaatacctaagacaactagcacaaaatataagatttccggcggattcaattacattgacgagaacttatgtgtaaaatgcggcttatgtaaggacatttgtggcgaagaggctatctatacagttgacatatcaaatgaagatgtaaatcttggaactaagaataaaaatctgagatttgttgtagatgatgataagtgtatttattgtggggcttgcatgaatatctgcccatctaaatcatttattttcgaaagagagtttaatagggtgaattag

SEQ ID NO: 2003 - DNA, 279 bp, Methanobrevibacter ruminantium
  source 1..279: mol_type = genomic DNA
atgtttgttctagctaatctcttaattggtccgataattatctctgttatatttggattcgttctaggttctagaatccatctggatgagaaaaatagttttaagtttaccgcaagcggaatcattgctcttattattggtgcattaatagtgtcatatggaattggacaattcccttactataatgatttgccaatagcaactacatttttaggagctttattcggccttttgattggtagtgcattactgggaggacgagcaaaaggagatcattaa

SEQ ID NO: 2004 - DNA, 525 bp, Methanobrevibacter ruminantium
  source 1..525: mol_type = genomic DNA
atggctgaagataaagatttaaaaaccacaaagaaatctccaaattggaataaggatgaaagcagtcctatattaaaaatcatggtcttgcctatttcattcattatagcttctttaggaatcatggttattttaggaggacatataactccaggaggcggtttccaaggtggagccatgattgcaggagcaatcatattgtctgttgttgtttatactgtaaatggaagtccattaaaattatctcatagattcattagccttttggaatctgtcggagctttagcttatgtcttgcttggtttggcaggacttgcattgacaggctcattcttatataatgtaggaggaaacctttatgggcttgttccacaggctattgcagcaatattcaaatatcctgatttaacaaatgctggaatggtcccttatttaaatatagcagtcggactaaaggtacttgtaggtttaagtgcaattgtaattgccttttcccaatttaaaaaattagcggaggaagaataa

SEQ ID NO: 2005 - DNA, 396 bp, Methanobrevibacter ruminantium
  source 1..396: mol_type = genomic DNA
atgtctgataaaacaagcattagatctatattgatggtagttgcaacaataatctttgcatccagcttattcgacgccctttatggatttaaaaacttaattcagccgggaataagtttggtttatactgctattgggactcagcttgctccaaacatggttacattagttgtatttgattggagaggattcgatactttaggagaatcattgatcttagttactgcagtgcttgtcgtattgcttatctttggaaaaggtaagattttggataagaatgtaaatgcagataatgggactgcagattctaatttaacccatgaagcagatttagaaattggcgattctgatttagaacttgatggtgctgatttaaatgaaggagatgatgaataa

SEQ ID NO: 2006 - DNA, 336 bp, Methanobrevibacter ruminantium
  source 1..336: mol_type = genomic DNA
atgactttgtatcaaaaattcttagactcagtaaaggagttaaaatcaagtttctctaaagatcctactactatgaacaatgtttcaggagcaatggcagcagaattcttaatattggttggtctaatacttgctgctttgttctttagacatatcaatattgctgcatgcatagttgtagttattctagctgcaatattgttctttacaaacatgcctcttgcaagcaagataaagtcagaacaatccgattcattggaaaaaatgttattttatgtactcattgttcttggaatccttatttctgtaatttactgggggttgaaatatgtctga

SEQ ID NO: 2007 - DNA, 1482 bp, Methanobrevibacter ruminantium
  source 1..1482: mol_type = genomic DNA
atgaattacttgattccattaatggtcgttattccaatattggctgctttaattgttaacatattaggcggaaaggacaagacagtgaaggctttctccattattgtaggacttgcaattcctataattgcaattcttgccgccattggggttcaatacttcggaggccacgatccaggtcttcttgcaaattcattgccttctaatctagttggaacccttgttgcaagctataatacaggtatcgtttatatttttgacaatatagaaagaatattcatattcctaatgggtatcgtcgcattcctttcaatatttacctactttacagagaagaaggaagtctcagggccttacctttaccttatctttatgggccttgcctctgtaattgcattgcttctatctaacgatatcttcaatatgtatgtattctttgagataaccgctttgactcaagtgggtattattgtagcctcaagcacagaggacaattatgaaatcgcattgaaatacctgattttaggttcaatcggcggaccgatgcttttattaggtgttggatttgttcttggaacaataggttcagtgaatattacagacattatatatgcaatcagcaataactttgtagatccttactctccaggacttgtaatcggatttgccttaatattgttcggatggctatattcagcaggattgccaccgttccacactataaaatcagcggtatacagtaaggcaagacctaacggttcagcaatacttcaaggattttcagtattgtgcatgcttgcatttggaattgctatgtataagatatttgcttatattccaggattcaatacagccataattgtatttgccattcttgcaatggttttaagcattgcaatgtctgcaatggaggtagactttagaagaatgatagcatttttagctgtaggtgaattaggatttatcgctttaggttttggtattggaactcaaatgtccattgcagctgcattgttccaggcagcaaatgaaatagtcattactgcaatgctatttattggattcggttcaatctattatcttacaaatacttcagatacccgcaagctaggaggattgattggagttgactcacttatgggagttatgattttgcttggcggatgcgcattggcaggtgttccaccattcaatggatttgtaagcaagctgatgcttgttcaggccgctttagaggcaggatatacagagcttgcaatccttgcagttattgtaagtgtggttatcttctttacatttgtcaaggcattccatagcgtattcctagagcctaagccaaaggacttgaagtttgtaaatgagaagattccaagggtcacagtattttcagtggctgttttgcttataatctgtttggctttaggtcttttcccgaatattgtcactgatgtatttattccatttgcaggaggattgatctaa

SEQ ID NO: 2008 - DNA, 369 bp, Methanobrevibacter ruminantium
  source 1..369: mol_type = genomic DNA
atgattatggatattcaattagcttccctatttgcttcaggcgctcttattattataggattgattgcagcaatcttcattgacaatatcataaagaagataataggtattgcatttatcgaagagggcgtaaatctattccttatctgccttggatacaaggctggaggggttgtgccaattttcttacctggcatgactgcagactggtttgcacagaattccgcttatccattgccacaggcattggttcttacaagcattgtaatcggtgcaagcacattagctgtaatgctggctttagcaatggtcttatacagaaagcatggaacattaagcgcaaaggaaatattgggggatgaaaaatga

SEQ ID NO: 2009 - DNA, 231 bp, Methanobrevibacter ruminantium
  source 1..231: mol_type = genomic DNA
atgattgaatatattataattattgttgcggttataagtgccatcatcgcacttttacaggaagacttgctaaaatcagccattctagttggaatatctggtttcttcattgcagtgctattccacttattgcttgctccggatgtggctttgactcaagccattgtagagggagctatcgtgccagtatttatcgctttggctgtttataaaacaaaaggaggggcttaa

SEQ ID NO: 2010 - DNA, 567 bp, Methanobrevibacter ruminantium
  source 1..567: mol_type = genomic DNA
atggctttaggtctagagggtatgaacttaataactattatccaatcaattttattaattatttctgcacttataattataattgcagctattgggattttaagaatggataaagacatgcctaatgttgtatatgcaaggattcatattctgggaatgatagatgtagctggaataatagcatttattggattaggtcagcctttatttgctcttatctatatattcttggctccgctacttgctcatgcattagctaatgcttatttccatgcagaagatgatttaaataatcctgttcttaatcctaatttattaaatgaagaatctgatgaatctgaattggaagaatctgttgatgtggcagaacaagatggtgaagaacctgaagaatctgttgatgtggcagaacaagatggtgaagattccgattccgaagaaacttcagaaaatgtagaagaagattctgattctgaagaagaagcttctaatgaagatgtggataataaaactactgaagaagatgtcgagaacttaaataatagtgagggtgacgacaatgattga

SEQ ID NO: 2011 - DNA, 267 bp, Methanobrevibacter ruminantium
  source 1..267: mol_type = genomic DNA
atgataatggaacttttattgatttcagagtgttttttaataattgcattggttgttttcttatttgcatctatgagaatcattacttacaaaactgtctctatggggcttataggtacttcttcattaactttagcaattaccttgattctaatctgcgtcggtatgatgtggggcatagaattctttaaggacattgctttggttttacttttattaggaattgttggaacaatagcttatgcaacatttttaaggagggcttaa

SEQ ID NO: 2012 - DNA, 315 bp, Methanobrevibacter ruminantium
  source 1..315: mol_type = genomic DNA
atgtttttatctagaatttattatgcaattgcttatttggtagtgcttattttggagattatcaaagctactatagatatggctggtaggatatttaaaggagaccagtatgatcctattgtcattgatattgataccgaattaaaaaggccaatatctcaaactatcttagcaaacagcattaccttaactccagggactttatctgttgatttagattcagaaagtcaagtgattaaggttgcagttattgctccaagagacgtaaaggatatcattccttttgagccttatataaaggggatgttagaatag

SEQ ID NO: 2013 - DNA, 738 bp, Methanobrevibacter ruminantium
  source 1..738: mol_type = genomic DNA
atgtcatcttataagggacacacaatatttgcttttatcttatcattgctcatgttttatgacccttttgcaattgcacttgcagttatcggagcaaatatccctgactttgaccatgaatttaagcgaaaccatgttttaatcattatttccattggaatgatcttaagcatctttctttatttattgaatctgcctatttatttagggttgataatcgctttattagggcttattttccttttatcctctcatagaggctttactcactctattttaggagctgtagtaataagcattgccatatttttattggtctattttggaatggatctttcttcttactttaatttgaacactattactaatattccattaaactatgttattttagtcggaattttaatatttttagctgtcctattcttgaataagcaattggcctctattttcattcttttaatgcttttctttatcactttggtttattttggaatagtccctgtctttaagataaacgtttattctctaatattctctgtgtttttaggtctattcagccatatgattttagattcatttagtccggctggaataaagccattcagtcctttttcagatagaaaatgctataaaaaattaggattgcttttatttgctttgataattgctctttatttgattttatttccaaataaattagatttctatcttaatcttctcccacacttttattaa

SEQ ID NO: 2014 - DNA, 747 bp, Methanobrevibacter ruminantium
  source 1..747: mol_type = genomic DNA
atgactcaagaaaagaataatttagatttagatcatatttcttatgagaccggaggtttcatctctgctaataagaacatattaaataatttaaatcttacaaaaaacactaaatatatattaaaagagtcaataaaaggaactcctataatcaaacttggaactaactatcccaaggtcatgatggttgcaggaattcatggaaatgaattggctcctcagatttctgcattgaatcttatcgaccagattcatgacttggaccttttaggaactgtttatattgttccatttgcttgtccaaaggcatctatgcttaattccagatactttgacggtaaggacttaaacaggacatctcatatcgaggggtccgttggggaccttattttaaaaaaggcagttgagcttgaagtttcagccattggagactttcattcatcagccccaaattcaaatccaggtaaggaaggggtattttgcactgaagttcctactatggcaagctttagattggctgatttcatttcaaaggtgacaggctctgaaaagatagtctattcctctgctggaattccgtttaagggggctttggaggatgaagccaacctaaagggcatacctgctgtaacctgtgaggtcttatctgcaattggctatgcaaatgaaaggatttgctataggtccataattcaaatgaaggcatttttgcaatactttggattctttgataggtatatggaatag

SEQ ID NO: 2015 - DNA, 1176 bp, Methanobrevibacter ruminantium
  source 1..1176: mol_type = genomic DNA
atggaaaaagttgttcttgcattcagtggtggattagacaccaccgtatgtgtaaaattattagaagaggaatacaattacgaagtagtaactgcttgtgttgatgtaggtcaaccgcaagaggaattggaaaagtcacaaaattctgcagacaatataaatgcaggaaaacactatatcattgatgcaaaagatgaatttgcagaagaatatattgcaagaggaatcaaggcaaatgcagaatatgaaggctatccattaagcacagctcttgcaagacctttaattgcaatgaaaatcattgaagttgctgaaaaagaaggggcaactgcaattgcacacggatgtacaggtaaaggaaatgaccaattcagatttgaagcaatcatcagatccatgtctgactttaaggtcattgctcctattagagaaatgaaccttacaagaactgaagagcaagcttatgcaaaggaacatggacttaacctatcctatgataaaatctacagtattgatgaaaacctttggggaagagccattgaaggggatgttcttgaagaccctgccaatgagccacctgaagagatttatgaatggaccaagtctgctgaagatgcaaaggacactcctaccaaagttgctattgaatttgaagaaggagtccctattgcaattgacggagaaataatgggtcttgtagacctaatcaataaggctaatgagattgcaggtgaaaatggagtaggaagagttgacatcattgaaaacagaatgatcggtcttaaaagccgtgaaacctatgaagtacctggagctaaattattgattgcagctcaccaagctttagagcaattggtcttaaccactgacgagctaagattcgcacagtacatgagcggattatatgcagaccttgtctactcagcgctatggcaagaacctttaagagaagacatcgatcaagcaattgaccatatgcaaagaagagttagtggtaaagttgtaatgaagttatttaaaggctccattcaaccattaagcagagaatcacctttcagcttacacagcattgaacagataacctttgaagataaggaaactgaacagagtgaagttgaaggaatgattaaataccacggacttcaagctgcaaattaccaaaaattaaatagataa

SEQ ID NO: 2016 - DNA, 663 bp, Methanobrevibacter ruminantium
  source 1..663: mol_type = genomic DNA
gtgccaaatacaggtagatgcaaggagcttttagttgaagatgcagttgtataccttcgacctagtgacaaccctaatagaaagactaaatattctctttattatgttgaaaacaatggtgctttagttgctatgttctctcaggaagccaataaaatcgtttttgatgcaattaataagaataaagttaaagaactttccaattattcaatcatagagtctgaaaagactattggtagttctagaatagatatttatttagcaaaccataagagcaattttaaggataatgctgattccaaatctattggagaagattctaaagaagatattatagatgaaacttatgttgaggttaaatcagttactctcataaaggatggtgttgctcaatttcctgatgctcctacagataggggtcgaaagcacttggaagaattgatttctcttaaaaaagaaggaatacgtgctgtagtgttctttttagttgaacatcctaatggaaacagtttcagaccaaattgggaaaatgatcctaagtttagtgaaaccttggtgaaggcatatgatgagggtgtagagattcttgtctataaaactagaaatgattttgagggtattgaacttgttggggactgtttagattttaatttaaataaatag

SEQ ID NO: 2017 - DNA, 1569 bp, Methanobrevibacter ruminantium
  source 1..1569: mol_type = genomic DNA
atggatccaattgatatgatggctacagattataattgtgaatatttaggcctttcaaggctttgcttgatggagaatgcaggtaaatcaatatctgatgaaatcgctattctttctacttataaatactcaagaccagttaagatagtgatttttacaggctctggcggaaatggtggagatggctttgtagcagcaaggcatcttttaaacaggggctttgaagtggatgtctatgccttaaacactgcagaccaaatcaagtctggtgatgcattggataaccttaagattttaatgaaccttgaaccgagggtctcaaggctatctgtccaattcattaaggattctgctgatttggataaaatcaagcttgacaataattccccttgcattgttctagactgcttgcttggaactggcatcaagggaaagcttagggaaaaggttagaaagacagtagaacttatcaatgcaataaatggcttaagggtggctatcgatgttccttcaggtttggatccattaactggagagatagcagacattgccgttgatgctgattataccgtttgcttccataaggtcaagactggagttaagcttgccggtgaagggaaggttggaggcataataacctgtgatattggaatccctattgaagctgaactatttgttgaaggaggagatcttcttagattaaataataggccctcctcatctcacaaaggaaacaatggtaagatcttgattgttggaggaagccttgattattacggggctcctgcaatatctgctaaggcctcaattgcaacaggagcagatttggtttatatttacactccaaaatctgcagcacttccaattaaatcattctctgaagactttattgtaaaggaagctaaaggagattatctctctattgatgatttagatgatattctagaaatggcttccaaggtagatgcagtgctaataggtccaggttctgctcaaaatgaggatacaatgaaattattcaatgttttggctatgaaaatcgataagcctttggttttagatgctgatgctctaaaattggttgatttttctttaatcaataaaaaggaagatattatcataactccacattattcagagttcaaatccttctttaagaaccagattccaagagatattgaaaggaatttggataatattgtaaatttgaatgatgatagtgattttgttaaggtgaatgataagattgatgctttgcagagcataacagcttcctttgatggatcagttattctaaagggacagtatgattttattttcaacaagaataagttaaaaatcaatagaactggaaatcctggcatgactgttggaggaactggggatgcattggcgggaattgctgtaagtctgctctcacagggattggacagttggacttctgccatattggctccttatttaaacggaaaagcaggagatttggctatggacgctcaaggatatggatttggagcacaagacctgactcaatatttgggagcggttatggctaatttgattgattaa

SEQ ID NO: 2018 - DNA, 1161 bp, Methanobrevibacter ruminantium
  source 1..1161: mol_type = genomic DNA
atgaaaaatagaaatgtatggagaatcattatgagtgaaattaaaaaatatatggaggatttaaagaaaaataaaaccggattaaaaggaatcctcgttattatcctaatatttgcttatggaattttagggtcttactatataatgaatctcaacataaacaattctatctattatacaatcataaccatagccactgtaggatatggagacataatccctgtaacccctctggaaaagttcttttccacaagcttggctctaacagggattggattgattgcatacatatttacaattatcattacttcatttgaagaaaacttgcacgacatcaggagtggaagacatatggaaaagagattggctaaaatggaagaccattatattctatgtggttttggaagggtaggaaccgcagtttatgaagaactgatgaaaagaaatcaaaaggtaataattattgaaaagaatgaagacaagctggaagacattgaagagactgaaaatgtggtcccatttaatgcaaatgcaacagaggacaagacccttaagaagctcaatattgacaagtcattaggggtgattgtaacaacaggaagcgatgtagacaatctattcattgttcttacaacaagggaaatgaataaggacgcttggattatttcaagggcaagcaaaaaggaaaatatcaaaagattaaagcatgctggagcaaataaggtcatatcccctgaggtaagcggaggaactgacatttactttgctgcagtgcagcctaatttagttcatataactcaaaagcatggcattgattatcttgaaagggaatttgaaatacttaaaaagcacaattgccatttggaaaacatagaatatcattttccaggaattaagacaccagttacccggaccattggagttttagatgaggaagagaaggatcacttcattgatatggttaaaaacaatccagaagtccatgaatccatggatgtgatgtatgaaaccgttaatggagttcattcccattggatttccggacctgataaaagtcatgttgatatggtgattgaagagctgaaaaaagaaggaaaccttttaggggttaatctagactttaaggaaattaatgagtttactaaacagtttaaggaataa

SEQ ID NO: 2019 - DNA, 567 bp, Methanobrevibacter ruminantium
  source 1..567: mol_type = genomic DNA
atgaaagaatacttaagcgaaacaaaaagcatagattatatgaatccgatcatccaagaaaaggttaaagaactaaaggagcaatcctctgacgatgcagattatataaaaagagcattcctctttgtaagagatgaaattccacattcatgggacatacagacaaatacagtctcaaggacagctagtgatgtattgaaaaacaagacaggaatatgctggacaaagtcttgccttcttgcggctcttcttagggcaaatgaaattccctctggaattagctatcagctactgacaattggagaagacgacagctttggccatatgattcatgctctaaacactgtttatatggatgatttggataaatggattagaatggatgctcgtgaaaatgtaggagatgatgatgaggaatttagtttggataaggactatttagccttctcaccaagagaagaattcggagaagtagattatcaggataataatcctgatttggatgaaaaattgattaatctcttggaaaaaactgaaaatcttttggaaatggaattggatttttag

SEQ ID NO: 2020 - DNA, 888 bp, Methanobrevibacter ruminantium
  source 1..888: mol_type = genomic DNA
atggaaattaatggtgtagaaattaaagaaacttacgcagaaggattcggaattaaagtaactagaattttagtaactgcagcaactgcaaaacttgcaaaaattgcagcaactgaagctactggttatgcaacttctgtaatcggatgtcctgctgaagcaggtattgactgttttgtaccatctgaatgcactccagacggaagacctggttacgcaatcatgatttgtcacgcttctaaaaaagctcttgaccacgaattaatggaaagaatcggtatgtgtgtcttaactgctcctactgcagcagcattcaacttactcgaatctgaagacgaattaaaaaccgctttcaaactcaaatacttcggtgacggtttcgaaaaagactgttgcattgacggaagaaaagtacactccatcccaatcatgtctggtgacttcattgtagaatccactttcggattcaaagcaggtgtagctggaggaaacttcttcattttagctaaagaccaaattactggtgttaaagctgctcaaatggctgttgcagctattagaaacatcccaggtactatcactccattccctggaggtatggttgcatccggttccaaagtaggatccaacaaatactcattcttaccagcatccactaacgaaaaaatgtgtgtaactttaaaagaccaagttgactctgacattagagaagatgctgaaggtgtatttgaaatcgttattgacggtttagatgaagaatctgtcaaaaaagctatgaaagcaggtattgtagctgcttgttcagttgacggagttcttgaaatcagcgcaggtaactttgacggtaagttaggtgcatacatcttaaacttacacgacttattctaa

SEQ ID NO: 2021 - DNA, 1272 bp, Methanobrevibacter ruminantium
  source 1..1272: mol_type = genomic DNA
atgaaaaacaagaaattgataatttttttaatatttggtttggcaatcatggccgcaatgctatacttcatcggtatagatcaggttgtcgacgctctcaaatattctaacctttggtttgttttattggctgttttattacagatttttacttatttcctctacacatggagatggcagattataaacaagagtgcaggcatgaccttgggaatctggaaattgcttcctatggttttagtaagcctggcggtaaacaacatcactccaagcggacgtggtggcggagagcctgttcgggcttatcttttagcaaaggaaggtcattataagtttgaagacaccttcgctaccgtaatcgccgatagggcattagacacatttccatttgtcattctagcaattctgacaattatagcaattattttcagcgtctctttacctgtctattggatagtcatattggttctttgtgttgtaggaatcactgcaatagttattctattgctttatgtctgtatcaatgaggcatttggcgtaaggcttacagaatggattctaaagattaccaaaagattctataagaattataatgatgctcttgaaaaaaggattgttgaggctgttgcaagttttcaatctacaatgaacgcattgattagggataagaatattatttattatgcattgcctttatcctttattatttgggtttttgagattttaagagtttatgtggtctttttagcctttggtgccaaggtatcccctataataattggtgaagtgtttatattggcatcccttgtgggaatggttccactgcttccaggaggccttggggctattgatggtgtgatgattttattctattcaaggtcaggaatcactgcctctttaagtgctgctgcaactgttgtggaaaggtcaatctcatttggaatgactacaatattaggtctgatcttcctcatgaagtatggaacttctattttggatgcgtcatttaaacttgcagaaagcgagaaagctgaaaatctggaagagatcactgaagatgaacagaagatattggaccaattatctgaagatggcgataaatctgaggattctgatgaaaatagggaagaagcggttcttgaagttttagatggagagccatctattgaagtcgttgacgaagaaccgactattgaagtcattgatgatgagccaactattgatgttcttgatgaaaaagaagaagccatagatgagaaagttaaaaactaa

SEQ ID NO: 2022 - DNA, 1491 bp, Methanobrevibacter ruminantium
  source 1..1491: mol_type = genomic DNA
atgaaaaggaaatatattactaaagcagatttgttcatcgtactccactatcttggatacataatgcaaggattaggagttgtattaatagtcccaaccttagttgcattaatatacggagagtacgaccctattgctccttttatgattccttgttttgtatcatttgtcttaggaactgcttttagtaaaaaattcaaagactataccaagcttaggcttaagcatggtatgctaatatcatcctttgcatggctatgggcctcccttatcggagcctcaatcatggtcctttcattaggcatcccatttgtcgatgccatctttgaaaacatgtccgcatggaccggaagcggaatgactttttttgtaaacgttgaagtattgcctaaatccatcctattcttaagaagcctagaacaatggctaggtggattaggaattgtaattatctttatcggaattctaattcgagcaggtactgcagcatccagattatataaatcagaagctagagaagagaaaatcaagccaaacattacaaacaccttaagaaaagctctagaaatctatttaatctatacagcagtgggaatatttcttttcatcttggcagggcttcctatctttgatgccataaacatcacattcacaagcatctcaactggaggaatgtccattaagaatgcaaatgtgggattctaccaagacagcatagtctacctaatcagcatgtttctaatgattttaggtgcaacaagctttacaatacattataagattgtaaagacaaaaggaaaagcactttttaaagatgttcaattccaattattgattaccttaatcatagttgctggtgcattctttatagcgacaaataagatggtccctatagaagaactctttaccatagtttcagcagtgacaaccacaggggcaaatgtggttgatccccatgtgcttgcaacatggaacgggtccacattgattgttctgatggtcttgatgcttattggaggttcatcaggatctacaggaggtggattgaagctcattaggattattacagtgcttaaaggaatgaacttgactgtaactaacctagtttcacctgaaggaagagtggtaaataccagaataggtggaaaaaagataaatgaaagggaaatcaaggaagcatctgcatatatcgtgactttccttatgtttttagttttcggatggataattatgacaatgtatggatatgacccattcactgcattgtttgacgtgatttccattcaaagcaataatggtttaagtacaggaatcgtgtatggaggattgccattgcctcttaagctaacattgatattcctaatgtggataggcagattagaaatcatacctgttttagtattatttagaacattttatggtttagtcaaccctaaacgaaggattaagcaaatgaaaaaaacaaatggaaatgataaaaaaacaaactaa

SEQ ID NO: 2023 - DNA, 675 bp, Methanobrevibacter ruminantium
  source 1..675: mol_type = genomic DNA
atgtatattgtgattatgggtggaggtcgtgtagggctatcccttgctgaccgtttgattattcatggatatgatgtaacaattattgaaaataatgacgaattatgtgatcacgcatccgaagagttagatgcaatgattatctgtggaaatggaactgatacaaaaactttagaagaggcgaacattgaagaagctgatgtttttgtagcaactacaggtaacgacgaatcaaacttattatcttgcattcttgttaaggaatataccaatggaaagatcattgcaagagtaagcaatcctgaccacgaagaggcatttaaaaaggttggaatcgataaggtaatcagtcctgagagaactgctgcaggattccttgaaaaagtcattacaagaccaaatgtggctgacttaatggcattcggtgcaggaaacgctgaaatattggatatgaccattcaaaatccaaaggtattcggaaaaaaggtttcagagttttctccaactaaggattatataataatttcaaaaaacaatgacaatcatgaattggaaatccctcagccagatgatatattaagcaatggagacaaaatttccattcttgtaaaaagaaatgcctttgaaaaagcagaaaagaaattcatgggtgcaggaggactattcggattttaa

SEQ ID NO: 2024 - DNA, 648 bp, Methanobrevibacter ruminantium
  source 1..648: mol_type = genomic DNA
atggagaaaatcaaaaatgtctattgtatagaaggactgatggcagattctaattcttatttgattgataataatgatggtgatggggattataattatatactggttgatacaggaactggacaatctaatgcattcttattttcacaattaggtgaaattggagtcaaaccagaagatattgacttgattgtaaacacccattgtcattttgatcatgttggtggaaatgactttttcccaaatgcaaaaatagcaattcataaaaaggatgctgtggcattaagggacccagatagcgaattgacagtctcttctctctttggtgcaattgttagaaaacatgatgttgacattgaacttgaagagggagataagatagctaatttcgatgtcattttgactccaggacacacttctggaggaatatccctttgggatggagaaattctcatttgcggagataccatatttgcaaacggtggtgttggccgtatggacattggtggtagcccaattgatatgaaggactctttaatgcgtttgaaggaatttgatgttgaatacttgcttccagggcatggtccttgggtaaaaaatggtaaagagcatgtaaaaatgtcttgtttaaatatgggaataagataa

SEQ ID NO: 2025 - DNA, 339 bp, Methanobrevibacter ruminantium
  source 1..339: mol_type = genomic DNA
atgcgggctccagcatctggaggagcaactaaaaaaccattgcctgatgttgtagctggaaatggaaagatttacttggcaattgaagtaaaaacaactactaaagataagatttatatcgatcatcctcaaattgatgcattaattgagttttcagatatttttggggcaacaccttacttgggtatgaaattcaagtataccaaatggcttttcttagcacctgaaaatatccttaagaccaaaaatgggaactataaaatagaaaaggattattgtttagaaaaagctttagaacttgatgaaatctgtggatttgatacacaggttaaattttaa

SEQ ID NO: 2026 - DNA, 1032 bp, Methanobrevibacter ruminantium
  source 1..1032: mol_type = genomic DNA
atgaactttttaaatgaaaaccattatcgtgatagcatgaatgaaatagacagcatagaaactctcgaactaatcaataaagctaacagccttagcctaaagaaaggatatacagaaataagtcttgaaagagctgtttttctatcatggtggtgcgataagggagattgcaaattctgctatatgagcacccagaaagataaaatcaaagatcctaaaaaggccagaagaagagtaaacaacatattggctgaagctgaaatgtgcagtcgcctcggttggaatatagaatttctctcaggaggatacaaatcattcaccacaagcgaaatcaaatccattgctgaaaacatccattcaataacaggggatggggtttggctaaacaccggaatcacagatgagcttgaagagtatggaaaggaaatcaaaggaatcaccggagccgtcgaagctgcaaatcctgaatttcaaagggaagtctgtccaagcaagccattgaatcaaatcagcaatatgctggataaagcaggagacctaggatttaaaaaggcaattacaatcatattaggtcttggagaaagccttgaagatgttgaatatctaaaagactatattaaagagcataagatagacagagtaatcttttattccctaaatcctcatccagagacaatctatgtaaacagttcccagccagcatctctctattatgcaaatgtggtatcaagcattcgccttgcatttccagacattgaaatcatatgcggaacatggattgacaatctggcaaacattggaatactcatcttaagcggagccaatggaataaccaaattcccattatttaagatgtttggcacaaaatatggaaaaagagttgaggaagaggtcaaatggactggaagaacattaaaaggaacctttacagataaagataagttaggtcctgaaaaaagccagataaatccggaatttgaccaatatataaaaagatacattaaagagtctttaaagaacaaataccaataa

SEQ ID NO: 2027 - DNA, 1356 bp, Methanobrevibacter ruminantium
  source 1..1356: mol_type = genomic DNA
atgatgtgtggacttgaaattcacgtacaacttgaaactgactcaaaattattctgtaactgccctacaaactatcaggaagcacctgcaaacacaaacgtttgtccggtctgcctaaaccagccaggggcaaagccatttccaaccaatgaaaaggcaattgaaaacgcattaatgatttcattaatgctaaactgtaaaatcgataagaactttacctatttcatgagaaaacactacgattatcctgatttgccttgcggatatcagaaaacctctgtgcctataggatatgaaggagaattgaatggcgtaagaatcagagaaattcacatggaagaagatccaggacaatacaaacctgacagaggtattgtagactttaaccgttcaggaattcctcttatcgaaatcgttaccgaacctgacatgcactctccagaagaagctcgtaacttcttaaaagaacttatcagagtattgcaatacagtggaggagcacgtggagaaggtactatgagagctgatgtaaacgtttccatcaacggcggaaacagggttgaaatgaaaaacatcaactccatcaaaggggcttacaaagcattgaactttgaagtcatcagacaaaagaaccttatgaaaagaggagtggaagtcaagcaggaaaccagagcataccttgaatcacaaatgattaccgtatcaatgaggatgaaagaggatgcagatgactacagattcattccagaccctgacttgccacctatgaaaataagcgacgagcaaatcgacaaggttcttgacatcatgcctgaagctccgcacaataaggtaaaaagatttgtaacagactatggcattgatgaggaatcagcaaaagtccttacctccgaacttgacttagcgcaatgctatgaagaagttgctaaggaagtagacccagtatttgctgcaaaatggatgagagacgaacttaaaagagttcttacatacaacaaacttgactttgcagacagtggaatcctagcagatgacttgattgaattattcaacatgttacaaaacaaggaaatcactaccaaagcaggtcaaagagtcattgaacaaatgccaaacagcaaacaaacccctagagaaattgcagaggaaatgggattgattggtgttgtaaaagatgatgaagttttagcagctgccaaacaagccttagaggaaaaccctaaagcagttgacgattaccacaacggtgaaaaggcttcattaaacttcttgatgggtcaagtcatgagattaaccaaaggtaaggcagaccctagagaaactgttaaaatcttaagagacttacttgaagaataa

SEQ ID NO: 2028 - DNA, 852 bp, Methanobrevibacter ruminantium
  source 1..852: mol_type = genomic DNA
atggagggaaaaactatggagcaagaaaaagccgctgtaagagattacatgaccaaaaatgtaattacagtaaggtatgactctctcaacaatgatgttattgcattaatgaaagaaacaaagcacgacggttatcctgttgttgatgaagaaggacatattgttggaataattactgcttacgacctattgctaaaagattgggaaaccgaatatgtcaaaagcataatgtctcaggaagtaattgtagctagagaagacatgcacatcaacgatgcttccagagtaatgtttagacatggaatttcaagacttccagtcgtagataaggaaagacatgtcaaaggaatcatgacaaatacagatatcgtaagatcccatatagaacgttccactccaactaaagtcagtgcatttagagagactatggaaaagctttatgatattaaaaccactttaacaagagaacaagtcccagttgataagataaaacctactcaagacagggtttatgctgatgaacttcaaggaagaacctatgaacttgaaaaaggattggcagagccaaccatagtggtgaaaactggagacagatatattttagtggatggccaccacagagcagtggcaaccgtacaattaggattggataaaatagactcatatgtagtggactttaatcaggacattactttaggaatggaaaaaactgcagaaaagcaaggattaaagacattcaatgacattacaatcattgatgatgatcagcatcctttaattgccttgactgaaaccattaagactgcaaatcagaagcaaaaaatatctgaaataacaaaaaataaaaattag

SEQ ID NO: 2029 - DNA, 288 bp, Methanobrevibacter ruminantium
  source 1..288: mol_type = genomic DNA
atggatgaaaaaatccttagagaagtttataatgttttagaaagtcgtagggactctcctattgattcatacacttctaatatcatgaaagacagcgataaaaaagcagaagacaagatattagaaaagatagctgaagaatgcggagaaaccattattgcttctaaaaatgatgaaaatttagtttatgagtctgttgacttaatatttcacacattgctccttttggtttacaaaggagttgaatttgatgaaatcctagaagaatttgatagaagaagaaaataa

SEQ ID NO: 2030 - DNA, 648 bp, Methanobrevibacter ruminantium
  source 1..648: mol_type = genomic DNA
gtgtttatattgatttttagagattttgacccagagattcatgatgtctataaggtggctgaactgatctatgatgttgattatagaacatttgttcatgttttcaaatcaaaggaagaaggtgtggaagccattaaaaatagattgacttttgaatttgctgaggatagggaggatgaaaatgaacttttctatctattctttgatgatgaggatacagaagaaaaggaaatcattggaatgttcaatggaggtaaaggagttcagcattccttattcaaggatatcctagaacaatttaaacatctgaagtttagtgaggccttagggctttcaaaagtctcttttatggataattttgtcttggttgatgtaggggatgatgacttttatatttgcgaattggccatctgctccaatcagagaggaaaaggctatggaaccgaggccttggaccagttgattcagcttgcgcgtgacttgaactgtaaaagggtggttttagatgctgactttagaaacgatggggcatttaggctttatagttctaaaggatttaaggtatttaataaaaaatcatttggatttccaggcaaaaaaagaggaatgcgtaatatggaattgattctggataacgctagagaatag

SEQ ID NO: 2031 - DNA, 816 bp, Methanobrevibacter ruminantium
  source 1..816: mol_type = genomic DNA
atgatgaaaaagattctaaaacgtttggctgaaggtgagatttcaattgaggagtgtgaaactcttcttagggcggagaatattcgtcaattggatgatatagccaatattgatatttccagaaaggataggacaggttttcctgaggccattttagcggacagcaaagattatgaagatcttttagccattgttaaaggcttctttgatgatgaatttgacctaaaggataatataatcatcacacgattgtccaaggaacgttacggcttattaagtcaggatttgtcttatcttttggataatggcattaaatttgattataaccctagagcaagaattttagttatatataaggataaattagttgattttaatccagaatatggtaagattgggattttaacagctggaacctctgacatacctattgctgaagaggctaaggtcatcgttgagcaagggggatgtgaggtcttaagctcttatgatattggagttgctggaattcatagattgtttcctaaaattgcttatatggttgaagaggacgtttctgcatttattgtctgtgctggaatggagggggcattgccttctgttgtagctggactggttgatgttcctgtaattgcagttccaacttctgtagggtatggcgttggagcagatggaaaggctgctttgtattccatgttgcagtcctgtgctcctggattgtctgttgtcaatattgataatggatttggtgcaggggtttatgctttaacaatagtgaaaaacattgctaagaaggtaaaaatgtctaaggaataa

SEQ ID NO: 2032 - DNA, 2448 bp, Methanobrevibacter ruminantium
  source 1..2448: mol_type = genomic DNA
gtggagtcaattaaagtattagtagaaggaatcgtacaaggagtgggctttagaccctttgtatatagaatagctaccgagctggaactggtaggatacgttagaaacttaggaaacgtagttgaaataatattacaaggaacagacaatcaattagctgactttatatacaaactccagaacgaacttcctccaatagctaaaataaataatttaagaactgaagatatagaaattgactccccatatactgattttacaatcaaggaaagttcagacagcttttctggaacttctgttatccctcctgaccttgcaatatgcgataagtgcctagaggaaatcaatgacccccaaaacagacgctacaaatatccattcaatgcatgcacagactgcgggcctagatttacagttattgaaaacgttccatatgaccgggacaagaccacaatggatgactttccattatgcgatgaatgtgaaatagaatataaaaatccattggacagacgttatcatgcagaagcaagctgctgtgaagtctgtggaccttcattaaaactaatgaaaaatgaaaccgaagaaggaatctctacagataaagaaggaaatgaaataaaagcaatgaaacgaacagcaatcgatacagaatccaatgacccattaaaagacactgcaaggcttcttgatgaaggaaagatatttgcaatcaaaggaattggaggaacacaccttgttgcaaacgttaaggatgaaaaagctgtaagcacattaagagaaaggttaggcagaaagaaccaagcatttgcagttatgagtccagacattgaaactgtaaggacatttgcaattgtatcagatgaagaagagaaaacattgctttccaaggaaagacctatcgtaattttaaaaaaatcaaaggattacgactttgcagagtctgtatccccaagacttcacaatattggagtgatgctaccttatgctcctttacatcatctgctctttaatgaaacagatagccctgcatacatcatgacatcagctaatgtccctggagagcctatgatgattacaaatgaggaaatccttcaaaaccttgatgaaatagccgattattacctcattcacaacagaagaatcctaaacagatgtgacgactcagttgcaagattcagaaacaacgaacttgctttcataagacgctcaagaggatacacaccagagccttatgacttaaagggaaaatacacagatatcaatccagactttgacaatctgaacattcttgcccttggacctgaattggacgtcacatttacaatattaaagaattcaaaggcatatgtatcccagcatatcggaaatacaaacaaatacagaacctatgaattccttcaagaagctataaagcatatgatgagaattaccaaaacagacagcttcgatgcaatcgcctgtgatttgcacccacaattctttacaacaagattagctaaggaatatgctgaaaaatacgactgcccattgattccagttcagcaccaccacgctcatggaatctccttattgaatgaccattatgatgataatgatttgaatgaaatgattattatcgctgcagatggagttggatatggtgctgatggcaattcttggggtggggaaatcctatacacagacataaaaggatttgaaagaatggcttcccttatgcctcaaaagatgcctggaggagacttatgtaccaaatatcctgcaagaatgatggcatctatcctatcaaaccctgaaagcgactatgagaatgagaaatacacaaaggaatacatagaggaattgcttaacaacaattacttagactcctttaaacatggatctgttgaaataaaaagcctatttagacaaatggaaaccaatcttaatgttggaataaacacaagtactggaagagttcttgattccgtttcaacagcactccatatctgtgatgagcgcagctatgaaggagaagcatccatgaaactagagtcatatgccttcgaatataaaggagaaggctctcttgatgacttcccaataattgttaaagagtatgaagatgaaaatggaaaacggttgattctagatactacagcaattctaagatacatcatagacaaaatagaagaaggagaagacctccacaagattgcagctgcaggccaaaaggcagtaagcattggacttgcaaaacttgccattgaatctgcaaaagaaaaaggaataactacaatcggagcaacaggaggagtcttctataacgaagccattacagattacatcaaaacatacatagaaaaagaaggctttgatttcattcaacacattaactcatgtcctggagacggttctgtctctttaggccaagccattgtagcaggaactaatttgaataatttttaa

SEQ ID NO: 2033 - DNA, 498 bp, Methanobrevibacter ruminantium
  source 1..498: mol_type = genomic DNA
atgaaaagaaaagtaattatgatattggcaatattgcttgccgttggaatgacacttactgcagtaagtgcagaggacagttggagttttaacttctccagcgaagaaaactccgacggaggatcaataaactttgaaaatggaaaattgacaatacaaggtattgaatttaccattcctgacggatatgaaatggatgaatcatcaaagaaagtagctgaagacgctgaagattttgatgcaaaatattcagcatgcaaattcactaaaggcgatgatgaaattgttgtaaatgtcttctttacagatggggatttcgaaaaccttagcgcaaataatgccgaccaagtcgaaaaaaccttaaacgacattaaaggtttatacgaagaaaataaatatggcgataatactccaacattcacttatattgaagatggtaaagtcgttaaaataaatgcccctaatgatgaaatcattgaatcagtaatgggaaaataa

SEQ ID NO: 2034 - DNA, 843 bp, Methanobrevibacter ruminantium
  source 1..843: mol_type = genomic DNA
atgaaaaaatcatcaataattatattttttgcagtttttgaaataatagccatcctattattcattacattaaatgatattttctacctattcaatttcacatacataggagcctgtctatcaatcggtctttatttgtacaatgtagatagcaaatattcaaaatacgctagaaactttattcaattggccatcggactatatatgctggtttatcttggaataatctccagagaaaacatgatgatagagggattctggtattatctctttttaggggtctttgaagctgcagtgatccactatctcgttgcaaagatcttaggaccattcctttttggccgtggatggtgtggatatgcatgctggactgcaatgattcttgatcttttgccttataagactccaaacaaaaaccttgaccatgaaagaaagaattttggtttcatcagatatattcttttcattgcttccttaataggtgttggattgctttttatgatgaatgtgcctaatttaagcacagtgatgttttatctgtttatagcgggaaacattgtttactacacagttggaatcatccttgcatatgctttaaaggacaatagggctttttgcaaatacatttgccctaccacagtctttttaaagataggggcaagatactctttattaaaggtaaagtacaaaagggaaaattgtatcagttgcaataaatgctatagggtttgtcctatggatgttgatatttgcaataatgataaaaataagaaaaacggtacagaatgcattttatgcttaagctgtgccaaggaatgtggcaatgatgctctttttctataa

SEQ ID NO: 2035 - DNA, 516 bp, Methanobrevibacter ruminantium
  source 1..516: mol_type = genomic DNA
atggaaaatgaagggcagaatcaacaaaatctaaatgatgttgatatggaagctattcttgatgttatgggatgtaagactagacgtgacatcatggatctcttaagggaagagccaagatttgttagtgaaatatctcaagagctccaaataggacagaaagctattattgaacatttaagggctatggaagatattggtattttaacttcttcaaccaaaaaggtagtgaggggccgtcctagaaagtattatgacatgcctaatgatgtgaatgtgaatattacaattaccaaaaatacatttaatgtggctatctctcaggatatgttaaatgccaatcacgttcctcaattgccttcaggtgatgaatggtctaagttgttggacattgaaaagagaattgatcaaggtcatactgaggcgattgaagagttgaaaagtcagatacgtttgtatgacaacctaaaagaaagagcagaatacattttagaaaggacttataataagtattag

SEQ ID NO: 2036 - DNA, 693 bp, Methanobrevibacter ruminantium
  source 1..693: mol_type = genomic DNA
atggctaataaaaaagaagaagaaaaggaagaagaatctgaagatgctaaaaaaagcactaaagataagatcaagtctaaaatttcaaaatcttcagatgattcctctagtgacaatgaagaatcctctagcgataaagaggaatcttctaaggatgacgaaaaagacaaggaattagctaaattaaatgaagaccttgaaaagaaagatgaagaaataggagaacttaaatcccatatccaacgtcttcaagcagatttcgacaatttcagaaaacagaacgacaagcaaaagcaagacctaatccgctttgcaaacgaaggtcttatcgtaaagttcctggatgtctatgaagatatggaaagggctcttgaaaattcaaagactgaagaagaacttagagaaggtttagaattaatttattctaagatgaaaggcactttagaaaaggaaggagtcgaagaaatccctgcagttggagagaaattcgatccattcaagcacgaagcattgcttactgttgacagtccagatcatgaaaacaacgaaatcgttgatgagctcatgaaaggatacactctcaagggtaaagtgattaaatattctaaagtaagagtttgtaaaaaagcaaaaaaagctgaaataaataaagctgaagaagcaaaagatgatgaggataaaaaagaagaataa

SEQ ID NO: 2037 - DNA, 1896 bp, Methanobrevibacter ruminantium
  source 1..1896: mol_type = genomic DNA
atggctgatgctaaaaaagaaaaaatcattggaattgacttaggaaccagtaactctgctgcatccgtacttgtcggtggtaaacctaccgttatcccaagtgcagaaggtgcaagccaatacggtaaggcatttccaagttatgtcgcatttactgaagacggacaacaattagtcggtgaacctgcaagaagacaagcagtaaccaaccctgaaaacacaatcagtgcaatcaaaagaaaaatgggtaccgactacaaagtaactatccaaggaaaacaatacactcctcaggaaatctctgcaaagatcttgcaaaaaatcaaaaaagatgcagaatccttcttaggagaacctgtagaaaaagctgtaatcactgtaccagcttactttgacgataaccaaagaactgcaaccaaagacgcaggtaccattgcaggccttgatgtagtaagactcgtaaacgaacctaccgcagcaagccttgcatacggaattgacaaacaggatgacgacgatgacgtaaacatccttgtattcgacttaggtggaggtaccttagacgtaaccatcatggaattcggtggaggagtatttgaagtgcaatccaccagcggtgacacccaactcggtggtaccgacatggacaatgcaatcatgaaatacttggcagatgagttcaaggctgaaaccggaatcgacttaatgaacgatgatcaagcagttcaaagattaagagaagcagctgaaaaagctaaaatcgaattatccacaaccttaaccagtgaagtaaacttgcctttcatcagcatgggtgcagacggcaagccacacaaccttatcaacaacttaaccagagcaaaattagaagagttagtggatcctatagtaaacaaatgtggtcaaccaatcaaacaagcattagacgatgctaaaatgaccaaaaatgacattaacaaaatcatccttgtaggtggacctaccagaatgccagttgtacaaaaattcgtagaaaactacataggcaaacctgtagaaagaggaatcgacccaatggaatgtgtagcaatgggtgcagctatccaaggtggagtactcgctggagaaatcaaagacttagttctcttagacgttaccccattatccttaggtattgaaaccttaggtggagtatccactaccctcattgaaagaaacactacaattccagctaaaaagtctcaaatcttctcaactgcagctgacaaccagccttccgtagatattcacgtagtccaaggtgaaagaaagatggcagcggacaacaccacacttggaagattccaattagtgggaatcccacctgcaccaagaggaatgcctcaaattgaagtaaccttcgacattgacgcaaacggtatcataaacgtaaccgctcaagacaagggaactggaaaagaacaatcaatcacaatcacttcctctacaaaactctcagatgaagagattgaaaaagctgtaaaagaagcagaaatgaatgctgaagcagacaaaaagaaacaagaggaaatcgaagttagaaacaatgcagattcaatgatctacactgcagaaaagaccatcaatgaggaagaaatcaaagacaaagtctcagatgaggaaagaactaacatcgaaagattggtagctgaacttagagaattaatcagcggtgacgacatacctgcaatcaaagataagacagatgaactcactaaagtcgttcaagacatcggtgcaagaatctatcaggaagctgctgcagcccaacaagcagcacaaggtgcagctggaggagcaggccctgacccaagtgcaggaccttcaaacgatgatgatgacggcacaatcgatgctgaattcgaagaaaaagactaa

SEQ ID NO: 2038 - DNA, 1176 bp, Methanobrevibacter ruminantium
  source 1..1176: mol_type = genomic DNA
gtgagaaaattggcagagaagcgtgactattatgaagttcttggagtagatagaactgctgacgaaaaggaaatcaaaaaagcttaccgtaaattagcaagaaaataccatccggatgtagctgaagaagacaagaaggaagaagctaccgaaaaattcaaagagataagtgaagcttacgcagttttatccgacgaagagaaaagacaaagatatgaccaatttggacatgcaggtatggatggcttctctaatgaagacatatttagaaacgttaactttgaagacatcttccaaggcttcggcggtggcggaggctttgaagacattttcgatattctattcggcggaagcagcagatctcgccattataatgcaggacctcgcagaggcggcgacatctacactgaaacaacaatcactttagaggaagctgcaagcggcgttgaaaaggacatcaaaataagacatgatgtcttatgtcctgaatgtggaggtagcagagcagaacctggatctgaagttgagacatgtcccgtctgtggaggaaccggtcaaagaaagcaaatcagacaaagcctattcggacaagtaatgaatgttgtccagtgtggcgaatgtaagggaaccggtaaaataatcaaggagccatgtcacaactgtaaaggaaaaggaactgtcaaggaagacaagaccatcagcgttaaaatcccagcaggagttgaaacaggcaaccgtttaagagtttcaggagaaggccatgctggagatcttggaggaggaaacggagatctctatgtagagattaatgtaaaaccacataaagatttcgaaagagatggcgcaaacctctactatgaaaagcaaatcagctttgttcaagcaagccttggtgacactgtagacatcccaaccatagatggggcagtggaactcaaaatcccagcaggtacccaaagcggaactgttttcagattaaaggaaaaaggtatgcctcaaatgagaagaagcaccaaaggaaacctttatgttacaataactgtcgtagttcctcaaaagcttaataaagaacagcaaaagcttttaagaaaattcgcacaaataagcggagatgaaatctctgtctataaaaaaggaatttttgataaagtaagggatgctataaacaacccttag

SEQ ID NO: 2039 - DNA, 771 bp, Methanobrevibacter ruminantium
  source 1..771: mol_type = genomic DNA
atgaaacttatgatgtatagtataaaaatgcgttcagctaaaggagggcctcatgaagagggtggaaaacacatatcaggtgcagaacgtattttaagagaagatgaaatagaagaagagctaataaatgtctatagaagagctatcacacacgaaaagggaaagccagactttatcaacctcaagatagaagccatagacgaagacaagatactctataagaagaggctaaatataattcagcacaaagtaagctcaaaggaagagggattaaagctagcaaaagaacttcttataaaaaacactgtaagcgaagaggcagctaaagaaggcatatcaagcatacaaaagctcaaggaaagcatccatggagccatgctacttgacaaggacagcggaaaaagaattgatgataaaggaattaaaggagtccgagttacaggaatagccagtgcagacataaagaaatataaagaatcccttaaaagggacggcagggaaggactgcatcttgaagaggcactaatccttgcttcaaagatagcaagctgtaaggcaatagttgccgaactttgctggtcagatgatccaagctatgtgattggatatgttggcacaaaagaaaactatcatcgcatccctatcctaaaagataagggaaatccagtagggggaagggttttctttgttgatacaagccaattaaatgacaattacaccttagaggacttaatagattatctagaaaaacaaatagtcttaatcgaataa

SEQ ID NO: 2040 - DNA, 1245 bp, Methanobrevibacter ruminantium
  source 1..1245: mol_type = genomic DNA
atgaatccaaatcttgaaatgaaactaaaggaagagttagaagagcttaaaaacaataatctaaatagaaccatagatgacttaagatttataagctctacaaaggccatagataaagatggcaaggaatttctagtatttggaactaacaactatcttggattgactcaccaaccagatgttataaatgcatctaaaaaagccagcacatatggaactggctccacaggttcaagactcacaacaggagcatcatttgaagcaagagagctagaagaaaacctatccaaattcaaatcaaccgaatcaactcttatatttaacaccggatatatggccaatctaggaattatctacacactaacaaaggaagatgacattatattcagtgaccaactaaaccatgcaagcataatagatggaacaagaatatctaaggctaaagtcagagtctataaacataaagacaccaaagatttggaaaacctaattcaaactgaaataaaagaattaaaagaaaaaaacataaactcatccaatttcttcattgtaacagatggagtattcagcatggatggtgacatagcacctcttccagagcttgtagaaatagcaaacaagtacaactgctgccttatcattgatgatgcccatgcaactggagtcattggaaaaacaggcaaaggaacagttgaatattacaaggataaaactggaatagatttaacagaatctgttgatttgcagataggcaccttaagcaaggcccttgcatcagaaggaggatttgtatgtggaaagaagacctacatagactatctcataaacaaatcaagaccattcatattctctacagcactttccccatctacaatagcaagtgccaacgctgcattaaatctattgaagaaaaatagcaatgaatatttaactaaacttcaaaataatacaaaacttatgagaaatctgctaaaagagggcggattgaatgtgattgatggagaaacaccaatcattccaattatcataggccctgcagacttaacaaacaagttttcaaaggaattagaaaaagaaggaatcttagtctctgcaataagaccgccatcagtacctaaaggagaaagcagattaagattaactgttatagccacacatacaaaagaagaaatcacttttacagccaaaaccataataaaaatctggaatgatttaaaaaaaaaactagaatatgaaaatcattaa

SEQ ID NO: 2041 - DNA, 9531 bp, Methanobrevibacter ruminantium
  source 1..9531: mol_type = genomic DNA
atgaataagcgaatatttctatatatagcactgatttttattatttccctgctttctttttctgcagtcagtgctaatgaagacatttcaagtgacaatctcatcttggatgagaatgtttatgatgagaaaatcattttagatgatgttcaagataagaatatcatatctgataatgattatgacgatgtcattccagttgaaaatgctaatgataatgcaattttagctggaaatgatgaagaacttattttagatgagaataacagtgaaataagtgaggataataaaaatgataagaccaaactctccgatccaaacacatattcttttacccggctgaatcaagccataaatagtggagctagtgtaataaatttaactgacaattatcagtataccgagggggatgaatcattcattcatggtatcatgatcagtcgcagcataacaataaacggaaatggcatgacaataagtggttcaggcgttgcccgtatttttgaagtatttacttctaatgttatcatcaataacattacttttagagatgcatatgcggaaggagatagtaatcgtcaaaattatggtggtgctatctttatgtatggttcagacagcatagtccaacattgtaaattcattaacaacaatgcaaataatgctggtggcggcgctatcgtattggtgggttcaaacagcagagtagaatattccgacttcaccggcaacaatgggcaaaatggtggagctgtctatttgtatggtaataacaccaaggcgatatattgtaacttcaccagcaacaatgcaagcgagaaggggggtgctgtttatacctacggatcagatatcacagtcgaattctgtaacttcaccaacaactctgcatatctagagggtggcgctatcgattgggaaggtgaaagggggactgtcaaacattccagcttcgccaacaacactgcaaacaataatggtggtgctatctcatggtatactgccaacgggactgtagaacattccaacttcattaataaccgaatggcaacttttggtggcgctatctggtggtatggtgaaaaaggaaccgtcaaacattctaacttcaccaacaatagtggaagaaatggtggcgctattcaatggtctaaaaatgacggaactgtagaaaattccaatttcactaacaacactgcaattttagctggcgctgtaagatgggtcgctgacaacgggacaataaaatattctagattcattaacaatcatggttatagcgctggtgctatcgactaccatcttacatatgccaatatttctggatgtttatttataaacaatacttcagattacagagcaaacgtatatgaggacctgtttgagtctaaatcttattctaattttaacaataacattttgctaaacaatggaggtaatgaaattaattttaatacatctgagggcttcaatgcagactataactggtttggagataattcacttaattaccttgacaaaccaaatatttatagtaatacttggttgtttttacagccaatagtaaaccatgatagtgtcttccttggcgaaagttgcgaaatcacttttagattatactcctatgatggaacagaagttcatgaatatgataatgcccttgtataccctattaaattaactctaaattctaactacggcaacgtcaatgataccgtaggattggaagaaaaggccatattcacccctcaaactcttggatatacctcagtagatgtatatgcagaaggcagttacattggctcagtaccaataaatgtttatgtgccaagctttagcgacttgaacagaaccataaatggcaacgaagactccataataactttaaataaacattatatatttgatccagagaccgatgctgctttcataaatggagttatcataaatcgcactgtaacaataaatggaaatggctttacaataaacggttctaacaatgcccgtattttccaagtaactgcctctaatgtcgccatcaataatgtcacttttgcaaatggatatgcaaatggcagcactgatgaggataaagatggtggtgcaatccattggtctggcgcaaatggtaatattgaaaactcaactttttataacaaccatgcaacaggtgctggaggagcaataatctggcaagcccaatatggaaatgtctctacttgcctattcataaacaacactgcagatgatggcgctaacgtataccataacaattatccatctgattcccattctaattttaacaataacattatgttgtacaatggaaataatgaagttcatttcacagtctataacggctccaatgcagactacaattggtttggacataactcaagcaattacaatgacgcaacaactggcataattggagatatatggctctttttaaatgcaacagcaaacccagatacaatcttaatttcaaacagttcagaaattagctataagttatatgcttataatggaagagaaattcaagaatatgataatcatcttttatatcctatcacattaaccttaagttcaacaaatggaatagtcaatgataatgtcgcactggaagaaaaagtcatattcacccctcaaaatcttggaactgccacagtaacagcaaaagcagcaggcactgacatccaaacaatatcaataaaggttttcgaagcaagtttcagtgacttaaacagaaccataaatggcaacgaaggctttgaaataattttagataaaaattatgcatatataccagagatagatgctgctttcataaatggaatcaacataacccacacagtaacaataaatggaaacggaaacacaataaacggtttagataaagctcgcatcttccaagtaactgctcctaacgtcactatcgataacattactttcataaatggatatgcaaacgatgatggtggagccatcaactggcaaggcccaaatggaatcatcataaactcagagttcattaacaaccatgcaactagtgctggaggggctatccgctggtttgctcaatatggaaatgtctctgcctgcctatttataaacaatactgcagatgatggtgctagcgtatattataatgattatccgtctgattcccattctaattttaacaataacattatgttgtacaatggaaataatgaagttcatttcactgtctatgagggctccaatgcagactacaattggtttggaaataatctaagtaattacaatgaaagaccaacaggttttgatggcaacgtttggctctttttaaatgcaacagcaaacccattgacaatatcaatctcagaaagctctgaaataagatataaattatatgcctacgatggaagaaacatccttgattataatagaactcttttataccctattaacttaaccctaacatccttaaatggaaatattgaggatattacagaggataaggccatattcgctcctgaaaatcttggaattgccacagtgactacaaaagcagaaggcattgacatccaaaagatatcaataaatgttttatatggaacaatcttttatggaagtttcagtgacttaaacagaaccataaatggcaatgaagatgctgaaataactttagataaaaattatgcatataatccggagattgacactgccttcataaatggaattgtcataaacagaacattgactatcaatggaaacggttttacaataaacggttccaacaaagcacccatatttcatataaccggggataatgttaccatcaataacattagttttgttaatggatatgcaaatgcatatgtaaatggctatgatggtgaagatatgaggggtggtgccatctactggcaaggtagaaacggcaaggtaacatactctaacttcaccaacaacaatgcaaatgatggtggtgcaatttattggtttggtacagatggtattgtagaatattcaaatttcattaacaacaatgcaaatgatggtggtgcaatttattggtttggtacagatggtattgtagaatattcaaatttcattaacaacaatgcaaatgatggtggtgcaatttattggtttggtcaaaacggaaatgtcgaaaattccgtcttcacccaaaatcatgctggctcttatggaggtgcgatttattgctctggtgctgagagtattgtagaatattcaaatttcaccaacaataatgcatataatggtggtgcaatttattggtttggtcaaaacggaaatgtcgaaaattccgtcttcacccaaaatcatgctggctcttatggaggtgcgatttattgctctggtgctgagagtattgtagaatattcaaatttcaccaacaataatgcatttaatgggggtgcaatttattggtttggtcaaaacggaaatgtcgaaaattccgtcttcacccaaaatcatgctacctttgctggaggtgcgatttattgctctggtgcagagagtattgtaaaatattcaaatttcaccaacaacgatgcaattaagggtggtgcaatctattggaatggtcgaaacggaaatgtcgaaaattccgtcttcacccaaaatcatgttgacaatgatggaggtgcattatattgggatgatagtgaaggtaaagtcacttcttgcatatttgtaaataatactgctgaaactaagcatagcggacatcttattttgcctatgggaagaggtggtgcaatctattggaatggtcgaaacggaaatgtcgaaaattccgtcttcacccaaaatcatgttgacaatgatggaggtgcattatattgggttgatagtgaaggtgaagtcacttcttgcatatttgtaaataatgctgcagatgttgaggccagcgtatattataatgaacggggtgcctattccaattttagcaataacattatgttaaataatggaaaaaacgaaattaaattcaagatttttgatcgctcaaatatagattataattggtttggaaataatctaagcaattacaatgaaaaaccaggaggttttgagggcaatatttggctatttttaaatgctacagtagaccctaatatgctcttacttggtgaaagttctgaaattacttttagattatatgcctatgatggaacaaatgttattgaatatgacaatgatttaatatatcctattaacttaactttaatttcatcaaatggaaacatcaatgaaactgtagggttggaagaaacagcaatattcactcctcaaaatgtaggaactgccatagtaactgcaaaagcggaaggctttgacatccaaacagtatcaataaatgttcgtgcagcaagcttcagtgacttaaacagaaccataaatggcaatgaagatgctgaaataactttaggaaaatattatgaatttgatccagaaacagatggtgctttcatacatggaataatcattaaccgcacagtgacaatcaatggaaacggcactacaataaacgcatcaggcaaagctcgtatcttccaagttatcgctgataatgtaacactcaataacattacatttacaaatggaaatgcaagcggcgagggtgctgataggagtggaggcgctatccgttgggaaggtgcaaatggtattatatcatactccaatttcacctttaaccatgcatacctaactggaggggctattatctggtccggtgaaaacggtactgtcaaacactccagtttctctcaaaatgatgtagatggttctggtggagctattaggtgggctggtgcaaagggcactattacagattccgatttctatctcaacagtgcaacagatgcaggtgccatctggtggcttggtgcatatggtacagtcaaatactccaatttaatcaacaaccatgcaggtagtcgtggtggagctatcatgtggagtggtgaaaacggtaatgtgacatactccaatttctcactcaataatggaggaagtggaactgggtatgatggcggtggcgctatcttttgggatcatttaaacggtactgtgtcatattccaatttctccaacaaccacataaatggtcatggaggagctatcgcttggcatgaacaatatggaaatgtatcctcttgcttatttgtaaacaacactgcaactgacggcgctagcgtataccataatgatcattcagaatcatattccaatttcaacaacaacatcttgctaaacaatggggaaaatgagattcattatgatgtatatgatggctccaatgcagattataactggtttggaaacaatggaagcaattacaatgagaaacctgcaggcagcgttggaaatgtatggcttttcttaaatgcaacagccgatccaaacccaatatctattttaggtagctcagatgtaagctttaaattatatgcctatgatggattagaccttattgaatatgacaataatctattatatcctatcatattaagcctaagctcatcaaatggaaatataaatgacactgctggattggatgaaaagataatattcactcctcaaaatattggaactgccactgtaactgcaaaggcagaaggcatcttccaaacactatcaataaatgtttatcctccaagctttagtgacttaaacagaaccattaatggaaatgatgatgatgaaataactttagacaaatattatgagtttaatccagagttggattcagctttcatacatggaatcatcattaaccgcacagttacaatcaatggaaacggaagcacaataaacggttcaagcaaagcacgtatcttccaggttatcgctcctgatgttgtcctcaataatattacctttgcaaacggaaatgcgaatggtgaaaatgaggggggctatggtggcgctatcctgtgggaaggcgataacggaagagtcgaagattcaaccttcatcaacaacaatgcaagcggatacggtggagcaatctttggaggaaactgctcagataatgttattttccaaaacaaccacgcaggcatagaaggagatgactggtatgtccctaaacctgtaatatccgtcaatgacttcacatccacatataaatcaggagagaagctatatgtcaatgtgtcctatgttggtactcaaatagatggaatcaatgttacaatctctgtatttgacagttccaaccaattaattggcaactattcctgcctaagcggtgacggatggactgtagatttggatgctggaaactataacgcattagtatttgtagattcagatgaatatggctatggagaggagacaattgcattaacaatcaataagcgcgcttctcaaatttcagctaacccattgaacacaacatacaatggaaacgaaaacattataatgatccttaaagacaattataatgaatccattgccaatgcaactgttttggtagactttaatggtgagaaaaacctaacaaccgatgagaacggtcaaattgttgtgtccgctaatggaattgttcctggagaatactgggcacagttcatcttcgacggcagcaaaaactatgatgggtcagatgaaaaggttaaagtgattataagtaaggcttctacaagcctaagctcagagaatatgaatgttagctataatgaaagcaaatacctgattgctacattaaaagatcaatattccaatcctttagctgaaatcagcatagaattcaaatctaattcatcaactgttaaaaatgagaatactgacaataagggacaagctaaactcttaattgacttcaacccaggaacttataatattgatatcagtttcgctggaaacagcttatatgatgcctcatatgctactgtgactgtggtagtaaacccatctgatgatagtggaaatggcactgaacctagtggcaatggaagcagtggaaacggtactagtcctgaaggaaatggtacttctccaggtggtaatggaacctctccgagcggaaatggtacttctccaggtggtaatggtacttctccaagtggtaatggtactagccctggtggtaacggtactgatcctggtggtaatggtacttctccaagtggtaatggtactgatcctggtggtaatggtacttctccaagtggtaatggtactagccctggtggtaacggtactgatcctagtggtaatggaacctctccgggcggaaatggtactgatcctggtggtaatggtacttcttcaactgttaaagatactctaataggcattagcacatccacagtcatatatggaaatgatgagcttatcaatctgaccttaacaactgcagacaaaactcctattgatggggtcattgagctaagagttggcaattctatctataatgtaactattacaggtggaaaaggttcaaaggctctttccaatcttactataggaaactacacagtaactgcagactataaaggagattctgaatacaattcatccactgcaagctctagtttcaccgtgagagaccgtatcgaaaccagaatcatatataacaatatgaccactgcccctgtaggtgcaaatgatggcagaataggtaattacttcagagtcaaattggttgatgaaaacaatcaagcactagcaggagttcctatccaaataggcttcaacggaagaatctacaacagaacaacagactctgaaggcggagcaaaactacagataaaccttgcaaaagaggatggatacacctttgcaatctgcttcaaaggagacgacaactacaacgcatccttcgaagtagcaaaaatagacgtaaacaagaaatatccaaaaccaaacagtgcaaattcagagtccgccgaaccagcaaacaaaacacaaaagaacacaagactcgaaacctccatcctctacaaggacatgaaaaccgaatcagtcctaaaagctgaaggaagagccggaaaatacttcgaaatccaactagtagacaacaacaaaaaggctttagccggagttcctatcaaaataggattcaacggagtagtctacgacagaataacaaatgccacaggaggcgcaaaactacaaataaacctcctgaaagtaacccaatacacattcgctatcgcatacctcggagacagcaaatatcaggcatcattcgaagtagcaaaaatcactgtaaacaaacaaaccccaaaaatcacagcccctcaaaaaacatttaaggcaaaagcaaaaacaaaaacagtcactgcaacacttaaatcacaaagaggaacattactaagcggcaagaagatcaagtttacagtaaacggcaaaacctacactggaacaaccaattccaaaggtgtagcaagtgtaaaggtctccttaagcaaaaaaggaacatacacagcaactgccaaatttgatggagatgccaatacaaaggcaaccagtgtaaaattcaaagtaaaaattagttaa

SEQ ID NO: 2042 - DNA, 342 bp, Methanobrevibacter ruminantium
  source 1..342: mol_type = genomic DNA
atggcacgtcataaatctaataagcgtttgaataagggtgaagaagaagatccaatgtctggagcagcaaaccttgtggatgctatgttagttattgcagtaggtctattggtctttttagttatctcttggaacatgcagggaatcgttttcaatgaggacatgactccggaagagaagcaggaagtaatgcaacagatgcaacaggtaactgaacttgaagagggtcaggaattgaatgacactccagatgtaagtaatagttcaggtaagggctatacagagatgggtaaggtctataaggactcatctactggtaagctgattatggttgagggctaa

SEQ ID NO: 2043 - DNA, 645 bp, Methanobrevibacter ruminantium
  source 1..645: mol_type = genomic DNA
atggtaacagttattcctggaagtgacttactaacttccgcattaaatgttgtttctcaaagtttacagatacctgtaatagtatttttattaatttttgcagtgtacgctgtaattactgtaggggggcttatctcagaatacagttctcgtaagaaagtacccgttaaagtaatcaaggatttaatatacgcaatatctagaagtgaggatgttacagaattggaaaatatccttaagaatgcaagaattccaaagaatcaaaagagggttttaatcaatatagcaagatctggagagttaaagaaagactccagagaggcattagctgaaaaattgattgaaaatgaagaggacatcattgagaaaaagcttcaaaagacagatatcgttacaaagattggtcctacccttggtttgatgggtacccttattcctatgggtccaggtcttgctgcattaggtagcggtgatgtgacaaccttgtctaatgcgatcattgtagctttcgacactactgttgtaggtattggatccggtgcagttgcatatgttgtctctaaggtcagaagaagatggtatgaacagtatttatctaatttagatgctttatctaaggctgtattggataggttgaatgaatag

SEQ ID NO: 2044 - DNA, 726 bp, Methanobrevibacter ruminantium
  source 1..726: mol_type = genomic DNA
atgttttgtggtgagaaaatggatacaattagtatgctatggcaatttggaatattggcagcagttcttgtatttggtatcaagttaggtttggctgttggtttggctaacctctcaaagaagtatctggctactgtctgtattggatatggtgcaggagtactcattcttgctcaaatttcctcctattttgctactgaaattactgagcttatctacacatataactctctgttctttattataatggctgttataatgattctagcaggtatctttacaataagggaatggaaggtctttgaaaagaatactacagctgccacttgtgctgcagtgattgccccttgtccatgctgtttcggttcaattattgtcagtatcttgttagtggctcctacagtcggtttaggtgctgtggatttaagcgtatatgtggcagcagctttggttttaactattatagttacttactttgcttcaagcatattcgttcgatatgttgataagccttatccgattgtacttggaaacttcatgttcttcttgggaatttatttcctcttgtctgcattggtcattccgaacattgcagcaatcatgaataagtcaatgggatcaatcagcatagtttcaatggaaagtttggctggctctatagttgctttagtgcttttagtagttattggcatagtattttcaagaaaaaacaatattctaagctaa

SEQ ID NO: 2045 - DNA, 5628 bp, Methanobrevibacter ruminantium
  source 1..5628: mol_type = genomic DNA
atgaaatataataaaaagatattctttttatttttattattgtgtctcataattcctcaagctatttatgcaggggatgttgatgatttatcggatgctggtaattacactagagataattcacctttaacaataagttccacttatcaaagttctacttatggatccgatgggggatatgatgataaaaatgagaatatttatattttagataaagttagtgatggggataaatctaaaacatgctgttctaaggacctttctttagataatgcttgttctatggataaatcttcttgttctaagagcaattcagcttgttctaagggcatatcttcagataaagattcatctaacttgtctaatacatatttagtttctgaaaataattataatgattttaatgttgatatagatttaaatgataaactttcagatttggatttaaacaatgatttaagtcttaataaagatttaactcttaatttaaattcaaataacgatatggattatttaaatcttgaggaagttattcagacagatggaactttaacttatgagggcgatttggatcaaacttatttaaacgatgagtctttaaatcaagatgttcaaaatgatgattctttaaataaaaacgatttaaaatccccattaagtgatgaaaacacatttaatatttttataattagtgataatacaggaaataatctttttgatgcagtggcatgtgaaatcttagacaattccaatttttctaatgtcaaattcaatataagaagcggaaaccaaataaatgcaatgagcgaggatgaaatctatgaactgatggctccttgcgatgcattcatcggccagtgggtaagctccaatgtggatgcagtattaaccagtcttttaaacaatcatcctgaattgtcaaataagaaactgttccttatcttggaaccacctactggaaacatcaattcaagctccagttcattgaatttggttagaaactctacaattgactataagaagatattcaatggaatttccaatgacgatttgataaattatttcaaggctaccaaaagaggaaacaacttcgaaagcattcaagaatacattgacaatgaaggaagctcttttaatagcatctttaataatttggttctctataaggatataaacgataaggcaaatcttaaaaacgaattgctctatatcctttatctattgggacatggatgttcctatgagtctgcaaactttacaggagtacaggcatctggaatattccgtgacaggtggtattcatttgatgaatacgttctcaccttcttcaatgagtccagaaatcgtaccatagggattttggaaagtacaatgtatatccaatcccaacaattggatttggtaaatgaaatcacagaacgccttgaatcaaaaggatataatgtcattcctatttactgtccggcaggtaacgccgaacagctaaatatcatggtgaaatattggaccagtgcctgttcaaacatcagcggattcttagagaatccacaagactttgacatttatgtggatggaattatttccatggttgcatatggtgtcggtggagagaacttcaccaatgccacaaaattctttgaagatgcaaatgtgcctatattcagagcggttcactctgaatacattaccaatgagcaatgggaattaagccctgtaggtctctctaccactaaaagtgataaatggtggcacgttacaattgcagagtcccagggaatttttgatgctacatatgttggtggtgttgactcttatatttcaaataggacaggagcaatcatattgacttttgttccagttcatgagaatatagaactcttgactgatagggtagacgcttgggtggacttgaagtatactccaaatgaggataagaacatatccatcgtatactacaactaccctcctggtaagcagaatatcggtgcaagctacttggatgcaatcacaagtgtctataatatgctttataccttaaaggatgaaggatactatcttacagacttgccaaacaatgtttcagaacttgaagatatgatgattgcctgcggtataaacgtagctaactgggctcctggagaagtcgaaaagttagctaaccgttcaggtgtcgctcttcttcctgtagatgaatacttggaatggtttgattccttagacgatattgttaaagtccagattaccgaaggtcctgttgcctatattggccagatggttaggcgtgcggttctaatcaactacaccgatgaggtggagacaatggtcaatgattggtacaatcaaatcaaggcattgcttcctgaaaatcagactgttgctgcaacaaatatattggataagcttgtaaacagcctgaagctctatgcaaacgcatcttccgatggcgatgaaaatgcatccctttactatgatgaattcttaagatattatgatgagtttaaaagtttgaatgtttctggattaaacggatggggtgaagctcctggaaatatcatgctggttaatcggaatggaaccgattactttgtaattccaggtcttacattcggtaatgtcttcattggccctgaacctcaaagaggttgggaggctgacattgaaaacctttaccactgtacagctgtagctcctactcaccaatatttggctgcttactattatatgcagaccaggcaatcaaatgccatggtatttgtcggaaggcacgcaacccacgaatggttgccaggcaaggaagttttattatcatataatgattatggttctattgttgtcggaaaggttcctcaagtatatttctatattactgatggtttagcagaggctatacaagctaaaagaagaggatttgcagtattgatttcccacttggattctcctaaatcatatactcatttatatggtaatctaactgtattggcaactctattggaggagtatgataataatcatatcattatagagtctgattctgataaagataatcaggctatcacttatcaggtaatcaaggataatcagactatcacttatcaagtaatcaatcaagagttagaggacaatctaacaagagcaatcaaggacttggtaattgcaaacaattactaccttacaattggattcactgcagaggaattgaacaatactgacatgttctccctaagctcaactttaaatgctttcttaaagaacactcaaaataccctatatccattaggacttcatgcaataggtcagaaatggacagatgaggatttggcgaacaccgttgcaatcatagtctctcatgactttgaatatggcggcaagaagaccaatctattcgatcagctatccttgtattactatggggaaaaatattccaatctgactccattgaagcgtgattatatcctaaacaggtcagtggatgtctgtaaggctttaatctattgggacacagagacagtgtctgatacaattggtataggaagtccagagttcattgagtcattaaacattgcaaagaaatacattgacctttacaatcaatgtatcagccttgagctggaagagatggtttccgccttaaatggaggatatgttccagtcaatataggcggggaaagtgtgactgtccctcaagtgctccctacaggagcaaacatgtaccaagaccagtcatctgagcttccgactcaaaaggcttgggattatgctaagacactctcacttctaaccttggcagaccttaatgacactacagaaaagataatcatgggtatctggtgtgtagagactgcaagggatgacggtgccctagtctctacagtgctctaccttttaggaatggagcctgtctggcataactcatcaagtgcaggatttgacgaagagggcattcctacaggtaagaaagttgaggacttgcctaatgtcatagcattggaaaacctcacccgtcctgacggatgggctaaaaagagaatagacgttactgtgattaccagcggattgttccgtgatctatacagttcacaggcacgtcttatggacaatgcatacaggatggctttagcttgttcatattacactatcgtaaacaataagacaattatggatagcgaatatgggcctcaagtctatgatgcacttagatccatcatgagaagcattagcttcaagggaatgtcaaacgaatcattagaagacaattatgtcgctaagcattggctagaggattgcatctattatctaagcctaggctataactctacagtctctggagaatatgcaataacccgtatctttgcacctcctaacggggattatggtgctggaatatcaaagcttgtgtcaatgtcatggacctggaacgatacagatgagctttcagagttctatattggcagaatgggaaacatgtattcaaaatattactggggagatacaaaccctgtcgtattcatgagggcgctatccgatacagaccatattgtggtaagccgtaataccaaccaatacggagtattggataacgatgacttctttgattactggggaggtctctcaatgacagttgaatacctatccaacaagactcctacaatgaatgtattgatgtatgcaaataaggacaatgcatatgttgcaacattcgagaatgttttctataacgagcttaatacaaggtatctaaaccctgaatggatcaagggaatgatgcaggaaggctacagcggttccagatatatgtccaacaagttcatttccaacctatggggatggcaggtaaccagaccttcatctgtctctgaaacagtttgggatgacgtttacaatacctattataaggacaaatacggattaggagtaaaatcatggctccaatctggaaacaatgcatattcattgatatccatgagcggaacaatgttgaattccgcatattcaggatattgggatgcagatgatgctacattaagtgatatagctaacacttgggcacaggctacagttgcaaatggggtagcatgctgtgactgcagctgcggaaatgtggcaatgatgcaatgggcattcaagtatgtgaatgctgatttgcttgctaagttgatgcctaagttgtatgacgcaactcaaaatccgctcttctatacaaatagcagtgatatgcctacaaactcttcgaatattgaccgccgaactacaaacagcagtgcagagtcaaacaatactgaaactgttcagactaactcaagctctaacagtcagcaaagcgctaacggaaacactaatattccaggagcaagcggcggctatatggtaggtacagaagcggatgcccaatcagatatggccagtgattcagatgcaggaatgaacgatgcaaatggagaaggcagatctgtagaggtcactaagagcacaagcactccagtggctccaaaggacgtaagtatgcctatagctattattgtttgtgttatttgtttagtggcattaataggattcggttatttcagaaacagaaaagacgacgatgattattataatgatgatgacgatgatgattatgaatataaatag

SEQ ID NO: 2046 - DNA, 5418 bp, Methanobrevibacter ruminantium
  source 1..5418: mol_type = genomic DNA
atgaaaacaaattataaaattattctaatttcaataattcttctcggtttggtcatgtcttttggagctgtctcagcagctgacctaaatacagtccagtccggtgaggtttcaggtggagttgacatagccagctcaaatcctggagtcgaaaatggagaattgacttacgaaattccagatagtgttgaaaacattcagtatgcagggctctttgttgacagctatactgcaggatcctctaatttggtatatggatccgaagcaaatatcactttgacaaaaaacggcgaaagcgaacagatagcaagtgaaagacttgttgcaagtgtgggaagtgcagacggtgaggtatatgtcattaacgaccacacaacaaaatgctttgcagactatatgatgacctataaccttacagacagacttcaggatgcaaagggaaatatcacaatcactgtaaatgccactcctatcgaaggatacacattctataataaaatcaagctgataggccttgtatttacatatgatgatggagatggagaccaattccattattgggtaaatgcaggttcatcttgggtaaagacagatagcggagagacaagcaaggctacatttaagcttggaaacgtgaattacgacccaactgtagccacccttgataactttgccctttcaagccaggatggtgtctataccttcaatggcaaggagatggatgagtccatagtcactgaaacaggggtatactattatatccatcacaagtttgacatattggataagattaagaacatgacaaacacccttgtatacactccaggggaaggctcatactcatttagaaatgttctttcagtggtaaagctggtaaagacagttccagtctatgctaaagtcaacataagctctgaatatgatgacattgtcttttcaggaacagaaaatctgcttaaggtgggcataaccaataatggtacaggctctgcatcctatctcttggatttatatgccgatgggaaaaaggtaaacagttctcaaatctcattagctgcaggaagggaagctgtaatatccttgattgacaatacaattaggccatctgcagcagacactgtaagcggtgcagataataagaagatcaattacactgtagttgttagcgataagaacactggagaggttttagatgaatccagcatcttccctaatctcctctataacggttatttaggcaagggcttggcttatcctgcagaaaagataagttcatttaagaatatcacagttaatggaggcatgatcattgagagtctaggtgattccacttatcttgatgcttcaatgactggcaaaaccgattcttggactattgatctgcctgatggcgctttcttcactgatgcatttgtctatgtgccatataatcttgataatggaaatgttcctatgttcacaagcacattcaatggggcggcagttaatcctatagcttcatatagggatcagccaaatataggagaaaatgctaaaaacggatacggattgcttgtttatgatgttggagagctcattaaggcaggtgtaaatagctttgccttatcaaaggaagcaggtattgctggagtttatccaagcaccctaattgcattttacaatctaacagattcagaccttctaacaagcgcattcatattcaatggggcagacctattatccaatgaatacaattcacttggaagagatgtttcaagcgataatatattatccatcggcgcttttgatggattggtaagtgctaagcttcatgtatttgctgccgattgccaagctggagagggagacttgactgttaatggcaaaagctataagaatgtatgggccggtacaaatagaagtgtcggcgattatgtggttgatttaggaaaatccactaatgcatcaaatgaggtgtcatttatttccacagcctcaaatattctagcccttcagcaattggctgttgttcaatataatgtcccttcagttaaggcaagtcttgtctctgaatattcaaacgctgtatttgcaggtaccaacaatgtcttgtctcttaatataacaaataacggtaaatttgattctatctatactgttgacttctatgtggatggcaaaaagcaaaacagcactgaaatttccctaaaatctggtgctaataagggattatatcttattgatgatacaataaggcctattgatgcaagcacagtaaatggggcagacaatcctaaggtcaattatacagttgtcatcattgacaaggaaaaatcaatggtattagatgagattaccataactcctagcctcttatataatggaaatctaggaaaggacttggcttatccggcagagaatatcacttcatttagaaatataactgtaagcggtggcgtgattgtcgatacattagatgattccacatatattaactctcaagcaacaaacagaacagatatttggaatgtaaatgtggctgatggcgatgtatttacagatgcctttgtttatgttccttacaattgggataagaccaacggatacatgccagtttggaatgcaagattcaatggtgttgcagtttcacctcttgtctcctatagggaccaatcaaatataggattcttcggcaagaacggatatggattggtggtctatgatgtgagcaagcttatcaaatcaggggaaaacactttcactttagaaaaagaagctggaatcactgctgtatatccaagcacccttatggcattctataatgcaactagttccaatagcttaaagaccatttatatctataatggtgcagacctattggcaaatgagaataacttcctaaacaggactgttgcatctgacagtcacttagatatctcctcttttaaggaagtaattagcgctaagctttatgtttttagtgccggtgctcaaaaaggtgaaggaaatattatatttaataataaaacatataaagatgtttggaatggtactgtaaacagtgtagatagtttcatcattgatttaggcaagtctccaagtgtgtccaatgatgtgtcctttgtctctacaggctcaaccattatggcacttcagcagctcattgttcttgactattatgtatcctctgttaaggcaaatgtgtcctctgaatattctggtgctgtatttgcaggtaccgataatgtattaaaagttgacttgaccaatgacggtcagggaggatctgtttatgtgcttgacttctatattgatggcaagattgtaaacagcacagaaattcctcttgatgcaggtaaaagcactgaaatctttttagttgatgataaaataaggcctgttgatgcaagcactgtaaatggtgcaaataatgccaaggtcaattatacaataactgtaactgataaggccagcggacttgttttatatgaggccagtctcaatcctattgtattatataatggaaatctaggaaaggacttggcttatccggcagagaatatcagcttctttgatgccataactgtaaatgggggcgtaatcattgatacattagatgattccacctatcttggagcaaaaaccaccggcagaactgatgtctggaaggttgaaattcctaaagatggaaagatagttgatggatttgtttatgtatcatacaattgggataagaccaatgggtctatgcctatttggaatgtaagtttcaatggagtatcagtttcacctgtggcccactatagagaccagtccaatatgggtacttatggcaaatatggatatggacttgtcgtttatgatgttggggagcttatcaaatcagctgaaaacaagtttaccttagaaaaagagaatggaactactgcagtttacccaagcactcttttagcattctataatcgtacagaatcaaataatagaactaccgtttatatgtacaatggtgcagacttattgtccaatgcaaataacttcttaggtagaaccgttgcaagcaatgccgctttagatttggccttgaatccaaatgatgagattaaaagctcaaggctttatgtttttgctgcaagcggccaatctggagaaggaaagctcattgtcaacaacaagacatttaacaatgtctacaatggcagtgcaaatagtgtggatgcctatattattgatttaggcaagtcccctagcgcatctaataatgtgtcatttatagctacaggctcaaccattcttgctcttcagcaattcgttgtggttgatgctatacaccagtccagtgaagagcttcaaaagatgatcaattcagctagggcaggctctacattgaatttgggaagcaacgtattcaaggatgtctcaaatgtaatcatcaataaggaccttacaataacaggcggaacaatatatgcaagagagggagagaccatcttcgttgtcaccgaccgctctgcaggaggtcctaaggaagtgaatatcactggagtcaagttcgttttagataatgcaaacacaattcttcaagcaagggctgtaaacggctccacaccaacttcaattgatgtggcttcaatcaacatcaaaaagaataatatctcttttgttgatgatgatgtggttccagaatcaataaccgttcttgaccttaagtcccaaaggtcttcaattgccccaactagaaacttgaccataagcggcaataatctaattgcaggtatctgtccattcatgtttgaagtaaccagcttcaatggaaaggactctgtagttgttccagaaggaggcaatatcccagataaaaaagcttctgtaatacattatgaagacatggttacaactgccatcaatacaaatattgaaggaagagtgggcaaatactttgaagtgaaccttacagattccaatggaaatccattgaaggataagaaggtccagataggatttaatggtgttgtatatgataggacaacaaatgccacaggaggagtcaagctccagataaaccttggatacaagggaacatacacctttgcaattgcattccttggtgatgattattataatggcagctttgttgtagctaagattaaggttaacactcaaaagacaaagatttccacttcttctaagacatataaggcaagtgctaagaccaaagccatttctgccacccttaaggatgcaagcagtaatcctataagcggtaagaagcttagtttcactgttaatggaaaaacctatagcgctacaactaattcaaaaggcactgcaactgtgaatgtaagcttaagcaagaagggaacttatagctttactgtaaagtatgctggcgatgatatgtatgctggggccacttcaagcagtaaggtggttataaaatag

SEQ ID NO: 2047 - DNA, 10356 bp, Methanobrevibacter ruminantium
  source 1..10356: mol_type = genomic DNA
atgaagaatagaaaatttttgatagttagcttaattcttattgttctaatgctggccttaggatctgcttatgccgcagatttaagtccagtgactaatggaactgtttctggaggtgtggatgtggcaactgccaatccatacgcttctcaaacaggaggccaagaaatacaatctggagaattaagctatgatgtcccggaggatgttagtgatgtccagtatgcaggactctttgtaaatgtttatggagggtctgcacagggagactatggtgcccagtccaatgtctcaataacatccaatggtgagacaagtcaaattgcaagcgaaagtttaaattatactgatggcagtggcgacggcactgtctatatagtaaatgaccacatcaccaaggtctattccgactatcagatgatttataatatcactgatagggttcaaggtgcaaccggtcaaataaagatcaatgtaacaaacaccaaacttgaaggatatgctaattttgatggcagaatcaaattaatcggtttggtctttgcttataatgacggaagcaataatagatttgattattgggtggattccggtcaggcttggtcaaatagtgcggattcagttaccaaagctaattttactgtgggaactgtaagtcctttcttaagtgctaacataagaaatattgcactttcaagcactgacggtaattattcattcaataagcaagagttaactggtggggaactcatctctgattccatgttcaaataccataagtgggatgtaactgacctcttaaaaaacaagacaaataatttaacttttaattcaaccaaatcttttaagaatgtactttctgtcttgacagttacaaagaacttagaggaaatatttgtaagtcctgacggtactggaactggtactactgcagatgatcctaccactatggataaggcagctcctgctttggctaataatggtataatccatgtattggatggtacctacacccaatccaaacgttatgacattagggcaaactactcatccattgttgcagtaaatcctggaaatgtaatattcgatggaaacaattctgttgcaaacattagagtatatggtgccaatgtaactttggacggcttgacttttacacatggtaaaggaactggagggggagtttatttcgatagcgatgcgaatggcggccttgtgacaaattgtattttcaaagacattaataataccggagctggaggagctgtttacatatccggttctaaaaatgttatgattgaaaattgtaaattcataaacaccacttccacaggtactggaggaggcgcaatctacattgctggagacaatgccaccgttaaggaatgcagctttgaaaatgctactggaaaggatggtggtgcaatccgtgtaaattctagagattttgcggttgtaagagactctaacttcactggttgtgttgcaactaccggcggagccattagttgggtaggaaaatatggaaatgtaaccaattgtacatttacagacaatcaagctactggttcaagcaatggtggaggagctatctattggcaggaaaactttggattaatcaataactgtacattcataagaaataaggctcaagtttatggaggcgctgttaattgggctgcaggtaaaatcaacggtacaatagtcaacagcatctttaaggaaaattccgctggaagagatggtggcgcatattattccgctgcaggtgcaaatgaaatgctaattatgtactgctcatttgaagacaatgaggcagatgcaaacggaggtgctatgggcttccgtgcagaccaatgctaccttcttgattgtaactttaccagcaaccatgcaaaacagaatggaagtgctgtaatgctctattccaatgtagccaatttccttggtattggaaactgtaattttgtagataactctgcagacgtattgaactattccattgttaacaatgcaggaaaattaaaattatctgaaaataacatcacaaccaatgatcttcgtgatggaatctacacaaacggttcaatattgactgacgtttatttatatctcattgtcaatgaaaccaatgatgctgcatccaatgtagtatatgcagacatcggcgatgaagtgcctattgacgtttaccttgtagatgacaacagcaatctcattaacggcataggcttaagcgtagagatcaatggaaccaacatcactgaatttgatttggatggatacacatataagacaagctacacaccaagtgaaataggtacttattatgtaactggaaactattccaaggctgagcttagcaatatcctaacaggatcaatcgttgtgggagaggaacctgtttctgctatagaaattgcttttagaggcgaatatgtaaataccacttatgcaggtgtggaaaaccttattgcagtttcattgcataacaccggatctttagatggaaactatcttgttgaattttatgtggatggcgagcttgcaggaactgaagaatctaaggtaaatgctggctacacaagcgatattaactttattgatgagaaaataagggatctaaacgaatcaactatattgggacatgacaatctacaggctaattacactgtaattgttaaggataatgaaacccaagaagttataggggaatccagctatttcccatatgtcctatacaacggttatttatctaagaaatacgaatattcagatgaattcataagctcattcagaaatgtcaccttcaatggaggctatttcattaacaccactggaagctactctggaaatagcaaccctggattgactgacatttggactcttcctgctcttggcgaaggggcaagctttgcaggagcttatgtatatgttgcatatacctgggataagacagaaaatggaccatctgactgggcctccagctttaatgatgagtccatccctattgtagctcaatatagggaccaatccaatatgggtacaagcggttcatatggatacggtcttgtggtctatgacgtttcctctttgattaaggaaggacaaaacaaatactcattaactaaaggggacacagctatatatccacgtacccttgtggcattctataatgtgactgaatcaagcactgtaaaaaccatgtacatgtataatggtgctgatttattatattacggtagctataatgttttggaaagacttgttatgacagattctgtattgaacattagtacagagggcaatgtcctcggatctaatttgtatgttttcgctgcaagcgctcaagcaggtgaaggtaacttgcttgtcaacggcgaaaaatatgaggatgtttggaacggtactaccagctctgtagaagagaaagtctttgatttgggagacaatcctcttgcatccaatgaaatctcctttgtatctaccggatctaccattttagcacttcaacaattcgttcttgttgaatatgaagcttactctgctgacgttacaatagcttctgaatataatggagcttgttatgctggtactgaaaatgcattgaaagtcaatgtaacaaatgacggtttggaaaaagccaattatttgattgaattatatgctgacggtgtaagggtcgactatgaacatgttgaaatcgatgttggcgaaagcaatgtcctaaccttaatcgacgacaccatcaggccagtgactgaagacactgtaaatggcgcagacaatcaaaaggtaaattacacagtctatgtaagtgctgctggaagtcttttagctgaaaagacaatcactcctaccatatggtataacggttacttaggcaaggactacgcttatcctaatgagacaatcagctatttcgacaccattacagttaacggtggagttatcattgaaactttaaatgataccacttatatgggcgctacagttcttaacagaactgatgtatgggagcttgatgtcccagatgatgttgaatttgcagatgcatttatctatattggatacaactgggataagaccggtgcaaacatccctgtcttgaacttaacattcaatggagaaactgttgctcctatggaaagctatagggatcaatccaacttaggcagctccggcaaatacggatacggattaatcgtttatgatgtgtctgggcttgttgaagctggagaaaatacattattaatagaaaaagagtttaacaagactgcagtttacccaagcactcttgtagcattctataaccaagaggtccctgatgtcattacaacagtttatatgtatcatggtgctgacttgttatataacagctacaacctattaggaagggacgttgaaagtaacagcgttttagaagttgaattggttgatgaccttgcatctgcagaccttttagtatttgctgcaagcgctcaagcaggtgaaggtaacttgattgtaaataatgaaacatatgagaatgtctggtctggaagcacaaacagcactaatgtatttggtgtcgatatattggacagtctcaagcaatccaatgaagtctcctttgtttcaactggaggaactatcctagcacttcaacaattcattgtcttcgaatacgatgtcacttctgctaaagctaaagtaagcacagaatattcaaattccgcatatgccggaaccgacaatgtattaaaacttgatttaaccaataacggtacagtagacactgtctatcatattgacttatatgctgatggcgacttggtagacagcatagaagctgaaatcgattgcggtgaaaacagtacactatacttgattgatgatacaatcaggccagtgactgaaaacactataaacggaaacaacaacgctaaggtaaactacacagttgtaatcagtgataatgcaaccgatgagatattggatgaaattacaataactcctgttcttgtctataacggttacttaggtaaggactacgcttatcctaatgacacaattcaattcttcgacgctatcacagtaaacggtggagtaatcattgacactttaaatgataccacctatcttggaactaaaacaaccaaccgtaccgatgtatggactgttgatgttccaaatgatgcagaattcgttgaggcctttgtctatcttgcatacaactgggataagaccaatggcacctgccctgtcttcaataccacattcaatggtgaaactgtcactcctatagctcattacagagaccaatcaaaccttggaaccagctctgcaaaatacggctatggattgcttgtctatgatgtttcagagtacatcgctgcaggcgaaaatagctttgagcttctaaaggattatgatgtcactgctgtctatccaagcactcttgtagcattctatgatgttgaagactcacctatattgacaactgcttacatgttcaatggcgctgacttattatacaatgcatataatttcttaggaagacctgttgaaagtaacagcgttttatatattgattcagttgacgatatcgatgaagcaacacttgtagtatttgctgccagcggtcaagctggagaaggtaacttgattgtaaacggtgatgaatacaccaatgtttgggaaggaacaagcaatagtgcagctgcttatatgatcaatctaactgattccatagctgaatccaataatgtgtccttcgtttccactggaggaactatcctagcccttcaacaatttgtcatagtttcagaatacgccccatacgctaaggctgacattatctctgaatataagggcgttgcatttgcaggcacaaacaatgtcttaaaggtcaatgtaacaaacgttgctgaggaagatgctgtcttcaatgtaaccctttatgctgacggcgttgaaataggcagtcaattgattgaagtaggcgcttatggcagtgccattgcaatgtttaccgatgagaagatcagaccggttacagaaaacacagtcaaaggggcagacaatgaaaaagtcaattacactgcagtcgtaagagatgttgacgaccttgttgaggatgctgaagctacaatcactccggatatcctctataacggtaacttaggcaaggacttagcatatcctgctgaggagatcacattctttgactccatcacagtaaacggtggcatttacattgaaatccaaaatgattcaagctaccttgcatctggagctaccaacagaactgacatatggaacattgaagcacctgaagacgctgatttcgtagctggatttgtatatgtggcttacaactgggataagacctctgcaggaatccctgcacttaacatcacattcaatggtgtatctgtcgctcctgttgcacattacagagaccaatccaatatgggaacctatggcaaatatggatacggacttttagtatatgatgtaagcgaccttttagaagcaggggataatgtattcaccttaacaaaagatgctaacatgactgccatctatccaagtgttttggttgcaggctacgaccaagaagtatctgacagcatgaaaaccatttacatgttcaacggcgcagacttattgtccaatgcaaacaacttcttaggaagagttgttgcatctaacagtgttttagacattgaattgcctgatgatgtaattgattgtgcacttggaatatttgcagcaagctctcaaaaaggcgaaggcaatctaatagtaaacggagaaagctttgaagatgtttggaacggatcttccaactcagtccaagcttgcgtatttaacttgacagatgatatcgaagaatccaacacagtatcatttgttgcaaccggaagcactatactagcccttcagcaattcatctttgtggaatacgagcttgtttctgttgacgctaaattaggctctgaatacaataacgttgcatttgctggaaccgacaatgtcttagaatttaacattaccaatgacggaacaattcctaccgcatacaccattgagttctatatcgatggcgaattggcagacactttagaacttgaacttgcaaacggtgaaagcgacagcctataccttgtggacccaaccatcagaccagttgatgaaaccactgtaaacggcgcagacaatgctaaagtcaactacactgttgtaatcacagacaattcaactggagatgtcttagatataatcactatcactccttctgtactctacaacggtaacttaggcaaagacttggcatatcctgctggagaaatcactttcttcgatgtaattacagtaaatggagatatcattgtcataggaatgaatgattccacttatcttggctctaagacaacaggacgtactgacgtatgggacttaaccactaatgaagatattatctttgcagccggatacctttatgttgcatacaactgggataagacccctgctggaatgcctgtatggaacaccacattcaatggcgtaactgtcactcctgttgcacattacagagaccaatccaatatgggaacctacggcaaatatggctacggacttatcgtttacgatgtatctgaccttattgtagctggtgaaaacacattcaccttagaaaaagaaaatggaaccactgcagtatatccaagtacccttgtagcattctataatatgcctgaatccagcacttatgtaactacatacctatacaatggcgcagacttattatccaatgcaaacaacttcttaggaagacttgttgcatctaacagcacattggatatcgattcatttgacaatatagtcggcgctgaccttttagtatttgcagctagcgctcaagctggagaaggtagccttgtcataaatggcgatcttgtagctgacatctggaatggcagcagcaacagcgtagatgcatatgctattgacttaggcaaaaaccctaaggcatctaatgaggtatcatttgttgcaaccggatctaccattctagcattgcaacagttcattgttgttgaatacaatgttccttcagctgaggcaagcctcgttagcgaatattctaatgttgcattcgctggaaccaacaatgtattgcaattcaacttaacaaacaacggcgctcttaacacttcttacattgtcgacttctatattgacggcaagaaggtaaacagcactcaaattgcactcaactctggcgaaagctttggccaatactttatcgatgatacaatcaggccagttgacgcaagcactgtaaacggcgcagccaatgctaaggtaaactacacagtcttagtcagcgataaggataccggacttatattggatgaagtgaccctcactccttctgtattatataacggtaacttaggcaaggacttagcacatcctccagaagaaatcgtcctatttgacacaatcactgtaaacggtgatgtgattatagatacattagatgattctacctatcttggagctaagacaaccggacgtactgatgaatggaacttaaccgttccttcagatgctgatttcgaagtggcatacctttatgttgcatacaactgggataagactgcaagtggaatgcctgaatggaacaccaccttcaatggtgtaaatgtcactcctgttgctcattacagagaccaatccaatatgggaacctatggcaaatatggatacggactttacatttatgatgtatcagacctcattaaggcaggtctaaacacattcaccttaggaaaagaaaacggaactacagcggtatatccaagtactcttgtagcattatataatgttaacgagtcaaatgtacttactaccgtttccttattcaacggtgcagacttattatccaatgcaaacaacttcttaaacagaactgttgcaagcaataatgtcttagaattagatttcactgtatttgatgaaatcctatccagccaactctatgtatttgctgcaagcgctcaagctggagaaggaaaccttattgtaaacaatgaaacattcactaatgtctggaatggaacttctaatagcgtagatgcttatattgttgatttaggaaatgaccctagcttatccaatgatgtatcatttgtagctaccggttctacaatccttgcattagagcaatttgtcgttgtaaaatccaaatatcaaaccagctctgacttgcaaaaactcatcgatgctgctgaacctggatccaccttggatttaggtgacaacgtattccaagatgttgctaatgtagtaatcgataagaacttaaccatcaaaggcggttccataatgggcaaagctggagagaccatctttgtaattccagcaaaatccgctaacggtcctgatgaggtaaacataactggcgttgactttattgtggaagatgcaaatgtaattgttcaagcaactgctgacaatggaagcagcccaacttcaatcgacactccaaacatcagaatcagtgacaacttcattgacatgatagacggaagcgttgtacctgaatcagtaactgtattgaaacttgacagcgaaagaggagtccttgcacctaccggtgaactcaaggtcactgacaacgcaattgcagctggaatcaaaccattcgagtttgatgtaactggcgtatccaacggcagcgacaccaatattccagaaggcggtaacattcctgctaaacaggcttctgtaatccactatcaagatatggaaacaactgctgttaactctaagattgaaggaagagtgggcaaatacttcgaagtcaacttgacagacacaaatggaaacccattagcaaataaatttgtccaaataggtttcaacggtgtagtatataacagaacaacaaacgaaaccggcggagtcaaactccaaatcaacttaggatacaaaggaacttacacctttgctatctcctaccttggagatgactactacaacggtagctttgttgtatctaagatcaaggtaagcacacaaaacaccaagcttactactgctgcaaaaacctataaggcaagcgctaagacaaaaacattaactgcaacactcaagtcaagcgtgtacaacaaaccaatcaacggtaagaaagtaactttcacagtaaacggcaaatcctactcagcaactacaaacgctaaaggtgtagcaactgttaaagtaagcctttcaaccaagaaaacctacagtttcacagccaaattcgctggagacgatatgtacaccaaatcaagtgttacaggtaaggtaactataaaatag

SEQ ID NO: 2048 - DNA, 351 bp, Methanobrevibacter ruminantium
  source 1..351: mol_type = genomic DNA
atggctcgtcgtcgttgcaatagacgttttgaaagtgaggaagaagatcctatggcaggaaccgccaaccttgtagatgcaatgttggttattgctgtaggcctgcttgttttccttgtgcttgcatggaacatgcaaagcgtgctctttaatgagcagctcactcaagaggaaaagcagcaggtcatggatgctatgaatcaggagatgactgaggttcaagagggtcaaatcttgaatgagactccagatacaagcaatgcaacaggtcaaggttatactgagatgggtaaggtttataaggatccgtctacgggtaaattgattatggttcagaataattctgcttaa

SEQ ID NO: 2049 - DNA, 747 bp, Methanobrevibacter ruminantium
  source 1..747: mol_type = genomic DNA
atgacattagctattggaaatacattgatttttgcagatgaagctatttatcagggagccaacaatggactattcgccatcttctcaaatacaaacggaactggctttccatttttagatagttcactaactgctataacacaagcattacagatacctgtaatcattcttttactcatatttttagtattcgctgtagtaactttagggaagcttctatcagaatacctttctcgtaagaaagtacctattaaattaatcaaagaaatgatttattcaatctatgatgcacagtctgctgaggaaattaaaaatatagtaaatagttcagatattcaaagttcacaaaagacaattctttgtgaacttgctgacagtgaacatcttggtaagaaatcaagggagacattagctcgtagattgattgataatgaagaggataagattactcaaaatcttcaaaaaacagatattgttacaaggataggtcctacacttggattgatgggaacacttatcccaatgggtccaggtcttgcagcattgggtacaggggatgtgacaacccttgcaagcgcaatcaccattgcattcaatacaactgttatcggtattggagcaggtgctgccgcttactttgcatcaaagattagaagacgatggttcggtgaatatcttgctaacttggatgctttgatggatgcaatattggacaatatcaataaaagggatgataggctagaataa

SEQ ID NO: 2050 - DNA, 4113 bp, Methanobrevibacter ruminantium
  source 1..4113: mol_type = genomic DNA
atgaattctaataagacttatgcagtattaggattattgctcttattaatcttatccataggcgctattagtgcagaggattctatagatgatatgagtttaacagacattaattctgcagataattctaatattaatcaaataaatgcaattgataattcaattgatacaagtacagattcttcaattgatacagacaattcaattgaaacaaatctggatagttcaattgaagataaaaactctacagatgcaaagaacacactttcctcaaacagtcttgcatctacatataagataactgaaaaagactacttaacttactttgataaagatggaaacatattatcaggcaaattaaaaagtggagatactatagatctctccggaacctttagtaaaaaggcttttgtcataaacattccacttaccataacaagtagcgatggcactgcaaagctcttgaactccaacataaaccttgtaagtggcgctcaaggttctatggtgtccaatttaaatatgaatacaagcgttgaaaagactcctgcattaagcgctgtcaatgttacaaaggtctcctttgtaaataacacagtactttcaactgcaacaggctcttatgccttattgctcaatactgtaaacaattcagatgttctatttaacacattccaaaccacatgctttgtggagggctggggacatccttctgctttggtattaagcggttcaaactataacaatatctcatcaaacaatgttattgtaaacgattcaaatggaatctacttgaccggataccttggcggaggaagcatgggagattccacccaaggatccaatacctacaattatatatacaacaacacagttcacagcgtaagaggagttgaatgggcaaaggataaggatggaaacaagcctctcccatcttcattctgttatggtatccaagttatgggtgcatataacgaaatcattgaaaacactgtatataatatgtacagaggcataagcgctacccaaactggaaataaggtagtcaacaataatctatcaaatatccatggaacctggtactctggaggtacaaatgacgatggagcagactatactatatatgtaactaccaactctattgtaaaagacaattcaatctctgattccaaaattggagactccactgcagcaatccatgcggcagcaaacactaatgtaactaataatgtcctctccaatatagaaggaaccggcgtcttgattgaaggaaacaatgtagtctgcaataagaatagcttattaggcttaacaaatgacggaatcatagctaaaggaaatgtaagcaacattgatatttcaggcaatataataaatgcctcagaaaccgctgtttcccttgtaaaaacctcaagatctcttgctcctcatgacattacagtaagtgaaaacacaatattcactacaaaggaaaacccaatcagctatgaagaggcttactctaccaacataactgtagaaaacaacagaataatcaaggaagcttccaatggaacagatcctagcacagaaggtaacggaacctactacattatagattccaacttctataattatttcgacaacacaggataccttaagagcacaatcaaggaaaacgacatcttaatcttcgttggcccaatagaaagcaaggacaaaatctacataaacaataaggtaaacatcacaggtattgatgcagtcttcaaggacacaaccataattgttttagacgacggcgttgtcattgatggaatcacaatcaacaatccaaatgaggctaaaaacgaccgtgaatggggtattcaagtaaatggagctaaggatgtaacaatcaaaaactgtaacataactatctatgatgcattctcagcatatgcagtatatctcattgattcatctgattgtaagctaataaacaataatcttgaagctaaaggagattatttaacttctgcagttttattatacaatacaaacaacacagtattaagcggaaattcattaaagacaataggaactggtcaaaattacactttcctaaatgaatcctgcttggatggttgtcttgatggatgcctcgatggctgtttagacggttgccttgacggatgtctcgatggttgcttggatggttgtcttgacggctgtgcagacggatgcgctgatggctgtttagatggagcacaaggagtaaaccacataatctctggaatattcagaacctatggcttattcatggtatactcatcaaacaacaatgtaacagacaacaaagttgatgtaagctctgcattagaaaaaggctatgctacttatatagaatcaactaatgctattggaggaatcttcatccaccacaatagcaataacaacatcattaaatctaataatataacattaaatggtaatgatccattcatgtatggcgctggagtggttggaggaaattcaaaccacactgattatgtttcctcaaacaaccaattcgaatccaacgccatcaatgtaaaatccccttactatgctatcggcatattgcttggatacaactcttcaaagagcactttaaaatccaataagatttccctaagcgcaaacaattactcttacaatatagcttcatacaagagcagtgaaaacactgttgatggaactgtaactgtcctaaaagacactatagttacctccacaaacataactgcacagtcaaacagtcctattgtgctaaacctcactgtattggatgaagacaataagacagtaactgtaggaagccttttggcttatgtaaacaacactcttgtaaattcaacatctatcaagggccaaagcacctcacttggaattggcgcttatcctaaaggaacctacgaccttgtagttctttatgtaaatggaggaatctacagagtaggagctggagcatgccaattcaatgtaagcgatgtaattaatactggaaacggcacaaaagatattcaaaacgctttagataatgctaaggatggtgcaactgttgatttaggaaaccaagaatataacaatgttgtaaatgtgcaaatcaagaagaatgtcacaataaccggaggaaagatctctggagacggaagcaatcctatatttgtcatcactcctaaatccaaaggaggaccaaataatgtaagcataactggagtcgaattcaatcttggcaatggaaacattgttgcccttgcaactgctgataatggaacaagcccattatccatagacactgcacaaatttcaatcaagaacaatgtcttcaacgctgttgatggagctgttccagaatccatcaaggtccttgagcttgacagcgaaagaggagtcctatctccaacaaacgacatttccgtcaagagcaataccttatcaagcggaatcaatccatttgagtttaaagtaacaagcgtagccaacaacaattcaatcaatgttccatcaggtggaaacctggctcaaaagcaagttagccaaatccaataccaagatatggaaaccatggctgtaaacgctaagattgagggaagagtgggcaaatactttgtagtcaacttaactgatgatgcaggcaagcctttagcagataagttcatacaaatcggattcaacggtgctgtatatgacagaacaaccgatgaaaagggccaagccaaattgcagatcaaccttggatacaagggaacctacacctttgcagtttgcttccttggtgatgataactacaacggaagctttgttgttgcaaaaatcaaggtaaacactcaaaagactaagcttacaactgcttcaaagacctataaggcaagcgctaagacaaaatccatttccgcaacacttaaggatgcaagtggcaatgcgataagcggcaagaagcttactttctcagtaaacggtaagtcctactcagcaactacaaacgctaagggagtagccaccgtcaaggtaagcctctcaagcaagggaacttacagtttcactgcaaagtatgccggagatgatatgtacgcatcttccacagcaagcggaaagataactataaaataa

SEQ ID NO: 2051 - DNA, 3495 bp, Methanobrevibacter ruminantium
  source 1..3495: mol_type = genomic DNA
atgataaataaaagaataattagtcttagtctgctgattatattggtctttctcattattggattaagtgcagtcagtgctgaagattcttcaaaagctgctgatttggacttgaattctagttcagtttctaatattgatttaagttctaattctgttgctattgaatctaattccaattctattgctagtgaatcaagttctaatattgtcttggataataaatcttcagacactacagatattcaaacagattctgattctagttcagatgataatctaaatcacgattctaatagtaaaatcaaatcagacaattctaaaaaggttcatactataacagaatctaattattcactctattttgattctaacggctatctaaacaattcattagtgtcctctaatgatactattaatttgtctggtaatttttcttcaaagtattttcgcttttcaatacctttgaccattacaagcttagaaaacgatgcattcctaagaaactctccaatcataatcactggagtttccaacgaaaactatgtatatgatgcaattgtctctaacttgaccattgaatcagaccttgctaacatatctgccgtttgggtgattggttcaagcaatataaaggtcttaaacaataatatattcacaacaggtcataacggatatcctatcgctttggatagctttgtatataactgcattcttgcaaacaatacaatcaagacaatagttcctgtcagcgaagcgatgagctcaaaggatatcgatgaggacaatcaaacaaacaattccgacaatagcagttggcagcattcaggaattagcctaagggatgcccattacaatactgtcgttgacaatgacataactgttgaaaactcctatggagtctatctctgttatggggcttccatatcaaactataatgtcattgcaaacaatacaataagggcaacctctgaaactccttcattttggtgttatggtgtttatatcactggaaactacaatctgatatatggaaacgacttctatcacctttatcagggagtccattcaagctatccatataactctatagtttccaataatttctatgacattgacggattggatgacaactatggtgccggcggtgactttggcatatatggaggaaacaacacacttatagcaaacaactccatctataatgccaaattgtataatgcaggaattcttgtaggtacaaattctgaagtttatggaaactacattcaaataaacagctccggagagggaatcagaataggtgataaggaaggaggatcctattcaaaggtctataataatactgtagacttccttgacggtaaaggcatatgcctatacggcgagccaaatagcactcttgtttatgataacattctcaattccatatcttcaattgattcactagacttatcagctgaatctaaaggttctgggctaggaattggtatctattcacattaccaatcaagagccaaaagaccttataacatttctacctgcaacaatacaatatatacttcaaatgactatgcaatagacatttcacagtcttccactaaggcctatacctgctatggaaacctggtctttggaaagggcatcatctatcctatggaagttgtatatgttccagattatggggaaggaaatgtatatgaagtgagcgaagataatttttacacttacttcgactcttccaataagcttagcgataaggtaaaggatggagacagtctcatatttgttggagagttctctcctaagggcaagataaccttaaataaggaagttaatctttttggatacggtgctctcctaaagaataccactgtattcattaacgctccaaactgcagggttcacaatttcacaatcgtcaacaacggcattgatgaatataacctttggggagtctatgtctttgaggcagacaatgcaagcattgtaggaaacaatataagcattttggataagaacacatcctatggaatctatctatgcgattcctatgacaataacgtttcagacaataccatttcctgtcaaggggacaatctggtcttcagccttcttacatatgaggcttatgacacattatttgaaaacaataagatattggctattggaacagatgagctctacccttattatgaaaccatctgtatcgatggcgttcacagtatttcagagctatcaaagacctatggggttattctggattcatcctctagaaaccagttcattcacaatgacattgaggtgacatccacccttgaaggattccatgttccttataatccttcagttaacattctcataggcttatacatctattatgcctcaaactacaataacataagcgaaaacaatgtttatgttcacggacatgatcctttcctttatggagtcggttcatcaggagacgacacaagtaaatcagtgacctatgcttgcgaaaacatattctcacacaataatatcacagttgaaggtgattattttgttatgggaatgattctaaggcataattcaaaggacacaatcgttgattccaatcatttcagattgaattccaataattatacctatggaataacccttgaaatatctgaaggggctaaggtcacaaataatgtcttaaacagcactggaaatgcaggaatctatgcaatggagctttatgcatcaaataataacgatattaaaagcaatgagatttatgcatctgcaagctacagcagcgttgcattatatgcctcaagcaataataatgtgactcataatgtaatcaaaacctatggaaataaggttcaggaacctgctcaaggacctgagcacccagattctgtagatttattcaatacaggaatctcactccagaaattttcaagcggcaacaacatttcagataatattatagaaaccgatggagatgctgcagttgacttcgatgagacttcaacaggtaatacagttggaaacaatgagctttcatctacaaaaggcgggggaaatgctgctgtaaatgacaggacaggaaagaacatggtctatggaaatacaggatcaagatatgttccaaattccaatagttcctcaaactcaaacaatcagaattcaggagagaggaatacagtcccaactaatggcagctcaaaccgatataatgatggcggagaggaatcaggctcaagcgccttcggtcaagttgatttaggccttcttgccactgcaatgtcttcagtaggtgaaggcactggagatgtcggtgaaactggtgacggcgaatctgacttgattgtaagtgagttagaagaggtcgcttccaaatcaatggcaggtggattatctgtacctgtagcagctttattattggttttaatgttctgtttcagcttcttgaatgctaaggacgaggatgatgaaaacgatgatgagaatgaggaataa

SEQ ID NO: 2052 - DNA, 5055 bp, Methanobrevibacter ruminantium
  source 1..5055: mol_type = genomic DNA
atggattttaaaaaagcaatccctctatttgctttattgctattgattttatttattatcggctcttcaagcgcagcttcaagtgatcttagttcaagtcctgccgataatgaaaacttggaaattgatagttttgactcaaatgaggatttaacagttaatacgaatacaaactatattgaaagcggaaataatttggaaattgattataaatctaattctaaagaatctgttaatgcaacaaatgatataaaagaagaaactgttgattacaatgaagatatttcagttgaaaagaataatctaaagtcttctaaattgagttctgtttataaaataacagaatctaactactctaactactttaataaaagtggaaacatcctatctaatgtaaaccctggagatacattagatttttcaggttcattcaacaataaggactttaaaatagatattccattgactgttacaagcagtgacggtgctcaattcattgattgcagcttcaagttcaataagggctctgacggctctaacatatccaatttaaacattaactcttctcgcttacaaagtccgcttatctatttggattctgtcagcaatatgaatgtattcaacaacaatctattttcctgcgcttcaaaatcctatgctctttgctttagcaatgtaagctattcctctgcatatcacaacacccttcagactacagcatttgttgtaggatggggacatccttctgcctttgtcttggctggagcaaataacttaaatatctcctcaaacaatgtgatagtcaacgattccaacggaatctatttcactacatatgttggagacacaattagcgcgaacttaatcaatgaaaataattatatctttaacaataccgttcacagtgtccgaggagttgaatgggcagttgatgaaaatggaaccactcctctcccatcctctttctgctatgcgatacaagtgatgggaagcggtaataaattattgaacaatacggtctacaatgcgtataggggcataagtgcttccggatcaaatagtgtcgttgccggaaatgtggtttatgatattaagggaaattattatagcggaaatacaaaggatgacggcggagactatggaataaatgtaggaccaaattccatagttgaaaacaatacaatatataattcccattttaataaaaactctggagtggccatttctgtaggttcaaatacaactgtaaggtataataacataacaaacatcaatggtacaggggctgatttgtctaaaaacttcatagaatttagccataatcgcattgataatgtttcagataatggaataagagttaaaggccaatatggtaatactaatatttcagataacttcattaattcaacagacagttcaatcactttattgagaagctcaaaggacaaatatccgtccagaatcaatatagaaaataatgatttctatacagatgtctctcctatctattatcttgaagggtatattggcaagctgacagcaaaggacaatactctcaatggttcttccatatcagatattagtattgacgttcctagctctagcgaaactaaggtttctataaattcaactaaaatagatttcaatgaatctgttctaattatgccaactgtcagcgcctatggtctttcacttgaaggccttgtcgatataatagtcaatagccaaaagattgcaactgttcctataggatctaattacactttcactccaactgaagcaggaagttttagcataaacgctaatttcacaggtaatgaagagtataagccatctgaatctgctgttttgattctgactgtgactcctaaggaaactaccacttccataataataagcccaagcactgttgagcttaatgatactgttgtcattagtccttttgttcgctacaatggaactcttttagaaggttttgttgatattcttttagatggtgaaaagttagatactgtagagataggctctgattatagttatgttcctaatagttcaggcagtttctacatcagcgctagcttttctggcggaaatggttatggtgcatctgtttctgatatgctcatccttactgtaaatgagtccagctcaattgaggatccggatgatccaactaatcttacagtctcttcaatccttatcagccctaacactgttgaggttaatgatacagttcttataagtccttttgttcgctgcaatggaactcttttagagggtcttgttgatattcttattgatggtgagaagttagattctgtagttattggctctgattatgcttatgttccttctactgccggcacttttaacattagcgcaagttatgctggtggaaatggatatgagccatctgtttctgatattgttgttcttactgtaaatgaaaagcaaattattgataatggtacagataataatggtacagacaataacggtactgatacaaacggaacaggcactaatggaactgatactaatggtacagacaataatggtactgatacaaacggaacagatactaacggcactgaaaataatggaacagatacagatcaaattaaaataatcataaatgatgacaattactctgattactttgataacggctatccaattgatttagatgttgatggcaattatactctaattatcgactcattaaacaacaaggacataataattccatcaggatttaatataaacatcataggaaaggaaggctctggaacaataaacaacggtacaattcaattaggtgacggcacagatgaggtcggtgatgtaaagatatccaatctgacctttaataattataataaggatgctatagtcataaacgaaattgcttatgatctaactgttgaaaacaataagatcataataaatacagaagccagtcctggaaacctatactttagcgtttatggaatcaatgcaaagggctatgttgattcattggctgtaagagacaacgatattttcctaaacggttctgctccttacttatatggtgttagtttgggaggctacggtgccatagcaaaccctcagaatatattcgttcaaaacaatacaataaatatcaacagcactgcaagtatgggcatggctgagggcatttacttagacaaccctataaatgcagctgttttagacaataaaataaatatagaatcaatcaatgatgtatatgtttacggcatgcagattgcagactctgcattcagcgccataggggaaggaaagaccggtgtcaaatccccatatgacataatgattgaatcaaatgacttgaatcttaaaagcaaatatatggtttatggaataaccattcttgattatggctgtgacggcagcttgaatgaattaggtcagccaatgaccaatatgatggacttggacactacaatccaaaacaacaatctcgttgccgattctgaaaaggcagttatgggaatcgttggaaagacctacaatatgtctgttttatgtaacaatctgtctgtaattggaggatccattgaaggagttgcatcccatgatgcattaggagttgataattatgctcttggagtccaatactctggaaaggattatactgttcttgtaaaggacaatacagttagcacaaatgttttagctgagtatttaaacaataaagactatgaagcctatgtttcatttgttaacaatacaatatatcatattgatggcccatctagtggaaatgatactccagagaatggcactggtgataatggcactaatactaatggaacagatattaacggtacagacactaacggaactgacaacaatggcactaataatggtactaatggcactaatggtacagataccaacaatacagacaatataactaaaagaacagttaaagatctacaggaacttatagataatgcaactagtggttctgtagttgatttaggcaactttgaatatcttgacgtatctaacattgatataagcaaggatatttctattgtaggaaacaatacagtcatcagaactgcaggtgacggcaagccagtcttcaatattaaggaaggactttcctcagtttcaataagcggaatagaattcatggcaaataatggagatgtacttatcagagctaaagcagtcaattcaactagcagattggctatagaaacccctgaaattaatataataaataatactgtaatcaagtcagatgatggtgttgtagccgaatcagtcactgttcttgaattggattcttctagatgcatacttgctccaacaaatgatatcaaggtctcaaacaacacattggaaattggaatgaatccatttaactttgttgtggaaagcgtcattaacgctgctgatgttaatgttccagtagggggagaccttcaaagcaaagtcaaatccgtaattcattatgaggatatggataccgttgccgttgcaaaggctgatggaagggtaggaaaatactttgaggttaatctgactgacagtgatggaaatccattatctggcaaattcgtacagataggattcaacggtgcagtctataatagaaccacaaacgaaacaggtggtgtaagattgcagataaaccttggatacaagggaacctatacatttgcaataagctatcttggggatgagaattacaatggaagctttgtcgttgcaaaaatcaaggtaagcacacagaatacaaagatcactagctcatcaaagacttataaggcaagcgcaaagaccaagactcttactgcaacacttaagtcctcagttaacggcaatcttataagcggaaagaagctgactttcacagtgaatggcaaatcatacacagcaactaccaattcaaagggagtcgctagcgtaaaggtcagcctttcaagcaagaaaacttatagcttcactgtaaaatatgcaggagatgatacatactcatcttccagtgcaagcggtaaacttactataaaataa

SEQ ID NO: 2053 - DNA, 8907 bp, Methanobrevibacter ruminantium
  source 1..8907: mol_type = genomic DNA
atgaagcttaaaaagttttcagtcattttagcggtattgcttgtagcaatacttgctattggggctgtaagtgcagaatcagtctctgatactgatgtagctgctgtagctgctgtagatgatacagcaggcacagtatctgtagacgattctatagatgatgtttccgtagacactacggataatgatgttaaaaacagtctgagtgctgttgcccttgaagatggggagagtgtgagctatgaaatcaacgacacttcttattccacatacttcaaagacgatggtactgcaactgatgaattaagtgaaatgggtggctataccttaaatataggaacccttactaataaagacattcagataatatctggttctgatattaatattactgcaaaggatggtgaaggattcattaacaatggtaccatcattcttggtggtgatgaattccctggtagcataattgtatctggattgacttttaccaataccaataaagacgctattcaagttttagattatactactgatgtcagtatctatgataacaatatgaatattataggaattagctctttatcatctgatcctaatttcagtgtttatggtgtaagtgccaatgggtttatttcaggattatatattgaaaataacaccatgtctgttgaaggagatgcgctttcatatggtattgaagtaggagcatattctgatggggcttacgctctttcaaaccctcaagatattttaatatctggcaatactattgatgtatctacttccggagcaatggctgagcctatgtatttatctgatgtttgggatgtaacagttgtaaataactttgttacagcagaatcagttaatgctccagcttatggtattcaagtagccgattctgcaatgtgggcaagttatatggatccaaattatgatggtgatttatcttctcctaataatgtactcatcgatggcaatacatttattttaaacagtgactttatgatttatggtatcactacaataaattatggttgggatggtatagagatggaatcttatgctttgcctttaaacataaccgtttctaacaataatgtttatgccaactctaaaaaaggtgttatgggcattgcaggtcaaatatataaccttactgtaatagataacactgttattgctataggaggttctgctgaaggtttgtatactggtgaccttttaggcaacggtacttatgcattatatattgattatgatggcaattatgctgaagatacttactatgttgttgttaaagacaatgatgttttcacaaatgtcactaaggaatatgcattcaataatgattatgaaagagtaattttcgaaaacaatgaagacttaaagactttcgtaattgatgatgaaacttattccatcttcttcaacgatgatggaaccagtgatgtattagaggacatggaagattacactttaatgatcggtcctttaaacaacaaagacattgtactcgattcaggttctgaaattgtcattcttggtcttgatgaaggttacatcaataatggtaccattgtccttgatggtgtttcagatgtctatgtttctgacttggtctttgtaaatgtcaataaggatgcattttatattggagatgaatcaaatgaaattgtaattgtagacaatgctattgttcttgtaggtaaggctgccgaatcaactaatccttatttcagtctttacgcaatatctgctaatggatatgtcactggattaaatattacagacaattctatctatattacaggggatgcaccttattcctatggtatttctttaagtgcatatgcagctgagtttaaccctgaagatattacaatttataataacactattgaaatgagtctttcagaaggatcaagtatggctgaggctatttacttagattgtccttcagatgcaactattgaagaaaacaatattaccatagaaactgtaggaaatacttttgcttatggtattcaagttgcagacacacttcctgccgcatatgaatatgctagttatagaggtgaattaacctcacctgaattagtgactatcaaaggcaataccttaaacataagcagcgaatatatgatttatggtattaccgtacttagtgaaggtgctttagtaaacggatctggagatttagcactttgtcaatttgagttattcttaaatgtcagtgaaaatacaatctatgctgattccaccaaaggtgttatcggccttgcaggtaaggtttacaatattaccatgaataataatgatttatatgtcactggcggagatgcttcagatgtattttcctatgatgacttaggtgtaggaacctatgctgtcggcattaaatataatggcgattcagaagacggtaactactatgccgatgtgtttgagaacaatatctttacaaatgtatctgctgaatatataaacgatgaaactgtattagacgaatatgtattctttaataatttcatcccattagacttaggaattgtcttagaagctgataaagacgctcttgaaataggagacctaatcaattacacaatcactgtagtaaacaacggtccaaatgctgcttctgatgtatatgtttcctttgagctcagtgatattcttttacttgtaactgctcctgaagaatatgatgctgaatttgaactcttaaatgtttcagatttagctgtcggtcaagaaaaagtatacaatattgtagctcaagtaatcgatggaggatatctcttatctacagcttatgtggattgttatgaagatgatacctatatggataacaatactgcaagtcttgatatgattgcagttcctatagttattgatgatagcaattatgctaattacttcaatgaaaacggatacttaaaagatgacgtaattgctactggcacagttgtattgtttggtaatttaaccaataaagacttgtttattaatgctcctttacttatttctgattgtaaagacactaaattagtaaacactaccattgctcttgttgaaggtgcagacggtacattgatttcaggtttagtctttgattacactgctaaagacagcggatttgctatcatttctgtaaatgatggtgttagcgatgttttaatcagatctaacaatattactgttacagatattcctgattatgtcactgccgttgctattggagtttacggagcagtaaacggctctgaagacatcactattgaggataatttcattaacatgactggtggcaatgcttacacctatggtattaacgtacaaaactatgatcaaggttgggttccaggcgaaggtgcttccggtgttgagattctagagaataccatcatcttaagtggaactggaatggaagaagcgattttcttatctggtcttgaagatgtatatgtatataaaaacacaattgtttccgcttctttcggcgaaaatactggttgtgatgcttatggaattgctgcagctaatgtaagcgaattaataattgaagaaaatcaaatgggtgtaggatcaaatcaaatggcatttggaatagctatcactactaaatctaatgatgttgatgtcttcaataacagcattgatgttgaaggtacaggtgctattggcgttggcgttcaagatagtactgatgtatccgttacattcaataccatttgtgcctatggtgatgacttcaccagcattcaaacttacgacagtttaggaactgcaaatgcagctatcctagatgagactggagaagcactcatagaaaacaataccatttatgaatatttccctataaccattagcgatgacaactatgctacttacttcgatgaaagcggcaagattaaaaatgattccggcattgcaggtggcgatttaatcttcttagacgaattaaccaataaggcattaactatagacattcctttaaccattaaaggtgttccactcaacgcattggtcaacactacaattacccttttagctgatgcaagcggttcaaccgtcaccaaattaaatatggaattcactggtgatgaaaacaccggatctgtaggaattatctatgtccttggtgcaagcgatgttgaaattactgataatgtcattattgtccctgcctttgtagataagactggcgctaaatacggttccagcttatacgctattgaagttgaaagcggtgcagacggatgcagttatatagacatttcagacaacgtaattgacattataggttctgcaagatacctttacggtattgacgtattccaaacctggggcagcgaaaacaaaaacagctatgtggctatttgtgataacttcataagtgttgtaggtgcttccagaatgtctgaaggaatttatgcaagtggtgttgacgaattagaaatcttaaacaacacaatcacttcagtaggtcaagctgctgcatacggtatcggaactgacaccttaacagactccattatctcagataacggaatggaagtaaatgcaggaacccaagcttatggaattaccaacacctacagcgatggtgtggaaatcacagcaaacgtcatcagctccactggtgaaggtgcaatcggtattggaacaaacagtgaagatgtaaccattgctaaaaaccaaatcacaatcaacggtaatgattacactacaatcacttcagcagacactttaggaactgataatgcagctatcctagatacaactggagaagcaacaattgaaaacaacacaatcactgaaaattgtccaataacaatcaatgacggcaactatgctacttacttcgatgaaaacggcagtcttaaaaataattccggcattgcagatggagatttaatcttcttcggtgaattaagcaataagaaattcaatatcgataattacttaatcattaaaggtgctaacaacaataaattagtaaacactacaatcgctcttactgctggcgcaagcggttccactttaagcagattaaatatggaattcactggcgacaacactacaggctctgtaggacttatctatgtcttaggcgcaagcgatattgaaatcagccaaaacacaattaccgtaattgactttgtagataaggcaggagctaaatatggttccagcttatacgctattgaagttgaaagcggtgaaaacggatgcagtttcatagacatttcaaacaacataattgacattacaggttctgcaagatacctttacggtattgacgtattccaaacctggcaagctcctatgagaaacagcgacattgcaattacaaataactttatcatgatcgaccctgcaagcagaatgtctgaaggaatttatgcaagcggaattgataatgcaattattgcaaacaacactattatctctgaaagcgatgctgctgcatacggaatcggaactgacagtttagccaattccacaattgctgacaatgtcgttagagcagctgcagcaactcaagcatacggaattaccaacacctatagcacaaatgtggatattgtaaacaacactgtcaatgctgaaggtataggtgctgtcggtataggattcatgggctctgaaggtgtaactgttgctgacaatcttattgcaatcactggtggagactacacttcaatcacttcatcagacagcttaggaactgcaaacgcagctatattggataaagacaacaaaggaactatctcctacaataatgtgactgaaaacattccagtaaccattaacgacggcaattatgacaattacttcaatgaagatggttacataagaaatgattcaggatttaatgatggcgatttagtcttctttgaaaaattaagcaataagaacatagttcttgatatgcctttaaccgttaaaggtgctcctggaaataaattggtcaacactacaatcactgtcttagatgatgcaagcggatctaccattacctgcttagatatggaattcactggtgatgagaacacaggttctgtaggaatcatctatgtccttggcgcaagtgatgttgaaatcagctacaacaatattaccgtacctaatttcgtagataagactggcgctaaatacggttccagcttatacgctattgaagttgaaagcggtcaagacggatgcagttatgtagacatttcaaacaacataattgacattacaggttctgcaagatacctttacggtattgacgtattccaaacctggcaagctcctaacaaaaacagttacatagctattgctgataatgaaatcagcattcaaagtgcttccagaatgtctgaaggaatctatgcaagcggaatagagtttgcagaaatttcaaacaacataattaattcagttggcgaagcagctgcatacggaatcggaactgatactttatccaattccataattgaagacaatgacattgttgttttagctggaactcaagcttatggtgttaccagcacttacagtgacactgtaaacctaacaggaaataacatttccgcagttggtgtcggcgctatcggagttggctcaaacagcgataatgtaaatatcgataaaaacgaaatcagcattttaggtcaagactacactgcaatcacttcagcagacagtttaggaactggaaatgcagctatcttagataagggaactaaaactacaattggaaacaacacaattgaagaagttgctcctataatcattgaagacaacagctatgacaaatacttcgatgaaaacggacaaattaaagaggatgctcctataggctctggagacgtagtctatatgggtgtattaaccggcaaagatatggtatttgacattcctgtagcaatcctacctgcagataacagcaaattaaccgattccaccattaaagttgtggaaggtgctgatggtactacaatcaatggtttggacattgaatatactggagatgaaaacactggctctaagaacattattaatgtagttggcgcaagcgatgtaaccatttccaacaacaacataatagttccagactttgttaacaaggcaggatccaaatatggttcctctgttgcagctattgcagttgaaagcggtgcagcaggcactgacaatactacaatcacaggcaacaacattgaagtaaacggttctgcaaactatctctatggcattgacgcattcactacatggggagctaataccactaactctaacctaaagattgaaaacaacaacgtttccgtaaatggcggagcccgcatggctgaagcagtctatgtaagtgactctaagaatgtaacaattgataataatgatgtggaagcttcatctgaagcagctgcttatggtattgctaccgatcaattgtcccatgctaaaatcactgacaacgatgttgcagtccttgctggaaccactggatacggaattaccgctacaacctctggagaagatgtcttaatcgaatccaatgatgttgaagttttaggtatgagcgctatcggtgtaggattatccaaccaagacgctgcaattgtcaaagacaatacaattgacattatcggtggagattacagttcagtcacttccgctgataatttaggaactgctaatgcagctatcttagataaagacaacaagaacactaaccttgtagtagaaaacaacaccatgaccgaaaacggcaaagcagtcaacactacccacagcggtaacagctctgcagagcttcaagcaatcattgatgcagctcctgctggctccactgttgacttagatggcgtactctatgccgatatcagcaatgttgtaatcgacaagaacttaaccattaccaacggtaccattgtaggtaaagctggagaagcaatctttgttattcctgctaaatccgaaaacggtcctgatgaagtaaacatcaatggcatggaattccttgtaaatgatgcaactgtaattgctaaggcaactgctgataatggaaccactcctacttccattgacactcctgcaatcagcatcaagaacaataccatagacatggcaaatgacgatgtcgttcctgagtctgtaaccgtattagaacttgacagcgaaagaggagttcttgctcctaccagcgaaattgcagtggaaggaaacacaattgctacaggtgtcgatccattcgaattcaaagttactggtgtcgctgacgatagcggaaacgtagttgttgaaaaaggcggaaacattccagctaaacaggcttctgtaatccactatcaagacatggaaacaactgctgttaactctaagattgaaggaagagtgggcaaatacttcgaagtcaacttaaccgatacaaacggcaatccattagcaaataaatttgtccaaataggtttcaacggtgtagtatataacagaacaacaaacgagaccggtggagtaaaacttcaaataaacctcggatacaaaggaacttacacctttgctatctcctaccttggagatgactactacaacggtagctttgttgtatctaagatcaaggtaagcacacaaaacaccaagcttactactgctgctaagacctataaggcaagtgctaagacaaaaacattaactgcaacactcaagtcaagcgtgtacaacaaaccaattaacggcaagaaagtaactttcacagtaaacggcaaatcctactcagcaactacaaacgctaaaggtgtagcaactgttaaagtaagcctttcaaccaagaagacatacagtttcacagctaaattcgctggagacgatatgtacaccaaatcaagtgttacaggtaaggtaactataaaatag

SEQ ID NO: 2054 - DNA, 534 bp, Methanobrevibacter ruminantium
  source 1..534: mol_type = genomic DNA
atggaaattattgaattgattgctatcattattctagtggcagccattgtatttttaatctattattattttcagactgtcaatggaggcagttttgatatagatgatttaaaggatcatctcaccatttctaaaagggaagcagccactgccaccgttaatctggatgatgatgaagcggaagaaaaagtttctgtaggtaaaaagattaaatatacctttaaggacattgataaatcttattctaacactacagatgcattttccaaaagattagatgcatttttagatgaaagaagtgaagaattaatcgaaaattggtctttagtaaccactgatgacttggaaagtttggaaaaacgttgcgttactgcttgtgacagcattgatgacttagagaaaagattcagtgaatacagcaatgtaaccaatgaaaaacttgaagaccttgataaacgtattaaggcacttgaagaagattctgaacttctagaagaggacgctgaaactatagaaaaagaagcagatgaataa

SEQ ID NO: 2055 - DNA, 405 bp, Methanobrevibacter ruminantium
  source 1..405: mol_type = genomic DNA
atggctaatgaaattataccaagtgaaattttcattcttattttagtggtcatattggcttttgtagtcattatcattgcattgcaatggaaaaaggtacgccaatctgacaatactttaaaattgatggaaaaagagattgagcttaaaaagattgcgatggttgaaaaggaccttgaaaataaacgtttgatggaaaatcctatttctttacctagcgaacagcaagagcagcttactcaaatcagagattccactgctaaagtcatgagcgatgtaggctatttgcatagtgaaatcaatgaacgtttagcacgtcttgaagctcaaaccgaacttaaaaaattagaaaaaatgcttgcagaaattgaagataaagagaaaaaactcaataagggcaaataa

SEQ ID NO: 2056 - DNA, 930 bp, Methanobrevibacter ruminantium
  source 1..930: mol_type = genomic DNA
atggtagatgaaattaaatcttatgaagaagctggaaaaattgtatccaaagtcagaagcgatgcatcaaaaatgatagaaaacggacttccaattcttgaccttgtagagtttgtagaaagcgaaatattaaagtcaggggcaggaatagcattcccatgcaatgtttcaataaatgaaataaccgctcactacacctctccagcaggagatacaaacaagatggtaaccggagaccttgtaaagctggacttgggagctgaagtcaatggctacattgcagactctgcagttacaatcatggttccaggagacaacttagaagagctctttgatgaggacactctagaaaagaatcaaagaatcatagatgcctcagcagcagggcttgaagctgcaataagcactgtaagggctggagttaaagtatgtgatgtgggaagagctgtagaagaggcaatagctgaatatggtctcaatccagttagaaaccttacagggcacagtcttgaacattggaatctccatgcaggaatttccgtgcctaactatgacaacaacgatccaaccatacttgaagaaggccaagcagttgcaatcgagccttttgcaacagatggtgaaggaatagttaatgactgtccttatgcttatatcttttcatttatgcaaagcaagcctttcaggatgaaaaacactcaaagaatgcttaatcatattgaaaagaactatagatacttgcctttcagtggacgctggcttacagaaagctttaatgagcgtagagtaaatacaggacttaagcaattaggagatgctatggcgatttatccttatgccgctcttaaagagagaactggagcttgggtgtcccaaaaggaacatactatgattgttgaaagtgatggttgtaaaataaccacactttaa

SEQ ID NO: 2057 - DNA, 4416 bp, Methanobrevibacter ruminantium
  source 1..4416: mol_type = genomic DNA
atgaaagtatataaaatgattttaatatccttaattttagttatcttaagcatttcttgtgtaagtgctaatgatttaactaatgatgctattcaaggcgatttaagtgatattgattattcttttactattgatgacgatttaagcaattctgataattcattagatgtttctagtgatttaaaagaaaacagttgtcttgatgaaatcgatttggataaggaatctaaccaaaatactacaaaaatattaagttcaaaccaattagactctaatttattggattcaaaccaattagaatctgatcaattgagttcaaaccaattagattctagtttactcaattcaaaccaattaaacttatcaaatacatacacagtctcccaatcaacttattcaaaatactttgataagaatggctatgtgaagacatctgtagtggctccatatgatactatagacctgtcaggcaatataatatctaaaaacttcatatttactattccatgccatataacaagctccaataatgcaaagctcacaaactgtatgattaagtttgaaaacatgactgctgacggccgttcaagtgtctcaaacctatacataagaaacagcgtcgaatggtgtcctggagtctttttagaaggatccacaaatgtggatgtctatggcaatgacatttattgtacaggggctaacggaaaccctgtccgtgtgatatactccaattattcaaacatatttggaaacaagcttgagacatactttacaggctatatgaacctttcatggaaacgtgcaggtatccttcttggagactctcactacaataacatcttttcaaacgatgtaaccataaaggactcaaatcctatctaccttacaacatacggatttgaaaagtccaatcataatacaatatacaataatactgtaagatcatctgcaatcagtgaagatagcggtttatcaaacccttcggcatgggcttatggaatacatctgatgggagattataacattgctctcaataatacgattcataatgtatataggggaatagattctgaaggaagcttcaatatccttgctggaaacataattttcaaccttacaggaggatatttcgaaggaaatgacggaacagaaggtggagactatggaattcacgcatcctatgacaatatcgttgcaaacaatacaatattcaacagcaagcttacaggctctgcaatctatctgatgcctaataatactgcctatggaaatattgtctataatataagcggccataacggccttgaattcaattattatgccgataactgtaaggtatacaataacatcattgacgtgcctgttgaaagcccgatttatgtattcggacgtatgaacaatctgctcattgaaaacaacattctaacaagtgtagattcatcaagcatccttgtaaagaagcaatccaattcaaaataccctaccgatgtcacaataagaaacaatcttatcatgggatattcaaagaccttcaatcaaagcccgattgactatagccaaatcaaaagcgatgcaaacattatctcattcaataattcaattgctgtctataatgacacatactttaattatttcgctgaaataggaaatgtaagggattattcagattggatagacttaaataacaccataaattattcagactcttataattacaatgcattggtctttgtaggaaacttttccagcataacagacaatataacaaaaacagattatataattcctttaaaggatattgtaaatagcagaatctcagatgtctatagaaatgttccttataatgagtataaatcaatgatggaaactttaaatgaaatctatactgatattgtatttaatgggccatctcctgtagatttaagaggagtagattctggaggcaattcctcagattccaatcaaactcctatggatggaaacggcagtatgaatgaatcatctgataatggttcagataattctaccaatagcagtttagacaatctggatgatgaggtaaaggattcctatgagaatttgattgataatatcaattcaactgaaaatgcgtcagatgtttatgtcataaatgacgctaattatgctctttatttcaatgaagacggtagttttagagatgatttccctattgagtttggaaatacacttagatttgctaatcttacaaataaaatgtttaaaatagacattcctttaaagattatttcagatagcgaagactctagtttgctaaattgctttatttccttggaaggtgaaagctctaatactattatttctaatttaaaatttgaattagataatttaagttcaaatatagactttatttctataaaggatggagttagtaatgttttgatttataataatacttttaaattagatattgattcctctgattctttaatagattctcctttatctgatgatgcttccttatctgcaataaggctctacggtagcgattacatttcccgaaatattttcatagaaaacaatattattgacttcaaatctaattttggccaattatatggaatatacttatctaataagatggattatttaaattcaaaaaccaatccaagcggatttattataagaaataatgtcttctcgattgattctaatggattaataaacgcaatctattcagattctgttaaaaatttactattggagaataatttatttaatttaagctcaaatggcaatttagaggattcttcattaatttatggcttagatctagttaaagtagataatttgaccatgataaacaatcaattttcaataaattccacttatttggcttgtggaatcaattcaagcgatagttctggatttaatttatctaataatcaattttcagttgattcagcttatttagcttatggcttgaatttaaaaaatacaaataattttaatttacataataatgatttttatatagattcaggcagtttcgctcatgctttagacttggatgattgcaataacttcaatattgcaaataaccttatcaatgcaagcggagcagatattaaaagaaatctaaatgcttccaatttagctgtattcatccaagatgacttaaatgataatgtcttaaagaacggatatttatacatctctgaactaaatgggtccttaaagggcaatggattatatgaaaatgattttaagtctcctattgtccatactgataattctacacgtgaccttcaaaacttaatagactttgcagttgaaggagatacagttgagctaggaaatatggtatttgctgacttggatacaattaatatttataaaaaccttacaataaatggaggaatatttgtatctggcaattggaggcctttattccacattttgcctaatgatgagttattgaatcactcatcctctgattcatacaattcttatcgttcatttgattatttaaacattcaaaatggagcttattaccttgataatgctgatttactgatattggcagaggcatgcaatggaacagacagtctttcaatccaggttccaagcttaaacatatgtgataatgagttcatgcttttagatgattctacagtggctgaatcaataaatatcttaaagctcctatcatctagagctatattggcgcctacaaatgacatatccattgaaaacaatatattagtcagcggaatgaatccgtttgtatttgaagtaagctctataatgaccggttcagatattgatattgctcatggaccattgaatcctaaaaaagcctctaagataatatttgaagatatggttacaacagccttcgattccaatgtagaaggaaggataggaaaatactttgaagtgacattaaaggatgagaatggaaatgctttatccaataaagcaattcaaataggatttaatggaagaatatataataggaccacagatgagaacggatctgcaagtcttcaaatcaatctggcctataagggaacttatacattcgctatctcatttttaggtgatgaatattataatggctcatttgaagtggctaagataactgttaaaaagcagactcctaagcttgatgtttccaatgtcacttataagtcaagcgctaagtctaaaacatggactgctaaattgactacaagctatggatccttattaaaaaataagaaggtctatatcaccatagatggaaagacttatacaacacgcacaaattctaagggaattgctagtttaaaggtaagtttatccactaaaaagacttataagtttactgttaagtttgagggtgatgatacttataattctcttactaaaactgctaaattgactattaaatag

SEQ ID NO: 2058 - DNA, 885 bp, Methanobrevibacter ruminantium
  source 1..885: mol_type = genomic DNA
atgaatgaaaaaaatgagtccgcctttcctatacgatgtgatcccgaggatgaaatatttgttaaatgcatgtctcgaattaaagagtttccccaatatatcacaggatacgatgatatagaaggaccatatgaaagccgctttatctcttcaggatacagaaacttaaatcttgattccgtaaggataagatcagataaaagcagcataaatatagagcatcacagctcaataagccaagaggcaatgagaagaaattacgaatatgctgtaaatgtctttaatgctactggacaagcagtttatccttttatcttttacactggcgacttgcccgttgataaaataacttacatgaaccagttaaattattttcatccccaatggtttatattaaaggaaaaggatggcatgaaaagattaaataatattaaatataaaactgataatgatatagatatgcacatttttgaatttttagattacatttggcttccaaaattcaagttagaaataacaattgaggaatgcatcagggaacttgttaaattgtataacaagctttctgctgacgaatttatcttaaatttcactaaagaatgtcttgcattatgggttggaagatatataaaagaccaagatgaattaaaatacatggctaggtgtttaaatatgtccaaaatagaagaaagaccttttgaagaatcactgagaggagtaatcttcgcaagaaaactagaagaagccgaagaaaaaggtgtggaaaaaaatagaatagattttatcactaaagctttaaaacaaatgagtcctcaagaagtttccgatttgtttgatattcctatagactcaatacttagtgttcaaaatcaatattcaaaataa

SEQ ID NO: 2059 - DNA, 846 bp, Methanobrevibacter ruminantium
  source 1..846: mol_type = genomic DNA
atggcattcggtacatataaagacgtagtatcagcaagagctactgataaagcaatccaaaaagtcgcacaagatggtggaatcgtaaccgcattattaacttacgctttagaagaaaacattattgaaggagcaattgttgctggaaacactgaagatccatggaaacctgaacctaccattgcaatgactccagaagaaatcattgcagcagcaggtaccaaatataccttctctccaaacgcaatcagactcaaagaagctgtaagacaatacggtcttgaaaaaataggaactgtaggaactccttgtcaaattatgggacttagaaaaatgcaatcctatccatttgctaccagattcgtagcagataagcttgcattgattataggtattttctgtatggaaaacttcccaagagattccttaaagaccttcattgaaggtaagatgaattcctccttagaaggcgtaaacaagatggatattggaaaaggaaaattctggattactgacgttgaaggcgaatccggacttccattaaaagaaacccacggatatgaacaagctggatgtaacatctgtctcgactatgttgcagaattagctgatgtatctactggatctgtaggttctcctgatggatggtccactgtattcaccagaaccgacagtggtgcagacatctttaccgcagctgtagaagctggagtaatcgaaaccaaaccaatggatgatgtaaaacctggtttagaattactcgaaaaattagctaacggtaagaaagacaaaggtagaaaagaaattgaaagaagagttaacatgggactcccaagtcctttctaa

SEQ ID NO: 2060 - DNA, 960 bp, Methanobrevibacter ruminantium
  source 1..960: mol_type = genomic DNA
atgcttgcaagaattaaaaacagcattagaaaatttttaggacttgaagctaaaccggacgcagaagatgatgaagcaaaagctgagactcaagacaaattaaaacaagagattaaaaaggaagttgaagctcaatcaaagccagcagaagaggctaagaaagaggctgacgctaaagctgaagaagaagctcaagctaaaaaagaagcagaatcatctaaagcattaaaagaatcttcaactcaggaggttgaaaaagtggctgacaaaccaaaaataggatatattcacatgagtgggtgtactggagacggtatgtctttaactgaaaattacgacattctctcaaccttactcactgatatggtggacatcgtttacggaacaactttagtagacttatgggaaatgcctgaaatggatttggcattagtcgaagggtctgtctgtttacaagatgaacacagtgtaaaagaacttatggaagtaagagaaaaagcaggattagtttgcgcatttggatcttgtgcaatgactggttgtttcaccagatatgcacgtggtggacaattagcacaacctaaacacgaatcttttgtaccaatttctgacttggtaaaagtagattgtgctattcctggatgcccagcatccccagaaattattgcaaaagtagttgttgcattaatcaacggtgacatggattacttacaacctatgttagacatggcagcatgcaacttagcttgtggctgtgacttacagaccaacgtagtaagtaaggcattatgttgtggttgtggaacttgtgtattagcatgtccaaccagagctcttgaaatggtagaaggtagaccatcacacaataaaaacagatgtattaaatgtggcgcatgtactactcactgtccaagaacctggttccctgctgaacaaattaaaaaggacttaggattatag

SEQ ID NO: 2061 - DNA, 474 bp, Methanobrevibacter ruminantium
  source 1..474: mol_type = genomic DNA
atgccttatgatgcaggaagattagttgtaggatgcggaaacgtcttatttaaagatgacggattcggtccaatggttatacatgctttagaagattactttaaggaaaacaatcttgaaatgcctaaagatacccagttcattgatgcgggaaccggagccacacatttcatattttcaatgcctgacgacaattggaagaaggtcattgtagtggatgttgtggaatggaacgcagaacctggaacactaaagatcttcagtccttatgacatgcctaaaggaaagtatgaaaacgctcatacctggcctgtagaggaacctctccacgatttggtggatatgggtatagaagttgtaatcgtcggatgtaaaccaaaagaaatcactgcaccagatgtagatatgggcttaacagagccagtggaggcagcaattcctaaagctattgaaatgatattaaatgaactttaa

SEQ ID NO: 2062 - DNA, 1158 bp, Methanobrevibacter ruminantium
  source 1..1158: mol_type = genomic DNA
atggaaattgacgatgaagggatagttaccaaaggtagatactttagtatcacacctgtcagaggcttagagaaaatggttacaggtaaagcacctgagactgcaccagttctttgtcaaagaatctgtggggtatgtccaattcctcacacattagcatctgtcgaagcgatggatgactcccttgacattgaaattccaaaagcagctgcattgttaagagaattaacaatttctgcttctaacttaaacagtcacgctattcaccatttcttggttgctcctgattttgtaccagaagatcttttcaagactgcagtagacagtgttggaaccattaggaaaaacgcacagtatgttgtagatatggtagctggtgaaggtattcacccatctgatgtaagaatcggcggtatggcaagaaacatttccgaacttgctcgtaagaaattatacgccagactcaaagcattagtccctgtagtggacaaccatgttgaattgatgactaacttaatccttgaaaaggacattcctgaaggattaggtgtaattgacgctcctgtatttgcaagtgatgtagtatacggtaaaagagacttctttgaccttgacagatttactgaaatcgtacctgaagcttggtatgacgaccctgaagtcggtaaaagggcatgtaccaccatcccattatacgatggcgtaaatgttgaaaccggtccaagggcaagagtagacaagttccaaggttacaaagaaagaggtgttgtagcacaacacttatcaagagctcgtgaaatgaaaacttacctttccagagctattgctatcttagatgaattagatactgctgctaatacccttgcagatttcgatccaagaggtaccaacaagttaggtattggtgtaatcgaagcaccaaggggaactgacgttcacatggcacaagtaaaagacggaaaaaccgctttctacagtgcattagtaccaacaacttggaacatcccaaccatgggtcctgcaactgaaggattccaccacgaatggggacctcacgttatcagagcttacgacccatgtttatcttgtgcaactcacgtaatggtagttgacgatgaagataaatctgtagtcgaaaataaaatggtgagaatttaa

SEQ ID NO: 2063 - DNA, 555 bp, Methanobrevibacter ruminantium
  source 1..555: mol_type = genomic DNA
atggacaactccaatattataatctcagtaattatagtattatgtattgcagcaggagtaactgcatatggtataagtgagggtgataatgcagtcttcagtgatttaactggattttcaccatctagtactgattctggagatactggaataggaaatactactggaaacaattctcaaggcggcggaataaccgcaggtcaaactaatgtggctaccaacactggcggcagctcaagcggtggctcaagtggttcaggcagttcaggaagtggttccggaagcggttctggatcatctggctctggcggaagttcctctggaaatggcggaggaaatactaacccaagcccaagtcctagcaaaataagcgcagcccaagctaaaaacatagcagctggcgcaattgccgaagaaggcgcttatatcagcagcgtatcagatactggatcagcctatgtctgttatatttctaatgcagaaggtactaatgtaggttacattactgtatcatacggtggagcaattattgaaggtgccggaggcgcaccttaa

SEQ ID NO: 2064 - DNA, 603 bp, Methanobrevibacter ruminantium
  source 1..603: mol_type = genomic DNA
atggataattcaagcattcttatatccgtaatcatcgttttatgtattgcagcaggagtaactgcctatggacttacaaatgacagcaatactgtatttaatgacctctctggatttactcctgacgaatctggagataccggtataggaaacaataccacaggaggaaacggaaattcaggtagtggaataactgcaggaacaacagactctggaagtggaactggttcaagcggcactggtaccggctcaagcagcagttcaagctcaagctcaagttcaagttcaagttcatcaagtagttctaatactcagcaaaaggcttggaaacctaaagtcagtccagaaaaagcaaaagcactcgcaacaagtgcagcaagaaactcaggatggcctggagcatattgttacagtgcaacatataattctggcggatattatgtctgtcttttaaaagatgatgctggaaacactggttatgcgcatatcggttctggaacaggcagattcttggaaggatcctggagcaaacaagtaactaaagagcctaatgaagtggaagacgattataaagaaaatgaaacttccaatattactgaataa

SEQ ID NO: 2065 - DNA, 1194 bp, Methanobrevibacter ruminantium
  source 1..1194: mol_type = genomic DNA
atgttagttaatgcagatttacatattcacagctgtttttccatggccacatctaaagacatgctgatagagaacattgctccaaaatcccttgaaaagggcttgaaacttgttggaactggagacgcattccatcctaaatggttggatatcattaggcaaagcacagaatataagggagatggaatatactcaagaggggactgtgactttgtccttacaactgaggtggaaggcaagcataaggtacaccatgtgattatcattccagatttggatattgctcatgagctctctgctaagttagtgtcctctaataagtttatagatggcagacctaagactccacttgggggagctgagttattggagcttgttcgtgaatatgactgcatgataggacctgcccactcatttactccctggactggaatgtataagtattacgatagcatttacgactgttatgataaaaggcctgattttgttgaattaggactttctgcagatactgatatggctgattgcataaaggaattgtctgattttgtatttttatccaattctgatgcacattctccttggcctcataggttaggaagggagtttaatcagatagagatggatgatgtttccttttcatcactaaagaaggcatttaagcacaagactgtaaaagcaaattatggaatgcttcctaatttgggaaaataccatatgactgcatgcaccaaatgttataagcttgttgatcctatcattgctaaggagaataagatgatatgctcttgtggcggtcggataaagaaaggggttgactataggataagcgagatagcagactttagccagccaaagcatccgagccataggccaccttatgttcatcttatgcctcttggagagctgatcagtatggtttatgataaaggggttacaaccaagactgttcagggaatctggcaaaagatggtggataactttggtccggagattgatgtattgattaagactccccttgatgagatagaaaaaatagatagtgatgtttcccttgccattcaaggatttagagaaaaaactcttaatataactccaggtggtggaggaaagtatggggaaatctcatttagtgaggattttaataaaactgagaaaaaagagagtgtgaccactttagatagttttttttag

SEQ ID NO: 2066 - DNA, 564 bp, Methanobrevibacter ruminantium
  source 1..564: mol_type = genomic DNA
atgagcaaaaaaagatgtccatgggcagaagatgtagaggaaatctatgtgaaataccatgatgaggagtggggagttcccacctatgacgatagggagctctttgaaatgctcgtgcttgaatcatttcaggcaggactttcatggataaccattcttaaaaaaagagataactttaaagaggcatttgataattttgatgtagttaaagtaagtgaatatgacgatgcaaaggtagaggagcttagaaacaatgcaggaatcattaggcataagggaaagatcaattctgccataaacaatgcaaatgtctttattgaaattcaaaatgagttcaaatcattctcaaactacatttggggctttacagacaataaggttctaaaggatacggaagaaaactataagacaaattctccattatccgataagatagctaaggaccttaaaaaaagaggaatgaaatttgttggaacaaccattatctactcttatttggaagcaattggagtgatagacaatcatatccatgaatgctttaaatacaaagaggaaagtgattaa

SEQ ID NO: 2067 - DNA, 477 bp, Methanobrevibacter ruminantium
  source 1..477: mol_type = genomic DNA
atgaagtcatcagtgcttttagaggaaattaaagagaatattcaaaattatgatattgatcatataaaagaaaaccttaaaaaagaggatataaatccaatatcaaaacaggtttctgagtttaacttgaaaaattatgatgaaataatggaaacaaagatatctgaggaagatgattttgaaataagtgatgaaatgatatattcaatgaaaaatgaaatagatttgttctttaaaggatgctcacctgaaagcgaagactcctttaaaaagttcattgaatcaatttgcttatatttaagccttattgctaaaaaaccattgcatccagttggaatggattttaaaaacggcaatacagtccatgaagagattgaagatggaaatactgtttattattgcgatttaaaagaatactttggcaagcaagaaaaggattactatacttgtaaattttgcgtttgtaaaacagtttaa

SEQ ID NO: 2068 - DNA, 1008 bp, Methanobrevibacter ruminantium
  source 1..1008: mol_type = genomic DNA
atggcatttaaagacatatttaaatttaaacaaggagaaactacctttatttttgtaggcggaaaaggtggagttggaaagacatcaatttcatctgccactgctttatggctagcaaaacaaggcaagaaaacattgattgtatcaactgatcctgctcattcattatctgactcacttgagacaaagataggccattatcctgtagagatctgtgaaaatctctatgctgttgaaattgacccggacaaggctatggaagaaaagcaaagggctcttgaaagccagaaatccatggcaactgcagaccaattgttgggtcttgattttctaggtgaacagatggatttggcttctgcatcccctggagcagatgaggctgcagcatttgaagtatttttatctgtgatgacttccaatgaatatgatgttgttgtctttgatactgcgccaacaggacacacccttaggctattgtccttccctgaagtcatggactcttgggttggaaagcttatgaaggcaagatccaagttaggggctgctgcaagcgctcttaagaatatcattccatttatggatgctgaaaatgatatccaatcctctcaggagttggaagagactaaaaagcagattaatgaggcaaaggcagtattgtctgaccccgatagaactacattcaagatggttgtaattccagaggaaatgtctatttatgaatctgaaagggcaattgaggcattaaacaaatatgacattacaactgacagcataattgtaaatcaggtcatgccagatatttcagactgtgacttctgtcattcaaggtatatgcttcagcaaaaaagattggctctcattgatcaaaagttctctgaccaggtcgtagctcaagttcctttattcaaggatgaagtaaaaggtaaggaaaagcttttaaaactagctgaaatcttatatgaaggaaaagataatgatgaagttgaagcaagtgtgattcagttatag

SEQ ID NO: 2069 - DNA, 132 bp, Methanobrevibacter ruminantium
  source 1..132: mol_type = genomic DNA
atgtttgttgaagaaataccagaagagaaattttattcaaatagaattagggatgaattcatagaagaagtagtggaaaaaatagaaaataatattcttcaaaataaatatagaaaatatttggattattaa

SEQ ID NO: 2070 - DNA, 150 bp, Methanobrevibacter ruminantium
  source 1..150: mol_type = genomic DNA
atgttttatgaagagcgagttgaagatcaattttccacataccgcaatcgagaagaatttataagagaacttttggatgtggtagataataagataactgatgaagagatggaagatatttatcaattattggatattcctagaaactaa

SEQ ID NO: 2071 - DNA, 762 bp, Methanobrevibacter ruminantium
  source 1..762: mol_type = genomic DNA
atgacaatttgtatatctgcaatttgtactgagaacaatgaagagcatattgtttttgctgtggatcatatgattactactggattagggcaatttgaacacagtataaataaatacaacgttcttaatgaaaatgttgttggaatgatggctggcaatgccttattgatggattatttctttgatgaagattattctgaaaatagtttttctgaaatccttgatatattcgaggaaaagtttaaggaaaagaggttaaacattattgaaaaagaaattttagatgtttattctattgatttggatttcataagagatattttaaaaggtccgattacaaatgatttccaagcggctattttaaagaaaattgcaaaaacaaaattagaatctgcaatccttttaatgggatttgagaacaataaggctagaattgctgaagtgtccgattatggaattggaaattttaatcgtattaattttcatactattggttcaggttctattcaagctcaaaacactcttatgttccaaaaacattcaaaaaaagatgatttgagaactacattgtacaatgtttacaaagcaaaaaagaatgctgaagtaatgcaaggtgtagggcaggatactgaaattggatttttgaataatggaagtatcgtaatgcttgataagaagaatatgggcattttagataatgtttatgcccttgaattgaactggggaaaggaacacaaagaagtgggtgctttagatttttaa

SEQ ID NO: 2072 - DNA, 1080 bp, Methanobrevibacter ruminantium
  source 1..1080: mol_type = genomic DNA
atgttagaaatcaaacatacaatatgcccttcatgttctgtaggatgtggattaaacattgtctccaaagacggagcagtggtaggaacctatccttacaaaagacatcctataaatgaaggaaaaaattgttctaatggtcgtggttccattttgcaatttgaaaataagatcaatgctccttcattggtacagaatggagagcttgttgaatcagatgctgattccatcattgcagcaatcaaaaaggaattggatgcaatcgatgcaagcgaactcgcaatcatctgttccgacaagaacaccaatgaggaaattgatgctattaaaaaattcgcagaagatttcggaaccgataaaatcggattttacggatataatttccctaaattttccggagaaatagcaaattataatgatatcaataacgctaaattcattttagcaattggtgacatctatggagaaaatcctttagcagctagaagaattgttttagctaaagacaaggaagcaaaattctttaacatagatgacgttgaaaaatccataactgctttaaacgctgacgaatacatccaatttagtgataaggcaacttttgctgacgctatcgcatctgtaaaaggagagcttaacgaagaagctgtaattgtcttaaacaaaattgcagatgctgaagactttaaattagttgaagatttagcaagcgaaaccggcgctaaattactccctattttaaacggtccaaacagcaaaggagctatggataaaatagacccattaaccaaagatgaaattatagacctaattgacggctcaaaagtacttattgtcgtaaacgataacttattagactatttatctgaaagtgacattaaaggaaaagcattcattgcaaatatttccaatttcgaagacgaattcaccaaattttccaacgtagtattacctggaaaagcttgggtggaaaaagaaggaactttcaccaatgctgaaggcttgacccaaagctttgctgcatctgcagacttaggtgaaggattaagcgaaattgaaatattcgagaaacttgcttaa

SEQ ID NO: 2073 - DNA, 1155 bp, Methanobrevibacter ruminantium
  source 1..1155: mol_type = genomic DNA
atgagtgaaaatttaatgcttgcaaaaagtaaagaaaatgaaataactgatagcggagcatgtgggggagctgtaagttctatttttcaatatctattaagccagggaattgtagacggagtattaactcttaacaaaggcgaagatgtatatgacggtatcccaagactcttaaccgatgctagtgaagtaatcgaaacttgcggttcattacattgtgctcctacaatggttggagatttaatttccagttttttaagcgatcaaaaaatagctgttgcagtaaaaccttgtgatgcaaaagctgttaacgaattggttaaaagacacagaatcaatcctgaaaacatcataactatcggtttaaactgtggaggaactgtaagaccagagactgcacaggaaatgatagaaaaattctatgaagttgaccctgctgacgttgtaaaagaagaaatcgataaaggtaaatttatcattgaaatggcagacggaagcgaaaagggaatcaagatcgatgacttggaagatgaaggctacggacgtcgtgacaactgtcaaagatgtgaacttaaagttccacgtaatgcagaccttgcatgtggtaactggggtagtgaacctggctggacctttgtggaagtcaataccgaaaaaggtaatgaaataatcgaaggcgctaaggctgaaggcttcattgaaaccaaagacccatccgaaaaggctcttgaaatgagaggcaaagttgaaaacatcatgatcaagatgggtaagaggaacactaaaaaacagttagaagacgaagctttaactttagaggaatgggaaaaccaatggaacaaatgtatcaaatgtttcgcatgcagagacgtttgtccaatatgctggtgtcatgaatgtgaacttgaaaagtcatactttaaggatgacggacaagctccacctgatccattaagcttccatggtgtaagattatcccatatgagtccaagctgtgtaaattgtggtcaatgtgacgatgtatgtccaatggaaattccagtatctaaactattccacaaattgcaagtgaaatatgaaggtcagactggatatgttgctggtgtcggcgatgaaaaacctccattatacagtccacaaaaagaaaacttttaa

SEQ ID NO: 2074 - DNA, 402 bp, Methanobrevibacter ruminantium
  source 1..402: mol_type = genomic DNA
atggcagacgatattaaaatagtaggtttttgttgtaattggtgttgttacggtggtgcagatactgcaggtaccgcacgtatgcaatatcctcctaatataagaattataagagttatgtgttctggtagaatcaatccttctatggtctttaaagcatttagagaaggagctgatggtgtattcgtaggcggatgccacatcggagactgtcactacgacgctggaaactacaaatggaatagaagagcattgatgactaaagatattattgaggaatttggaattgacaaggaaagattcagattcgaatggatctcagcttccgaaggtgaaaagttccaaagaaccatgaaagaattttataataccattagtcaacttggcccaagaaacaaataa

SEQ ID NO: 2075 - DNA, 2874 bp, Methanobrevibacter ruminantium
  source 1..2874: mol_type = genomic DNA
gtgactaataatgaaatagaaaagaaatggcagaaaaaatgggctgacgctaagctatttcaatcagatccaaatgaaaaagaaaaattattcttaacagtagcttatccatacccaagtggtgcaatgcacataggccacggtagaacatacaccgtacctgatgtatttgcaagatttaaaagaatggaaggctacaatgtattattccctatggcatggcacgtaaccggtgcaccggtcataggtattgcagatagaataaagagaaaagatccatggacccttgacttgtacgaaagagtacacaaggttcctcatgacactcttccaagcctcgaagacccaattaacattgtaaaatacttcagtaatgaatatcacactgtaatggatgatatgggctattcaatcgattggagaagagaattcagaactatcgaccctacatacaagaaattcatcacatggcaagctaaaaagcttaagtcccttgggctaatcaagcaaggggagcaccctgttaaatattgccctcacgatgagaaccctgtaggcgaccacgaccttctcgaaggggaaggcgtaggtgtaaacgagcttacattgattaagtttgaagtggagcctggattatacatagtccctgcaacattcagacctgaaactatctttgcagcaaccaacgtatggctaaacccagaggttcactatattgaagttgaagtaaaaacaggtgcaaatgcaagagaaaaatggataataagcaatgaagcattcttaaatctatcaaatcaacatgatttggagattgttggagacattgaccctaagccattaatcggcaaatatgtcaaaaacccacttaacggagagccattgccaatattccctgcaagctttgtagaccctgaatatggttcaggtacagtattttcagtacctgctcacgctcctgcagactatattgcacttagagaccttaaggaaaacgaagagctaatcaaagacttcgatataaaagaagaggtagctaaagcagagccattgaatgttgttaccgtagaaggatatggagagttccctgctgttgaagttgttgaaaggatgggtatcgaaaaccaaaacgaccctaaggtacaggatgcaactgacgagctatacaaggcagagcacagcaaaggatacataagcgaccatatcgaaaaatatgcaggaaaaagagtcgcattcataagagatgaaatcaaggcagacatgattgaagcaggaagcgcagacataatgtacgactttgcagagagaccagtcatctgcagatgcggaaacaaatgtgttgtcaaggtcatggatgaccaatggttcataagatacggcgatgaggaatggactgaaaagacccaaaaggtcttagcacaagagacaattatcccagaagagatacgctcaaacttcgaatactatctcgattggcttgacgactgggcatgctccagaagggtaggtcttggaacaagagtcccttgggacgaccaatggcttattgagcctttatccgactctacaatgtacatgtcctactatacaatagccaaataccttaaggatatggaccctgaagacttaaatgaagcattctttgaaaaggtcttcttaggtgtagacagcgatgaaatcacagtccctgaagagacagtaaaccaaatccaagaggaattcaactactggtacccattagactggagattatctgcaaaggaccttgtcggaaaccacttaagcttccttatgtttacccatgcagcaatatatcctgaggaaaaatggcctaaaggaactgtagtcttcggtatgggacttcttgaaggaaataagatgtcatcctccaaaggaaacgtcattctccttgcagatgctatcgaacagtacagcgcagatgtggtaaggcttttccttatggcatcagcagaaccatggcaagactttgactggagagaaaaagaggtcagaggaacccaaagaagacttgaatggtttagagagtttgcacaaaaggtagaagacataaaaggagaaaagctagacctatccaatattgaagaagtgcctttagaacgcagcatcgacaaatggatgataaatcaattgaacatacacatcaaggaagcaactgaagcccttgaagtattccaaacaagacaagcactccaacatgctttgttcctacttaaaaaagacttagaccactatctttacagagttcaagaccttattgaagcaaaggaccctgcagtaatctatgtcttaagcacattgctcagcaattggataagattgcttgctccatttactccacacacctcagaagagctttggagcaaatatggcggtgaaggatttgtatcatttgctaaatggccagagtacaacgaagatctaatcagcaaggaaatagaaaggtccgagtcccttgttcaaaacatagtaaaagacataaacgaaatcaagaacattgtagacacagacccagaaaagatacacttataccttgctccagaatggaaatgggagctatataagatagctgatgaagttggaaaaccagacatcggccaaatcatgggcaaggccataaaggcagacatttatgataacaaaaaggaaatcgccaatgtagcaaaaagaatttcaaaagaaatgattaagacaagatacattggtaagattgatgaagagactatcttaaatgatgcaaaagacttcattgaaagtgaggtaggttcagagattgttattcatactgatgacagctatgatcctcagaataaggcaagaaatgctatgccttataagcctgctatttttatggaatga

SEQ ID NO: 2076 - DNA, 1374 bp, Methanobrevibacter ruminantium
  source 1..1374: mol_type = genomic DNA
atgaaaaaaaataaactcgaaaaaggatgtgaaaaaatgtccgcagacgataaaaaactagaccaaataattaagacaatcgaagcaaatgacataaaatttttgagattagaactcgcagacatacacggattgccaaaaagcatggcagttcctcttaaaaatgcaaatgatgtagaagacatagtaaatgacggattattatttgacggttcatctgtagcaggattagcttcaatcaatgacagtgaccttcttgcaaaaccagacataaacaccttctcaaccatcccatggagacctgaatcaaaaggtacaagcagattcatctgtgacatatacaccacagaaggaaccccttatgatggagacccaagaggaatccttaagaaaacattagaaaaagctgagaaaagaggataccaatacaatgtaggtccagaaccagaattcttcatcatcaaaaaggatgaaaacggaaactacgtccctgcagacgaagctgaatactttgacgtagagccattagaccaaggaacagacatcagaagagaaatcgtattcggattagaagagttaggtttcgatgttgaagtaagccaccacgaagtggcagcaggacagcacgaagtggacttcaaatatgcagacgctttaaaaacagcagatgcagtaattacatttaaggaagctgtaaaagcagtggctaataacttaggagttaaggctactttcatgccaaaaccattcataggaatcaacggtagtggaatgcactgtaaccaaagtctattcaaggatggagaaaacatcttctatgacccaaacactgaaactcaagtatctcaagaggctttatacttcattggaggattattaaaacacgcacaagctttatcagcaatcttatccccaacagttaactcttacaaacgtttagtcccaggttatgaagcaccatgctacatagcttacggatttaaaaacagatcaaccttgctcaggattcctgcatcccgtggattaggtacaagaatcgaatgcagatcagctgacccatcctgtaacccatacttagcattttcagcattgcttgaagctggtttagacggtatggacaataagctcgacccaggagaacctactgaagaaaacttattcgcattctccgaagaggaaattgctgaaaaaggaatttccaacttgccaacaagcttatgggaagcatatcacgcattagaagaagatgatgtaatcataggcgctcttggagataaggtattcaatcaattctacaatatcaaaagagcagaatgggatgcttacagaatccaagtattcgactatgaaagagatgaatacttaaacgtatag

SEQ ID NO: 2077 - DNA, 918 bp, Methanobrevibacter ruminantium
  source 1..918: mol_type = genomic DNA
atgtgtggaatagcaggtgtaatatacaaagataaaaaaactcaccctgtaggagaagcattaacatcaatgcttgaatcactacaacacagaggcccagattcagcaggatatgctatctacggcagcttagattttcctgaaaattattatcaattaaatatagaagtaaaaagaagaagaggagcattagacaatttaaaatcattattaaaccaaatcagtccaatatacgaagaagaaataattaaatccgtaggagactcagatgtatataaatgcaaaatagcattagatgaattctcccttttgcaaccatggataagggaaatagacgaattagaaaatgtaagggtcatcaacggatcacattcatttgaaatgataaaggacgtcggaaaagtaaaggacattgcagaaagatttgacgttcaaagcagaatgggaacacatggaataggacatacccgttttgcaacagaaagtggcgtagaccgctatcatgcacacccatatcaaagctacatcataccagacattactgtagtgcataatggacaaatcaccaattattggaaaataagagacccattagaacgtaaaggacacacttttgaatcatttaacgatacagagtgcatcgttcactatatggcagacaagcttaatcaaggctataaattagaagaagccttagatcaagcagtgattgacttagatgggccattttcaatattggtaggaacacctaacggcataggcattgcaaaggacaagcttggccttagaccaggagttatggtagaaaccgatgaagtctttgcaatagcttcagaggaaatggcattgcatgatgtcactgattctaatgagatagaacagatagccccaggtgaaacaagagcttacaccatataa

SEQ ID NO: 2078 - DNA, 648 bp, Methanobrevibacter ruminantium
  source 1..648: mol_type = genomic DNA
atgaaagaatacatcattaatgcaaaagatatggaagagaaagaattaaaccgtgctataaaggaacaggctgcacatcatgataaactcattattaacaatcctgaatcaagacacaatatttgcgcaggcttaagcgaagatgtagacatagaaatcaacggttctgcaggatactttgttggaaccatggtcaacggaccaaagatacacatcaacggaaacgcaggctggtttgccggagacaatatgaccaaaggggaacttatcatcgaaggcacagcgggagacggtgcaggacagggaatctatggaggaaccgtaatcgtaaaaggaagcacaggctcaagaactggagagatcatgaaaggaggaaccgtaatcattggcggaaacagcggattcatgaccggactgcttatgatgggaggaaagctcatcattcttggagatgtaaccgatgacgtcggggaatcaatcatgagaggaagcatatatgttcttggagaggtcaaaagccttggaaaaaacgcaattatggaagaaaccacagatgaagatttaaaggatcttgaagagaccctgacaaaatacggttttgaagatatagactattcaaactttaaaaagattgtaaatattcaatag

SEQ ID NO: 2079 - DNA, 1095 bp, Methanobrevibacter ruminantium
  source 1..1095: mol_type = genomic DNA
atgagtgaacataaaatagcaatggttggaacaccatgtgaaattatggcagcatcaaaactgcaagattatacagatagccctattgaggttaaattgggcttattctgcatggagaacttttcatacaaatactttgtaaatttcctaaaggaatatgacttaaagatggatgacattgaaaagttccaaattgacaaaggattcctattcctaatactaaaaacaaaggaaacagtgaaaatacctttatcagtagctaaaaggataatcaggaaaaactgcaacatatgtgttgagcttacatctgagacctctgatatctcaataggttcaataggttcagatgacggctggtcaacattgattgttagaagcgaaaaaggagaggaaatagtaaagggagcaattgagcaaagattcattgaagttgaagagctagaagaatccaaattccaactgcttaacaaacttgcccaaggcaaaataaacaggaatctggagcatatagaacaaagagaattcttagcaaggcctgtactataccaaagggaaaaggacgacgattcaataagcaaggaaatctcagaatctgacttctctgacttaaagtcaaatgtcatagacattggagcatgcgtgctctgcggagcctgcgaatatgcatgtccggataacttaataataatcgacgacaccaaacctagaatgaaaggccaatgccctccagactgccatgcatgctttgcagtatgtccaaggacattcatagaggaacacttaagaaatgacaatgaaaagccaatcggagactatataaatgtctatacagttagatcccttaagcatagccaaggtcaagacggttcaatcgtcactacaattctagactatcttttaagcaatgagattgtaacagaagcccttattgttgataagaaagacgatttagcttggaaaccttacgcaaagctaacaaaggacatagaccaagtcgtaaaatcaggaggaaccaaatattctgtatgtcctgtattcaagccactaaaagaaattaatgaggaatcatcaactacagaagagggggttaactaa

SEQ ID NO: 2080 - DNA, 1488 bp, Methanobrevibacter ruminantium
  source 1..1488: mol_type = genomic DNA
atgtcattcactgttgaaaggaaaatagaaatatgcaggcagaacaatgacaggccaggttgctgctggtatttatgtgacaatccaaacaagtcagcatgtaagaactgttatagctgctattctaactgccctcacggcgtatatgaggtaatcaatgacgaaccactcccaatacatcaggaaaactgtgtaggatgcaagatctgtgaagagatgtgtccgacacatgctatctatgtaaggcctttagtggatgagggaaggggaatatggtcaaactcaaccatggttgaaatcaagcgtaaaagccagaccggttcatataaggtccgtggatgcggacttacccgaagaataccaagctttgacgacttgagcatattgcctgcacaggtatcaaggccaccaatagactcatacagggaaacatgcaagacatcagtagtccttggagaccgttttgcagaaaacccaattgaaattgacactccaatcatgattggagcaatgtcatttggtgctttaagtaaagaggcaaagatagcattggctattggaagcagcaaagtcggttcaataacaaacaccggagaaggaggaatgcttccagaggaaaggcattatgcagacaagctcattgcacagtatgcatcaggccgtttcggtgtttcagcaagctacctgaacaatgcagaggctgttgagataaagataggccaaggcgcaaagtccggtatgggaggacaccttcttgcccataaggtaactgcagaggttgcaagggttagaaacattccggaaggaacctcagcattaagccctgcaagacacatggatatcgtaggtccggaagacttaggaatgaaaatcaatcagctaagggaaatcacagactggaaagtgccaatcatcgttaaattcgcatctggaagagtggagcaggacgtaaagattgcagcaaaggctggcgcagacataattgtagttgacggtatgcaaggaggaaccggagcaggccctgaagttgttacagagcatgcgggaatccctacaattgaagctatcgttaaggctgacgacgcccttaaggagataaacctaagaagcgaagtaagcctagttgctgccggaggaataagatccggagctgacgttgcaaaagcaatagctttaggtgccgatgctgtatatgttgctacatcagcacttatttcaataggatgtaaggtctgtcaatcctgttcagaaggaatatgtcctaaaggaattgcaacacaggacagagcccttagaagaagattggatcctataagaaaaggtcagcaagttgctaactatattgaggctatgacacaggaggttacttcattaacccaacaggcaggaaacactgacatagagaatcttgaacgtcaagaccttgtagcattgactatggaagcttctcaattgactggagtgcctatggtaagccaaagatattag

SEQ ID NO: 2081 - DNA, 2643 bp, Methanobrevibacter ruminantium
  source 1..2643: mol_type = genomic DNA
atggccgcattcgatagaatcaaatcaggaattccagggcttgatagcgctttagacaatattcgtttaggagacaacgttgtatggaatgtcacaaacctaaatgaattttcctattttgtaaatccttacataaagcaagcaaaagaggacaatagaaacttaatttacatccgttttgccaatcatcctccattaatagaaatgactgaagaagatttcagattgcttgaaatcgagcagaacaatccggaaaccgagttttccatgatagagcgtgacggaatcaagatatatctggttaatccatataaccaattcgagacattcacattggaagttcacagaatcatagaaaaggaaggcttcgatgcattctatgtcttcgactgcctaagcgaccttcaagcggtatggtcaacagacctgatgatgggaaacttctttaaggtaacctgtccattccttttccagctggacacagttgcatacttcccaatcatccgaggaaggcactcatatgatgcaatagcaaagatccgtgaaaccacacagctatttctaaacgtatactcaaactctccagaggaagtttacgtatcccctctcaaggtatggaacagatactcacagaccatgtttttagggcataagttcaaccctagaaccggctttgtcaaggtccttcaggacggtcaggaagtaagcaaatactataagaccatcaattcagacaaatacatgaacggacagaccttagacagctgggaaaggtatatgcttaaagtcagaagagaatacgaagagggaaagaatatcgacgaagagtgtgacaagatctgtgagctcatgatgacaaaggacgagaagatgctttccaaaatcaaggaatacttctcttttgaggactataccacaatctatgaccgcagagtgggaagtggacttgtaggaggtaagtcctgtggtatgcttcttgcaagaaagataattgaaaggaactgcccagagatatacaacaatatctttgagcctgacgactcattctatataggctcagaccttttctacacttacatcgtttcaaatgacctttgggaccttagggtaaagcaaaggacccctgaaggatactataaatatggaaaggaactggaggaagcccttaaaaacggaagcttttcagaccagaccaaaagggaattcataaagatgctggattatttcggacagaatccgattatcgtccgttcaagcagtttccttgaggatggatatggaaatgcatttgctggaaaatacgaatcagtattctgtgtaaacagaggctcacttgaagagagactggcagcctttgaagaggcagtgaaggtggtatattcaagtacaatgaacatttcagcccttgaatacagaaaaataaatggattggacgacactgacgaacagatggccctattggttcaaagggtttcaggatcataccatggagactatttcttcccgacagcagcaggtgtaggattctcatacagcccatattccccgcttccggacatggacaacagcaagggaatgctaaggcttgtaatgggtcttggtacaaaggctgtcgaccgtacaaaaaaggactatcctagaatcataaaccttgacaagcctgaagtgactatggcaaaggacattaaggaaaagcacagatattcacagcattatcttgatgttattgaccttaaggaaatcagcctgcatgacattccagtggatgaaggattgagcgtaattccaagatactctaaaaacatgttggtagagcatgacagagaagcggaaaggatgtttagagacagaggccaacgtagggaaatagtatttgtaaactgtgagggaatcgttaaaaacgatgcattcatagaaaccatgaaggaaatcatgagcaccctccagacagcatatgactatccagttgacatcgaatacactgtaaatgtgggagaggacaaatcattcaacataaacctattgcagtgcagacctctgcaagttatggtaaacaatgaggctattgaaatgcctgaagacaagaacgtattcttccatatcaaggaatcctctatgggaatgtccagaaagaacacaatagacacaatctgctatgtggatcctcataagtattatgaatatccttatgctcaaaaaagctctatttcaagagtaatcagcgatgtaaatgcatatctcaagagcaacaacaagacagcgattctcattgtcccaggaaggataggaacatcatctccagaacttggaatccctgtagtctttgcagacattagctacttctccgcaatcctagaggagtcatacagcgatgcaggatatatgccagagttatcctttggaagccacatgttccaggacctggtggaagcggatatatactacggtgcattgtttgaaaatgagaaaaaactggagttcaataaggacatggtctacgactatccgaacatattaaaggacataaatccaaacctcagcgaggagatttatgacatgatacaggtgatagactttgatgaaaacaaggcagagctctatcatgatatgaataaggatgaaaccttgtgtattttcaaatag

SEQ ID NO: 2082 - DNA, 1356 bp, Methanobrevibacter ruminantium
  source 1..1356: mol_type = genomic DNA
atgaataaaagtaaaaaatgtgcagaaaaagatttggctcatatatggcatcctgcctctcagatgaaggattatgaagactttccaccaattgtaatagaccatgctaagggagtccacctttatgatgtggatggaaaggaatatacagacatcatcagctcatggtggtgcaatatccttggtcattgcaatgaagaggtaagccaggcccttaaggaccaacttgatgagcttgatcatgttttatttgctaatttttcacataagactataatagagctatcagagcgtcttattaaggtcatgccaaagggattgaataggttttcctttgttgacaacggctctgcttcagttgaatgcgcattgaagatggcattccagtattgcgctcaaactggtagggctcaaaagaaaagattcatgtgctttacagatgcatatcatggagagacattaggcgcattgtctgttggagcccttgatgagtattcaagtgtttttgagccaatcatgattgatacaattaagattgaggctcctgattgctatagatgtccttatggtaagacaaggaatgattgtgattgccagtgctttgagcatgcagagagggcatttgaagagcatggccatgagacctgtgcaatgattatagagccgcttatacagggaagcgctggaatgaagatttatcctcctctttatctaaagaagcttagggaactttgcgataagcatgatgtccttcttattgcagatgagatagctacaggttttggaaggactggaaagttctttgcagttgaccatgccaatataactccagacattatgtgtgtgtccaagggactcactaatggatatatggccatggcagttgcatgcactacagatgagatttataatgctttctatggtgattatgaggataatatagcatttatgcacagtcatacttatgccggtaatccattggctgcaagcgttgcaaatgccacacttaagataatggaaagggataggattattgaaaataatcaggaaaaggccatttggcttaataaaagattccacaacacatttgatgagcatcctaatgttggcgagataagacagatgggtcttatcaatgcaatcgagcttgttgaggataaggagtctaaaaaaggatttgattcaagccttagaataggatataagatttatagggaagctttaaaggatggattgatgttaaggcctcttggcaatgttatgtattttaatcctcctcttgtcataactaaggaagagcttgatgagtctttagctatttgtaaaaaggctattgataaggtattattagactaa

SEQ ID NO: 2083 - DNA, 1599 bp, Methanobrevibacter ruminantium
  source 1..1599: mol_type = genomic DNA
atgacaaaatttatatttttaattatcttattaaaatttatgagaaaggaaattttaattgcagctattgcaatcatattaatattatgtggaggtgtatttgcagctagcaatatgcagatagcggatattgctacttttagtttgaatgcaattgatctcgaggataggggaagcttaatcgttgactctgaagatatcactgcttcaaagggctattataattcttcggcttctgatgagaatgtggttttggttaaaaattatagcttaagattaagcaattcaattgtaaataagactggagacactggaagctctggagatgatgcagacttttatgggattaattctgcagttcttgtaaattcaaatggaagtgtagaattatctgatgttgaaatagagactaattctaaaggatccaatggagtatttgtaacaaatgctgtttctgattctaattcaaattcttcatcctcttctggcagccctattgttgattccactgaacgtcatgatggaaagagtgatgctgaagagcctggtggtgttcctcctgaaaagcctgttgaggatggaccttctgtatatggcggttcttcaggaggtaaaggtgcccttagcgatggaaatcaatctatgcctgctccaggcgctagctcctctgatgtggaaggaagttcaagtgcagacatctcaaatgtccgaatcaccacacatggagacaagtcccgcggattggatgcaacctttggaggaaagattattgcttcagatgttgaaatcaatacagatggccaaagctgtgcggctcttgcaacagacagaggcgaaggtgaagtccatgtgaaaaactgcatattgaatactggagtggatgagaaaagcggaagaggctctccaatcatctattcaacaggaaacattacagctgacaattccgaaggctgtgcccatgtctcccagattgcctgcatagagggaaaaaacagcattgcgctatcaaactgtgagttctctgcaggtgcaggaggaaatagggaagataatggagaatatgttgatctaggaggagtgttcatctatcaaagcatgagcggagatgctgatgtaggaacctctctttttgatgcaaactgttgcgttttgtccatagaagaggattccgaatactataagactgctcctatgttccatgttaccaatacaaaggccattgtcaagcttgcaagcacagaacttaatttcggaagcggtgttcttttgaatgtttccggtcaaagccaatggggaactgtaggatccaatggcggtgagcttgagtttgatgcaagtgatgagattcttgatggggatgtctttgttgattccatcagttcattgaatatgagcttggcttcaaccagctttataggagctgtaaatccagacgatgactttggagagactaatcttgtcattgattcagattctgattggacattggatggagacagtcaccttagctcattggagaataatggagatatagattataatggacacactctttatgtggatggaaaggcttatacagagtctaatccatttaaatag

SEQ ID NO: 2084 - DNA, 699 bp, Methanobrevibacter ruminantium
  source 1..699: mol_type = genomic DNA
atgtcaaaaggactattcgtactgggaactggcacagatgttggaaagacttatgtaactggcttattgttaaagtacataagagacaatggctacaatgcaagctactttaaggcagccttaagcggcgctataagggacaatgaaggcaaactgattcctggagatgctgttgaagtgataaatatggctggccttgaagaggatacagactttttggttccatacatatatgaaacagcagtttctccacatcttgcaagccaaattgaaggaaatcctgttgaactggacaaagtcaagcatgcatacgaagaagtttcaaagaagtacgattatatagtcatggaaggaagcgggggcatagtctgccctattcgctatgatgggcaaggatgcaaaagcaatatcttgcttgaagacataatcaagtgtcttgaccttaatgtccttctggttgcagacgcagggcttggaacaataaactctgtaataacaacagtggattatttgaaaaatagggatattcaagtttgcggaattcttctaaacaattttaaggacatgcctatggaaaatgataatctcaagatgattgaagagcttggtggagtggatgtcattgcaaaaatctacaaaaatgataaaaatttatcacttgatgtacagttagatgttctaatgaattattttaaataa

SEQ ID NO: 2085 - DNA, 981 bp, Methanobrevibacter ruminantium
  source 1..981: mol_type = genomic DNA
atgtataatattatcgagcttaaggacaaagtattgaataattacaaagtcactaaagaagatgcattgaatttgcttgatgttccattagatgaactttcagatgcagcaaatgaaatcagagaattcttttgcagcaacaagtttgatgtatgcacattaatcaatgtaaaaaacggcagatgcagtgaagactgtaaattctgtgctcaatccaatcattatgatacagatatagatatatatccattcctatcaaaggaagagctagtaggtaagagcaactcccttttggatgcaggtttcaagcgaatctcttatgttgcatcaggcagaaagataagggataaggaatttgatatagttgtttctgcattagagcaattgaacaaggatagaactgatgaattccatttatgcctttcattagggcttttaagcgaagagcagataagcactcttaagaatctgaatgttgaacgaattcacaacaatcttgaaagttcaagggattatttttcaaatatatgcacaacccattcctatgatgaaaagctggataccattgatcttataaaagacaaaaatcttatggtctgcagcggaggaatatttggaatgggagagagctttgaagataggatagatcttgcaattcagttaagggatcttggagtcaagtcaattcctataaatgttttaaatccgataaagggaactcctgtagagaataataagattctttccaatgatgaggtctgcaggcttattgcaatattccgcttcataaatcccgatgcattcattagaatggctggaggaaggaccctccttggagacaatggcagaaaggcattccaatcaggtgcaaatgcagcaatacttggaaatatgctgacaacaagtggtgtggaacttgaagaagactttaaactacttgaagagcttggatttgagataacttattcaattgatgcttaa

SEQ ID NO: 2086 - DNA, 714 bp, Methanobrevibacter ruminantium
  source 1..714: mol_type = genomic DNA
atggatgaaagaggtaagaaataccttctaaaggaagatagagaattccaaactgatttgggaattattaaaaaggaacagatggaaagggcaacaattggagatacaataatcactcatttagataaagaatttaaggtcataaagcctacagtcaacgatttcattgaccttatggaaagaagatgctccattctcattcaaaaggatataggaactgtgctggcaagaacgggattaggtgcaggagacagggtcatcgatgcaggaacaggagccggtgcaatcgcattgaactttggaaatgtggttggagataagggtcaggtttacacctatgaaatcagggaagactttgcagagattgcaaagagaaacattgacaactttggaataaagaacatagaggtaaaaaatcaggacatcaaggaaggaatcgatgaagaggagattgatcttgttttcctagaccttccaaagccatttgaaatttttgaggatgttaaaaaggcccttagattaggaggatggcttgctgtctatgccccttatattgaccaagctgaagtggcttatagaattgcaaagaagcttgatttcagagaccttacaatccttgagacattagagagggaaatggaaataaggcctcaaggaacaaggcctaagacaagaatggtgggtcatagtggctatttggttttttgctcgtaa

SEQ ID NO: 2087 - DNA, 2529 bp, Methanobrevibacter ruminantium
  source 1..2529: mol_type = genomic DNA
atggttacttatatcgaacatcctttaattaggccaaatgcagcggaagctaggatttatcagcaggttttagctgcgaatgtattgaaaaatggaaatactatgattgtagctccaaccgctttaggtaaaaccatcatagcaatactggtagctgcagacagattgcagaaattaaaaggttcaaaggtactcatacttgctccaagcaagccacttgccatacagcatgaagagaacttcaagcactttctaaacctgccttgcacatctatcactggtgccgtcaagacagatgagcgtgaaaagcgttgggatgcctcttcaatcatctgtgcaactccacagactatcgaatctgaccttctaaatgagcgctacacccttgatgatgtttccctgcttgtctttgacgaatgccaccatgccgtaggctcatattcctatgtctatcttgctcaccgctatgtaaaggagtctaataaccacctcattcttggattgaccgcttcaccaggtcatgacaagtctaaaatcaaggaagtttgtgaaaatctattcatacaggacatcaccatcaagactgaagacgatcctgatgtcaagccctacttcaatcctatccaaatcgactgggtaagggttcagttgggagaggagcttgaaaagataagggatcttgtcaacaaggcattgaaggttcgtcttaaaggccttaagtctcttggggtaatcaatacggtctctgtaacaaagcgggatgttctcaaggcaaggtcacgggttcaaagaaagataggtcagtctgtaaatcctcctaaggagtgcttccaggcaatttcaatcctatctgccgtaatcaaccttcagcattcccttgagcttcttgaaacccaaggggtagtgccattcaatgactatataaagcgccttaggaagaagaccacaaaggcagcaaagaacatccttcttgaccctaacttttcaaaggcaatctattttgctaaggaggctgaagaaaagggacttgagcatcctaagatgaataagctagttgaacttctcaaattggaattaggtgttgatgaggctcagaccagactcacttcccttagaaacgactcagactcttccatggatgagaaggtgaaggaggacagcccaaagataattgttttcacccagtttagagacaccttggacatgattcatgaaaggtgtgaaagggaaggaatcaaaagtgttaggttctttggacagggaacaagcgacggcaagaagggccttacccaaaaggagcagaagaagattatcaagtcatttaagacaggaaattatgatgttctaatctctacaagcgttgcagaggaaggaatagacatacctgcagttgaccttgtcataatgtatgagccggttccatctgaagtcaggatgattcaaagaaggggaaggacaggccgtaaatcctctggaaggatgaaagtattgatcactgaaaagacaagggatgagggctactattggaccagcatgaggcgtgaggacaagatgaagactcagcttgcaactcaagaggccatcgaagagcttaagctcaatgcagtggagaagatagaggttgaaaagtcagctaaggatcttggcaagagggaaaaggtcattatcgaagaccctagagatgatgacagcagcgacaactttgaggaagaagcaaagaatgaggacattgaagagataagccttgaaaacgacaatgaagagaagcagaaggaattgatggaaaaggaggccaagaaaaagcaatctttggaagattccattattgaagagcttgcaaagtcatcaacaagcgatgaactggtggtttatgttgactcaagggaaggaaattcaagggttataagggccttggacaccataggagtcaaagtaaaggtcaatacaatggcagttgcagactatcaggtaagcgatgatgttgcaatagaaaggaaaactgcaagcgactttgtagattccattgttgataagaggctcttcaagcaggctaaggccatgatggaagagtttaaaaagcctattcttatccttgagggagatgacttctataccggtttcataaatccaaatgcaataaggggatcaatggcttccattgcaatagattatggaatcagcataattccaacaagaacccctgaggacaccgctgcaatgattaagagaattgcaataagggaacagcaaggtgaaaagaagagcatacagataagaacagagagaaagcctcagaatctttgggagcagcagctattcataattgaatccttgccaaacataggaccagtccatgcaaagaacctccttgagcacttcggttcagtgaaggctgttctccaagctgacgaaaagcaattgcaggaagtcgatggaataggtaagaaaacagctaaaagcattaaggaagttgttgatggcaagtatttgtattttaaaaagccagagaagaatgagaaattgatttaa

SEQ ID NO: 2088 - DNA, 15201 bp, Methanobrevibacter ruminantium
  source 1..15201: mol_type = genomic DNA
atgaaatttgaaaaaataagtatgttgatatcaattgtacttatatctctcattgctttaggtgcagtaagtgcagctgacgacgtcgctgcagatgatgctgttgccccagcaactgtagatgaagttcaaacaattgataatacaataacaaatgatgatatatcatatgagtctactgacataattgttaatgatactggcgactcagctgattctaaggcaaaaaccacttcccttagtgcaaatgcagtaaacgaaggggaaactttgtcttttacacaattagctgctgatgtctcttccagtccttcaatgttgtcaggtgcttattataaatatgatccatcaaccgacactgcttttgaaaatggtatcactcttaccaatggcttaacaatcattggtggcggtgcgaccattgacggggataatcaagcaagaatattcaatatccctgaaggagttagcgttaccattatgggtgtaactctcataaacggtgctgccgatgaaggtgcagctatttataactccggcaagttaactttaatgaatgctaaagttaatgacaacacagcagtcaagtctggtggtggtatttataataatggcggtgaagtattagtaacctccagtgaatttgatggtaacgatttaactgacagaacagttaatggctatggtggagcagctatttactccaatggaggttctgtaaccataacagatacaaatgttaccaacaaccttaagaacatagttcacagaggaggaactggtacttacacaggtgacttaagtagtgctgctgttacaagtaataacgctgatttaactgtaaccaactctcgttttattgctaacagtggttcctacggtggtgcaatttactctggtgagagcacttctgcaaatttattagtaagcggatctacctttgaagacaactttgcattcaatggtggagctattgatatagttggaacttcctataccatatctgattccacattcaaaaacaataatgttaaaggaactggtagtaccaattctaactacgcaagcggtggtgcaatctgtgttcaagatgcaaataacccaggtttaatctctggatgtgactttgaagctaactccggagtagttggcggtgctgtcaattgtgaaaacactatggttttagattgtactttcactgataacactgcaaattcagcaaactctgaaacctttaatggaaaaactaataatagaggaggatttgccggtgcaatttacaatgaaggaacaatcacaatctctgattgtgaatttgatgacaatgccggaagaggcgaaggtatacgtgttaaaaatgcggaaatttctgattcttcattcacaaataccagaattgacacatgtcaaaattctaatgttcttttaactaacaacacctacaataatccagatagagatgttcaagcagcaagcggtactcaagtaactgtagatgtggcagatggtgatattcctaatgctaacactgctccttatattgtaggagatttaactttcactgatttacaagcacttattgacagtggatcaagtggtatcagattaaccggaaatgttattaaaactgctgaagaggaaactacctttgcagacggtttaaatgttgataaaaccgtaaccatttacggtgctgaaggtaaagtaatccaagctaatagtggtaaaatcttcaatgttgctgaaggaaaaaccttgacattaagaaatgctactttacaaggttctggtgaaactgctatcaccaattatggaacagtttatttatatttggctgacaataatcaattcactgactgtggagatgttttaattgataatcatggcagaaccactgaaaccggtcttaccactttcactcaattaaataatcttattggtttagtaaatggtggaacagtatatattggtgagtctaaaatcactaaagctgaagatgaaaaagaagcttataaaaatggaattgttatcgataaagaccttagcatattaggttcatacaacacttattataaatatgttaagacttccatcaatgctaacaatgatggaagaatctttactgttgctgaaggtaaatctttaagccttaaatacatcaacgtaaccaatggtgctgctgatgaaggtgcaggtgtttacgtatctgaagatgctaccttaattgcagatactgcaaactttattaaaaacaccgctgtaactaaaggtggagcaatctactctgaaggtactgttgacttaactaatgttaacattaaaaataataccatcagtaaaacagatggagttatggctgatgataacggtggtgcagctctctacaataatggaggaactgcaacattagataaggtcaatgttacagacaaccaaaaaacatatgttatcggagatatcatggatggtgtagttgtatctaaaggtgctactactattaccaattcttacttcgctaacaactctggccgttggggtggagctatcactcaaactggcaccgatcaaactttaactgttgaagacacaatatttgaagaaaacacagctatctttggtgctgctattttcgataattcccctcttgttgtaaaagattgtaaattctacaacaacagtgctatcggtcctggaagtccaggtacttcaaacagtcaaggtgctgcaatattagtaatggatgacactgcttctgcagatattagtggttctgagttcattaataacactgctgattgcggtggtgcagtaagcttagcaggtgttggatctgatagtagtattgatgattgtacctttattgacaacacagcttatgctgatggtggtgcagtatacttctggactgaaagtgctagcgtaactgtaaccgattcagaattcataagtaacactgctccatatggtggtgctattgaaaatgaaggtcttggcgatttaatagttgatggttgtgagtttactgaaaacactgcatccttaagaggaggagcaataatttcaagtggagacacaagtgtttccaattcaaagttcactgataatgaagcttcaggaaacaccaatgcaatatacctttataattctggttcatcattatccttatccaacaacgttataactggtagtgatgatgcacaaatctatgtaaaagagggtattgatgttgtaactccattgaaagttaaaatattaaacaatgaaactgtaaacattaatatggttccatatgatatcacggctactgttacagatgataaaggcaataatattgttgatttagcattcagatttacagtaggtgatgatgtagtcgatggaattagtattgatgctgcaactggtgtatacacagcaacatttactcctactcaagctggagaatttgtagtttcaaccaatcttgcaaatgctgatgaagttcaaactggaactttaaacgtctttagaactttaactgacttaaaagcaatcatagatgcaaacactaatggcactattgacttggatggtaattacgcttacaatgcagaatttgacagtgcattaacagatggtattgtaattaataaagatatcgttatcaatggaaacggattcactatctgtggtgaaaactcaacaagactcttccatgtaaccagtggtttccttaccttgaaaaatgcaaccgtttgccatggtgctgctgaaaaaggtgcaggtgtatatgtagaccatggaagtaaattatctactgattatgtaactttcactgaaaacactgctgtaaaacgtggtggagcaatctactctgaaggtatggtatacataggcaactctgtattagacagcaacaacatcactttcagatctgcaaacgatgacaacggtggagcagctgtttacaacttaaacggccaattaacaatcgaaaaatctaacattaccaataacttaaaagacattgttatccgtaacggcaatgcaggtgacttattggttggtgtagttgtaactaccggcgacactttaattaaagactcatactttgcaaacaacacaggatcttggggtggagctatcagttcattaggatacatgaacaccgatgattacacattaaccgtaaaaggcactacctttgaaggaaacaacgctaccttcggtggagcaatctttgtagaaagttccaaccttgttgtagatgactgtatctttaacgaaaacactggtgtaggtaaaggaagcgatggaacttccaacactcaaggaggagctattgttgtacaccctactggatcaaaagctactatcaccaattccaaattcaacaaaaacagcgctaatactggtggtgcagtaagcctcgctggtgtaggccaagatagccttattgaaggatgtacattcactgacaacactgcaaatgatggtggagctgtatacctctggactggtggaaatgctattgtaactgtaaaagactcttcattcagcgacaacacagctaatttcggaagcgctatttctagtgatggtactttaagcttatcccacaatgaaattgcaaatgattacaccattactccaataggtagctatgatggaacaattgtatcagcgatttatgtaaccacattgaatggcgaaactatcataactggcaatccaactcaaaatttaactgctacaattactgatgataatggaaaccctatcgtagagaaaggccttgtcttagaagtatacggcgaagaagttgaaacaagctatgataaaaccactggtattcattctgcaattcacactttcactaaaccaaactcttacagaataactgcaaaaggtttcgatcaagatcatactactccaggttatattgtttacactggaggaactttcaatgaattgcaagacttgatcaatgcagctgaagaaggagcaaccattaccttagaccacagcattgtatacgatgaagaatttgatggagtgccattccttgatggtattacagtaaataaaactgtaacaatcgttggtgctgaaggtgtggaaatctgtgctaacaatttagcaagagtattcaaagtaactgatggagcaactttaaccttaaaagatgctaccgtttgtcatggtactgctcaaaaaggtgctggtgtatatgtagatgctggcgcaagcttaattgctgataatgtaacattcactaaaaacactgctgtaaaacgtggtggagcaatctactctgaaggtatggtatacataggcaactctgtattagacagcaacaacatcactttcagatctgcaaacgatgacaacggtggagcagctgtttacaacttaaacggccaattaacaatcgaaaaatctaacattaccaataacttaaaagacattgttatccgtaacggcaatgctggtgacttattggttggtgtagttgtaaccagcggcgaaactttaattacagactcatactttgcaaacaacacaggatcttggggtggagcaatcagttcattaggatacatgaacaatgaagattacaccttaaccgtaatcggcactacctttgaaggaaacaacgctaccttcggtggagcaatctttgtagaaagttccaaccttgtagtagatgactgtacctttaacgaaaacgctggcgtaggtaaaggaagccctggaagcgcaagtactcaaggtggagctattgtagtattccctagtggtactaaagctactatcaccgattccagattcaacaaaaacagcgctaatactggtggtgcagtaagccttgctggtgtagaccaagacagccttattgaaggatgtacctttaccgaaaacactggtaatgatggcggagctgtatacctctggactcaaggagatgcaaccgtaactgtaaaagattctaccttcactggcaacactgccggctggggtaatgctatctcaactgacggtgcattaaaattagaaggaaacacaatcagttcaaccagtgcagatgttggtaactgggcgggtactattgattccaaagtatatgctcaaatcttagctaatgatacatacaactggcatatgggaggattcgtaattaacgctaccttaactgatgatatgggtaacttaattaacgaccacaacttcaactatgtaattactaaagaaggcgcaactgattctatttcagttcctgcaactttctacactagtttaggttactaccaaggcactttcactcctgctgatattggaacttacttgattagccttgattatgctgttgaagaagtaaacacttcagttgtagttgtatccagatctttaattgacttagcaaacatcattgctgctgatgaagatggcatcattgacttggacgatagctatacttacattgaagaattcgattcaagcattgtagatggtatcgtaattggtaaagatgtaactataaatggtaatggacacactatctgtggtgatgataaagcaagacttttccatgtaacagataaagctttaaccttaaataatgtaactctttgccatggtaatgctttaaacggtggtgctgtatatgttgaatcagctgctactttaaatgctaataatgcagaattcaatgaaaacactgctacttaccgtggtggagctatttggtctactggtactgttaatgtaaaagattcatctttcgacaataacaatatcacttacagagcaagaaatgtggataatggtggagctgctatctttaacaatggcactttaaatgttgaccattccaactttacaaacgatcttgtaggttatgttgtaagaactggagacactaacagccctcaattaatcgatggtattattttaagctctggtgttgctgtaatcaataattcccactttgaaaacaacagcggtacttatggtggtgctataactgctgtacctatagctagtttaggttctacagctacttccttaactgtagaaaattgtgaatttattaataacttagcatactgtggtgctggaatttcaattaatgctgacggcaacggcaaaaccacttattctattaagaattctactttcataggcaataatgctacaggtgtaggcagtactggttctacaagcgcaggtggagcaatatctatagctagagattccgaaggtaccattacagattccaaattctacaacaacaccgctaccactggtggagctattgatgtaagcgctaccagaagttcttcaaaagtgacaatcgataactgtgactttgaaaacaacactgctacagcaggagatggtggagctgtacgcattagcaaaaacaatttggaagttgctgtcaaaaattccaacttcacaaacaatgacgcaactggtgatggtgcagccatttacaacaatggcgttttaacattagaaggaaacaaagtcacttccggtgaaaccgaaatctatgtaggtcctaatggttcagttgttaactcaattgtcaaagctatattcttaggagatgcagaagacaatacaattcttgctttccttggtgatgaagtacatccatatgctactttaacagatgataatggcaatgcaatatatgatgtagacttcaacatcactgttgacggcgttgaatatgaaacatcctatgatgattcaactcaacaatatactgctacatacactatcttacatgctggagacaatattgtaagcactaactatgatgctcaaaagaccgatggtaaatatgatgttcctaaagcaaacgcaaccattgtcgtaactactgaaagcattagtgtaggagacaaggctactgtaaacatcaacttaactggtacagatggtgtcggcttaaacggaactgttaaaatcactatcaataaggcattcactgatactgtagtaactgaaaatggtattaatgtaactgaagttgaaggattagaaattggcgaatacttcgtttacgtctacttcgaaggcaactctgattataaccctgaatacaactacactctattcagagttaccggtaatgtatcctacttcaatgttaccattgaagatgtaacctatgatgatgctgcaactattaaggtaaccgttcaagatggtcctatagacgatcctgacaacggcgtaactggcattgtacttgtaacaatccaaggaaaagatgtaaactttgaaaatacctatagcgtatctgtaattgcgggtgaaggatcatacactgtagaaggccttgcacctggtaattactcatatgctgctaaattattagcagatgagctttacaatgaagcttatttagaaccacaaaacttcacagtattcgaaaacccatactctgaattagaagtaactgatgacggccctattgcatctggtgaaactgtaaacattacagctaccctcactgacttccaaggcaaccctatagaaggagctaccttagaagtatatgatactggcgtatggattgctaatattactaccaatgcagaaggtattgctgaaacttctattgataatttaggatatggtcttcacgacattactgtaatattcaatgacactgtacacgatgtccaaactgaaaccgtaactgtatctgtaactcctaagaagggtactttcacagacttgcaatacttaatcgacactgctgatggaagattagtcttgccatacgacttcgcatttgatgcagcttatgatgaacaattcttcttaacaggtgtgcttgtagacgataacattattatctctggcgctggacatatcattgacggtatgaaaaaagcaagaatcttatacatcaatgctcctaatgtcaagatattcaatgtaagctttgtcaatggtaaatctgatgtaggtgctgctatttacaccgaagctgattacttacttgtagacagctgttacttcgcaaacaacgaccctgaagctggtgctgcaatctatgctgaaagcggtgtaactgatgtagaagaaactatcttcttcaataacactgctgtaaacggcggtgccatatatgttgaatccggtgctacattaaacgttgctgattcagaatttaatcaaaacactgcaacctaccgtggtggagctatttggtctaatggtactgttaatgtaaaagattcatcatttgataaaaatgatatcacttacagagttaaaaacgatgataatggtggagctgccatctttaacaatggcactttgaatgttgtcaattccagatttacaaataaccttttaaactatgtcataagaactggagatgataatcatcctgaattagttgacggtgttattttaagctctggaaaagctaaaatcagcaattcccactttgaaaacaacagcggtacttatggttctgcaataactgctttacctataggcactgaactcagtgatttaactgtagaaaattgtgaatttataactaacttagcatactgcggtgcagctatctatgtaggtagtggtactacattattctacattaatgactgtgttttcataggcaataatgctacaggtgtcggcagtaacggatatgttgctactggtggtgctattaagatagctaagaaagctactggtataattgcagattctcaattctataacaactctgctgctaacggtggagctatagatataagtgctactagtggtaatactgcatcagtacttattgatagctgtgtctttggatataatgttgcagatcaaggtggagctatctacattgataatagaactacagtaaacctttatgactctacattatactacaatgaaggtgaagctctcaattaccacatcttcttaaatggagatgcaactcttggctttgaaggtaataacttctatacaacaatacctaccattgtagcagaagacacctacgcttacggtgaaaccataaccattaatggtacattcgattggggagtaaacaacaaacctatcaatatgatttacaccattaacggtgcacctggcactgcagaagtagttgatggcaattacacaatattaattgacaatcaaccagatgtaggtgattacactattgtaattactgcatttactgatgaaaacggaaatgtataccatgtagaaactgctcaaaaaacaattagtgttactaaagcaacccctatcttatctgttgaaggtgatgaatacttaatgcctcctagtgatgatgctactgttaccatttctcttaccgataaagatggaaacggtattaagggcactgttattgtaactgttgctggtgaaacctacttagttgaaactgatgaagatggtgacggcgagctcactattaatgacttacctgctaccacttgggccattgacgctaaattcataggcaacgataactataatgaagttgtaaacgacactgaagagattaccttcatagctgatgttgcatacttcgacataattatcgaagacggtgtttacggcgataagcttactgtcatagttgaaaacgcaactgacattgacggcaatagcttaactggaatggtcacaggcatgatttctacaggcgatgatgacatttcattcatagtatatgtgaataacggtcaaggaaccaacactaccactactgctggcggagttggtaaattcactggagatgcatacttctatgattcaatgatggaatttatgtccggccctgaagaatgcagtgcatatgtaagcccagctaatgctacattatatctagttccatgggatgcagatgatctatcatcagacattgcatatggcgataccatagaattcggcgctgccgtattcggtgtaaatctagaggaattaaacggtactgtatattacatcataaccgaattaaataaaaaaggtgaaattgcgattgtaaacggatctggtgctgtaaacctcactgatattttagatgtaggaacctacactgtcataagctacttcgtagatgacaaaggcaactacgacccagaatcatcagttaactacactaacttcaaagtggccaaagcaacccctaccttaaatgtagagaatgctcaacaagtatatgctgataccaatacaataacattcaatgttacaggcattgatgataaaggtgttaaaggtactgtaattgctattaaacctatttcagaagatgtgtctggtgcaatctacgatcctgaaaccggtcttggagaattaacattcaatggtttagttgtgggcgacaatccaattgtagtaaaattcttaagtgacgatgataactatgcaaatgcagaaaagaccattaacataactatcactcaagctacacttgcaatcgactctacaataaccactcaagaaattgtatatggcaaagatgttgaagctgatgtaaccgtaaccggcatagtccaagaagatactgtaattgcaaatgtcagtttatacgacaacgctactggagaattattagactcctttaacattgcccttggcttggaagacagcatctcattcgaagacttagaagttggcgactactactacacaatcgaatttacaagcgaattatacgctggagacaacttcacatctgaagtattcactgtaaacacagccgaaatccttgatttagattcttccaatgtagacaatgtatcctacggcgaaggaatcgacataaccgtatatgtagatggaatgattgaaggagacctcattgaagttaacttcactgtagttgacgcaacaaccggtgacgatgtattcaatggaacttacaacatcagcaacggtgatgttatcacagttcctccattagatgtaggtaaatacagctatagtgtctcattctatggagatgataaatataacactggcggtgcagattccattgctgctgtcggaagctttgaagtattggatatgtctgatgtagatgttcttgtcactgcagatgaaagcatcacttacggtgaaaaggtcactgtagaaattgatcctatcgtttctgaaggtggattacctgtaacaggtactgctaccatttatgtatatgatgatccagcatctgtagatcctgtatatgttttagctgatgtagaacttgataaagacggcgctactgcagtccttgataccatattgcctactggcgaatactggattgttgtagactttgaaagtgatgatggctactatgatggcagaggcgtaacttcaaccattgttgatttagctctagctaaattatccatagaccctatcactgttacctatggcgaaaccatccctattactgtaacagctcttggcaatggcggtgaactattaaacggaaccgttgaatttaagatttacggtccaggatttgaaggaacagtcactgtcaaaaatggtactggagtaaccaatattacagaaaggtttgatgttggaacctacactatcatagctgcatttggagatgatggtgctaattacgaaggattcaacattacttccttagaaatcactcctgctacccctatagtccgtgtaactggaagtgaagttgaatatggcgaacctagcactgtaactgtcagtgtaagtgacattgatggcatgccattatccggtaaagtaatcgtaactgttgactgggtcgttgacggtcttacccaagtaattgaccttgacgattccaatgaagcttcattcgatctcagcccatatgtccatcaaggaacatacgatgtaactgtaacctacattgcaaacggcaactacggcgaagctgtaaacgacactgaaacagttaatgtaactgcttccactaccgctacagttaacgttgaagttccagaggacgtatcatacggcgatgaactaactatcaaagtcactgctgaagacggcgctggcgaacaaatccctctagaagcagtcaatgtaactgtaaacggtgaaaccaaagaataccctgtagatgaaaacggcactgtaaaccttggcgtattgcctgcaggagataatgaaatcaccgtagctctcgatgacggtactcacaagcctacaaaaactgaagctacagccaaagttgctcctgctgaagctgttgtatttgttgacactgacaatgataacccaagctatggagatgtcgttgttgtaactgtcaatgctaccaacaaggacaaacctatagatgccgatgcatgtcttgttgtagacggctacttaatcggctactacgatcttgaagacggccaagttgaaatctctattaaagacttagcccctggcaaacatgaaatcgaggtttcagtcgcaaacggaaactactctgaaggtagttacggacgcgcaattgtcaatgtagataaagcaactcctgtaatttcagcagaaggcgaaacagtcgaatggggtgaagttgcaactgttaaagttaatgcaaccggtgcaaacggcgaaaaattaaacattcctttagtagtaagagtcatctgggaagtatctggtgtcgatgaacttattgaaattgaaaacggcactggagaagctgctttccaaatctccaactatgttgctcctggaacttacaatgtaactgtcatattcttaggaaatgatgaatattacccagtaaacaacactgaggctaagattatcttaaccgaaccaaaaactgttgaaatggaagtatccatcacccctgacgaatacggcaaagctacaaatgtaactgtaacccttaaggacgttgcaagcaaaccacttgaaggctcaactgtaaccgtaactgtagatggcaaagaatacgctaacgctacaatcggcgaagacggaaccgtaaccgtccctgtagaaggattagaagctggcaaccacactattgctgtcgacttcgatgacggtgaacactcccctgttcatgaggaagaaaacatagcaattgaaccatcaactgatgctaccgttgaagctactgtaaacgtaggcgaaaacgaaaccactgttgatgtaattgttaaggattccacaggtgaaggcataaatggtactgtaattgtctatgtagacggcgaacctgtcgctaacactacagttggcaatgacacttcaagcgtatccattggccaattagctcctggcgaccacacagttgacgttgaatttgtaaaccctaactatgctccaacaagctactccactcatgtaacagaatctacttcactcactaacatgacagttaaagtagacaagaaaaatatcctctatggtgaatcagacataactgcaaccattgaattcacctcagaaggcaaagctcttgacggtgtagttgaagtattgttaaacggtgaagcacaaaacgtaactgtaaccggcggaaaagcaactgtaaaattcagcgacttagctgcagatcactacactgttgtaagtaacttcgctggaaacgctacatacgctccttcaagcgactcagcaaacttcgtagtggaaagaaaagcaaccaagttcaactacaacgacatgaataccacagcagtcaaccctaatgttgatggaagaatcggcgaatacttctacttccaattagttgaccaagacggaaaagcccttgctaacaagagcgtatccatcggattcaacggaaaagtatacaaccgtacaaccaacgaaaccggttgggctaaactccaaatcaacttaagaatcgtattcggatacacctttgcaatctcattcttaggagacgacaactacacaggcgcattcaatgtagccttaatcaacgtaagcgctcaaactcctaagctatccacaagcagcaaggtttacaaagcctctgctaagactaagactttaactgcaaaactcttaacaagctctggaaacgtggacaaaggtaaaaaactaacatttaccgtaaacggtaaatcctactctgcaactaccaacgataaaggtgtggcatctgtaaaagtaagcatctcccagaaaggaacttacagttttaccgtcaagaacgctaaagacaatacatatgcctctgtatctaagactgcgaagttagtaattaaatag

SEQ ID NO: 2089 - DNA, 1794 bp, Methanobrevibacter ruminantium
  source 1..1794: mol_type = genomic DNA
gtgtttaaattgcaaagtttagagctctctggtatgtctgatgaagaattgaaaggtcttaacttagagggcaagacctttggcgtaattggagtatgtggcgtagttggaaaccttgttgctcgtatcattatggataacggatatgaggtaatcggtacagacatctcatctaaggaagattgcagattctattcatcctttgatgattatgatattgaaatattctttggaggccatccagatgaattctttaagcaaatagactttatagttccacctccaagcatgagtgatgatgctaaggttttagagcttgcaagagagaaggggattgatattcttcatttaggagatatttttaagcttttcaaggcaaacaaacctattttatgcattagcggcactaatggaaagaccaccacaacaactcttttaaagcatattgcatattccaatggaataagccctgccgaacacaatcttaaggggatgcagggaaacaacgaatttattccatcacttcagacaaggcttcatggggatgtggctattttggaaactggaacagacggcactcctggcggattgaagtctgtaatcgatttgacccatccaaattatggaatcttgacgaacatcacaatcgaccacctggttgaccctgatgaccataaggacggcgttgatgaaagtctaagcgcaatttcattggatattggtgacgatgaggtatcccatatcgacagaggatttcttgaatatgcgagagttaagggtgagcttatagagggaatcgaagaaaacgacggcctattgatttacaatagcgacgatcctaccattgtagggcttttggataagttgaactacagcggcaaatccattagctttggggtggaaatcgatgaattcgataattttgagttggaaatcgatgaattcgattttgattcctcatttgattctgtttcccctatcaaaatccacacaaagccatgctggtgcggcagagatattaagatatatgaaaccatctcaggcagcggattctatgaatgccagtgtggaataaagtatgaaaagcctgtttacattgcaaaggatatagatttaatgaatcgcagcttcaatcttgcatctcgagacgatgagtttgaatttaagctgacacttgatggacttcataatgtatacaatgcagttggagccataatcgctgcaaaagagtttttaggcctatccaatcaggatattcaaaaaggattgtccacattcaaaggtgtggctggccgtatggagataatcgataaaatagaagacactacaatcatggtggattatgcccataatcctgcaggggtcgagaccatattggatgccatatccaagatatatgacaagacttgtgtagttattacagtcagttcggagtcaggggttgaaggggacttcgatatacttgattcagctattggaaaagtggattatattgtccctgcttcacatgactgcaggtatgctgccgataagcttattgagttgacaaaggaaaacaggcaagaagaacttcatttaaatagtgtttatactttagatgagctttgcaagacttttgtattgacagatgaggatttaaagcaggaatccattaaaacacttggagcaagcgaagaccaggtgataggaggacttaaggaggcattgaaccttgatactgatatcattctcatcatcggagaagctgcatttaagtttgaatcagctattaaagacttctgtgatagtctttga

SEQ ID NO: 2090 - DNA, 1497 bp, Methanobrevibacter ruminantium
  source 1..1497: mol_type = genomic DNA
atgaatgttattgttgtaggagcaggaaatgcaggtcgtcctgttgcaagattattaaattatgctggccacacggttaagataacagatcccaagaacatagaagacttccatatggatgttcaaaagacattaaggcttatggaaagcgaaggagttgaattggacttaggagtattcaagccaagtcttgatggaatagacacagtctatctctctccaacagttcctgaaaactctccagcctataagatcattaaggaagctgatttagacgtattcaccaatgatgactttggcagattggcagacagcttcattgacattgacataatcggaataaccggcagcgtaggcaagaccagtaccacccatatggtgactgaaatattcagaactgcaggttatcaggtttggatctgctcatctatgactcaaaaccttgtaagcgaagtcattgtagacggaataatcaagggaattcctgaaaagtctgacattgctgttcttgagcttcctcatggaacagccggccttatggcagagcttaagcttaaggttggagcactcttaaacatatatgaggagcacctttcagagttcggtggctctatggaaagatacacccaaaggaagatgttcattgccaaaaacagcgaaaacttcattacaagcattcactgcaaggacaccgtaaaggaagcaagacctgatgcaatcttttacgcaatggttaaggacctccctgcttatgacccatccaagaaatcactcttctttgacaagatagcaaactttgaagagatagctatcggagaaggccaagtatgcaatttcattggagacagtgctaaaggcgctattgaaattggctataagtttagaaacaagtcaaatgagcttagaaaaggaagcttccagtctgagttccatatgatgagctattattatgagaatgcggtggcagcaactgctatagcaatggcatatggattaagcgtagagataatcaaggaagggcttgctaacttcaagggtctttctgtccatatggagtatattggagactacaatggtagggaagtttatattgatgcatcatatcttattgaaggtattacagtcgctcttgactttttaggagataggagtcttgttctgcttctggataactttgatacttccacttacagagataagaaggaaaccggtaagcttatgggcaaatatgctaatgtcatggttgccacaggatttaatgaggtttatcaaagggtagatcttgagcctgctcaagagctattggatgcagctgttgactcagatgcagttaaagttatagctggaaccatgcaggaaggggctgagcttgcaatcaagtattcaaagccaggagataccattcttcaccttggacctcaattgatgcaggaccctgaaggaattatggaaaagatagttacaggccttgaggaaggttgtaagaagtacaaatga

SEQ ID NO: 2091 - DNA, 972 bp, Methanobrevibacter ruminantium
  source 1..972: mol_type = genomic DNA
atgaaacgacccaaaaaaatgtacaatccagaggacatgtttataaaaagaagcaatacataccttggaagagtaatgcatagttttcttaaactcccaggcagatatgtaaacagcagaacaaaccaatatcctgacttttttggaaaggaaagaaaaactgatgcaactatattagttgatttggaattagaaatggaagaatctgaagttctagaaagctcatatgaagtttttgtaagtgaaaaggaaactgaagagatccctcaattagcagaatgcctccacaatgaaaaaggaaaaatgattatcgacattgaagatgaaagttcaaaagtagataaacagactttagcaaaagattttgaatataattatatcattcattatgaatcaggattaccagtttattctgtcataacaacccctattccattaaaaagatgtaagacatgttacatatctggaaataccgtctttaagccaattataaaatcttatgatgaaatggatggtgaagctaaattaaaagaatttcaagaaaaatatgaaagaggagaatatttttctgatttggaagggtatgaactaatcagcatccctagaatgtatggtgaaaaaggaaatgaggtcattgaagaagtttgcatcctatttaataaaataaaaatgaaaaatggaagagtgaaaatacaattagcaagatgtttagactgccttataaacaaatatggcggaacattagaagaaataaatcgcttagaaggactgataaacatgacaaaactaataaatctagaaaaagaatatgaagatagactaagacaagaaggagaagaaaaaggaagacaaaaaggaagacaagaaggaagactagaaggaaaactagaactagcaagacaatttgttgaagaactaggtgtggataaagtttccaagatttctaaaattgaaaaaaatcttttactataa

SEQ ID NO: 2092 - DNA, 354 bp, Methanobrevibacter ruminantium
  source 1..354: mol_type = genomic DNA
atgtatggccaaaaaggaaatgaagtcattgaagaagtttgcatcctatttaataaaataaaaatgaaaaatggaagagtgaaaatacaattagcaagatgtttagactgccttataaacaaatatggcggaacattagaagaaataaatcgcttagaaggactgataaacatgacaaaactaataaatctagaaaaagaatatgaagatagactaagacaagaaggagaagaaaaaggaagacaagaaggaaaactagaactagcaaggaaacttgttaaagaatatggtgtagatgaagttgtaagaataagtggcttaagcaaagaaaaaatattaaatgaaaaaaattag

SEQ ID NO: 2093 - DNA, 1236 bp, Methanobrevibacter ruminantium
  source 1..1236: mol_type = genomic DNA
atgtttttaactaatgaagaagaaaagatggctaatggagaatatggagagaccattagaaaaagcatggacatacttattgctttaggagacatttatggtgccgagaagttcgtagacattaagtctgcgcaggtctctggagtgtcctataagactataggtcaagccggacttgaataccttgaagaccttgcaagcacttctgaaatcatatataatgaaaatggcacaatcagcgataaaagcgggatagcaacaatctctgctacacttaatcctgctggaactgaccttgacaactgggaggactttggttttccagctgattttgctcgaaagcaagtagatatctgcaatgcatatggagctctaggaataagcacaacctgtacctgcactccatatctcattggaaatgttccaaggtttggagatcatgtttcctggtctgaatcatctgctgtggcttatgtcaattctgttattggggctcgaaccaatcgtgaaggaggtcctggggcgcttgctgcagctattgtgggaaaaactcctttatatggcttccatttagaggaaaatagaaaggccaatcttcttgttgaagtggaatcagagcttgagagagccgactttggcgctttaggctatgcagtaggtcagatagttaaagatggaattccttattttaaaatgcaaaacaaaccttatgaggtatccaatggcaatctaaaggcacttggcgcagcacttgcttcaagtggtgccgtagcactttaccatgtggaagatgtcactccggaatttgcaaatgcagctattgatgatgtggagaataagattacaatcactaaggatgatatagtaagtactagagagaaattatccactgcagatggctatgcagatttggtttgcttaggctgtccgcatgcttcccttgaagaggtaaaggaagttgctgagatagttaagggtaaaaaaattaaaaatgagctttgggtctgcacttcaattaatattaaagaggctgctaaacgtttaggctatcttgagacaattgaaaaggcaggtggtaagatctgctgtgatacatgtatggtagttgctcctatcgaacagatgggctatgaagtgattggagttaactctgcaaaggcagccaattatgtcccttcaatgtgtggattaagggtaatttataatgatatagaggatttattggactttgaatag

SEQ ID NO: 2094 - DNA, 960 bp, Methanobrevibacter ruminantium
  source 1..960: mol_type = genomic DNA
atggatattggaaaactagttggaaatacaccaatgattaggattgattatgaatacgaaggaaaaactggcagtatttatactaaacttgaattttacaactattctggaagcataaaggataggatagcattatatatcattgaaaaagaaaaggaaagaggcaatcttaaggatggccaagcgattatagaggttactagcggtaatactggaatagcattcagtgcaatcggtgcgctatttggccatgaggttcacatattcatgcctgattgggtctctcttgagagaagaaagcttattcaaatgtatggagctgaagttcatcttgtctcaaaagaggacggaggattcaagaaggctcttgagcttgtagatgactttgcagatgaaatcggtgcatataagcctcttcagtttgacaatgaacttaatgtggaagcccaatatgaaactacaggccaagagatcattgatgatcttccagatgtaaatgcctttgtttcaggaataggaactggcggaactcttatgggaataggcaaaagattaaaggattataatccagaatctaaagtatttgcattggagccaagtacattatccattcttaaaatgggtatggatgaaggcagtcaccttattgaaggaatcggagatgatttcattccgggaatcgttgatgaggacgtaattgatgatattgtcttaatacatgactgcgatgcaatcaatatgtcaaagataattgcacagaagcttggtttaggaattggaatctcaagcggagctaacttcttggcaagcgtcataatggataatgatgacttgaagattgctacagtatttccagatgacaataagaagtacataactactaaattgtctgagccgattgatgaaaatcctgaattgatttctaataagattaatattattgattttgaagtggtctaa

SEQ ID NO: 2095 - DNA, 1299 bp, Methanobrevibacter ruminantium
  source 1..1299: mol_type = genomic DNA
atgcttaagaagcatatcgaaaatgaagacattattagattaatttctcataatgatgctgacggattgtcagcagcaggtgttatagcaaacgccattaaggaagaaggcggacagtttcacataactattgttcctagattaaagccggacgttatcagagacgtatctaaggaaaaatatgaattatatgttttctcagatatgggaagcgcttgtatcaagcagctcaatcgtcttaaatctgatgtgattgtagcagatcaccaccagccaagcgagcacgagccaaaggataatctcattcatgttaaccctcacttatttggaatcgacggaagtcgccatttaagcggagcaggctctagctatttagtggttagaaatatgaacaagaagcatttggcttatatggcgcttatcggtgcttttggtgatatgcaatgtgccaatagatttacaggcataaatcaactaatcttaaaggacggccaagaagctggaaacttggaacttcatgaggacttaaaaattgtttccaaggcccaagagcctctatacaaatcaattgcttataccttgaaccctgctttgccaggattaactggcagattggataactctcaagagctccttgagaaaatgggggtttcatatggcataagcttcttggatttggaagatgaggaaaaggatgttgttaaggatgagcttgtaaaggtcaatccacagatatttggtgacgtttacagtgttccaagcgaacatcctgttttaagggatctggaagagtattcatcaattcttgatgcctgtggaaagaacaaggagtatggcttggccttaagcataattttaggcgaaagagaaaaatctcttgacgaggctttaaaacttcaaaagagatatagggaagaccttaccaaaggttttgaatggatcagccgtgaaggcgctcagcaattgggcagtatccagtatctttatagcgaagataaagttttaaaaagcataatgggtacaatagcaggagttggaatgtcagctaagattctaagcgatgaaaaacctgtcattggcttgtccagacttcataatgatataaaagtctctggaagagcaaccagattccttgttgcacgtggagttaatttaggcaaggctttagctgatgcctctgttaactttggcggacaaggaggaggtcatgacatcgctgcaggtgctatgataccttatgaggctaaggataatttcttacatttgcttgatcagatagttgaagatcaattgcaatag

SEQ ID NO: 2096 - DNA, 399 bp, Methanobrevibacter ruminantium
  source 1..399: mol_type = genomic DNA
atggcaagaccagattggattatgtattctaatgaagaaatcgaagaatttattgttaagtttaaaagagaaggtaaaactgcaagtcaaattggtattatcttaagagaccaatacggaattcctagcgttaaggaagtaaccggtgagaagatcactgaaatcttaagaagaaacggacatgcagatgaatatcctgaagatttaatgaacttaattagaagagcagtaaatatcagagatcatttagaagaaaacccaaaagaccttcatggtagaagaggattaactatcattgaatctagaattcgtagattaggtagatactatgcggcaaatggccaattaccagaaggatggagatacgatccaacaaaagcagcacttctcgtcaaataa

SEQ ID NO: 2097 - DNA, 558 bp, Methanobrevibacter ruminantium
  source 1..558: mol_type = genomic DNA
atgataacatttataactgggaacgaacataaagtaatagaagcagagaatatttttcaaatttttggtgttaaactcgagcatattgatttaggttacatggaacctcaaggaacccttgaggatgtttctaaatttggtgcaaaatatgcttgccaagaattaaatagacctgtgattgtggaagatgctggtttattcataagagctttaaacggttttccaggaacttattcatcttatgtgcaagattcacttggaaatgaaaatattttaaaacttatggatggaattgacgatagatacgctgaattcaggtcagttattgggtattgcgctcccaattctgagcccaaggtctttttagggcgtgtcaaaggtcaaatcgctcatgaagaaagaggcaatctaggctttgcttttgatccgatatttttagtgccggaagagggcaagacctttggagagcttactactgaagagaaaaatcagttttcacatagaagaaactctttagagaaatttatcaattggtatgtaagccaagatgatgaataa

SEQ ID NO: 2098 - DNA, 1698 bp, Methanobrevibacter ruminantium
  source 1..1698: mol_type = genomic DNA
gtgatatctttaggaattgaaggaactgcagaaaagacggggattggaattgtagacagtgatggaaatgtattggctatggctggaaagcaattgtaccctgaagttggagggattcatccacgtgaagctgctgaacatcatgctaaatggattccacagctaattccacaggcaatggaagaggcaggccttgattataaggatattgacttaatctcattttcacaagggcctggacttggtcctgcacttagaatcgtagcaagctctgctagaagtcttgcccttagcttaggaattcctattgtgggagttaatcactgcattggccatgtggagataggaaagcttgatactggggcaaaaaaccctgtaacattatatgtaagcggtggaaacagtcaagtcattgcatatgaatctggcagataccgtatttttggagagactttagacattgcaataggaaactgtcttgatcactttggccgtgagaccggccttggacatcctggaggccctgttgttgaaaagcttgctaaagatggttcttatattgatttgccttatgttgtaaagggcatggacttttctttctctggacttttatcctctgcacttcgtgcccatgagaatggtgagagaatagaggatatttgcttttcccttcaggaaactgcatttgcaatgcttgttgaggtaacagagcgtgcactggctcatactgaaaaggatgaggttctattgtgtggaggagtttcagcaaacagcaggcttagggacatgatgaagattatggcagaagagcattatgctaagttctatatgcctgaaatgaaatattctggggacaatggtgtaatgattgcttggctaggtcaattgatgtatgataacttcggtccacttgacattaaggacactgcaatcatacaaaggttcaggactgacgaagtggatgctccttgggtagataacagaaaggaaaagttaaatcttccagaagaattaaaggcaaagggtgccgaatctgatatttttgaagcaaaatggcttggaatggacgctattgtaaagcaaagggtctctaaatcatataggataagagaaattgatgataagataagaaggcaaagaactaaaagcgaagctaaaatcctttcagatgttaaaaagacaggtataagaagccctattttgtatgatatcaatttggatgagaaatatatagttatggaaaagctaaatggacctcttgttaaggatgtgatgcataaattggattatgataaaaggaaggaattatcttatgcaattggggaaaacattagattattccatgatggagacataatccatggagatttgactggttctaatatgatcttgttaagcgatgattctaatgactctaatgatgatttctctaaatctgatgacgatttcaataatggcgttaatttagataatcttgattttgcaaacaatttagctatttttgacttcggccttggaaagtattcagatttattggaagataaggcagcagacctcttggttttaaagaaatcattccaaagcatagattatgatatagcaaatgaatgctttaattggatattggaatcttatggttccgataagataattgataatattgcagatattgaaagcaggggcagatatactcattga

SEQ ID NO: 2099 - DNA, 1065 bp, Methanobrevibacter ruminantium
  source 1..1065: mol_type = genomic DNA
atgattgaaggattaaagacatacggctcagataaaatcgtagatgaacttaaagacttaaagaatcctatttttatatgtacaatagctacaacagaaacatctaaaatcccaggacttacaggagcaggagctactccagaactgaccaaatacacacctgcaggggatgcagagcttatcctagagggagaggtcaaatgcatgaaggacataccacagaccgtcatcggagaggttgtcactccaactccttccatgattacaaaaggttcccttgccctatgcgactgtccggttatggttcttgatgccggaagcgaaataaaggcacaaactgatgtatttgacattagcgacggaaagcatggaatggacatacgcactggaaaggctgtcgaagactcagaggaactctttgaaaaaggatactctctaggagagattttatctgaaaagcatggatatatcgttgttggagaaagcttaccagcagggacaaccactgcccttggagtattagttggcctcggatatgatgcgaaaggaaaggtaagcggatgcatgaacaccaatccacatgagatgaaaaatgagcttgttgatgaaggattaaagaatgcagggattgttccaagcaaggacaataatccatttgatgttgtcaacgctgttggagatcctatgcttccagcagttgcaggacttataatgggttccagtgtgcctgtagttttagctggaggaactcagctaactgcagcttgcgcaatagttaaggcattggatgatgaattcgacttttcaaacacctgtcttgctacaacatcctttgttgtaaaggatgagactgctaatattcttgatataatcagccagatagatgatataactgtaaatgcagttaatccaaactttgaaatatccaaagttgaaggattgaagaattatactaaaggatatataaaagaaggtgcaggagctggcggagcaatgtttttagctcttcttttaggcaatgacattaatagcattagagaatccatagaggatgcatgcagttaa

SEQ ID NO: 2100 - DNA, 201 bp, Methanobrevibacter ruminantium
  source 1..201: mol_type = genomic DNA
atggctaatgataattttcaagtaaacaagcaatttgctaaatttaaaggtaaaaatgtccttataggactaaagaattgggaagaagttgaaggaaaaattatcaccattgataactttttaaatttagtcttagatgatggaaatggtttaaaagttattaaaggtggaaaagtagcatttatttctattcaagaataa

SEQ ID NO: 2101 - DNA, 147 bp, Methanobrevibacter ruminantium
  source 1..147: mol_type = genomic DNA
atggcaattaatcaacttgaagctacattacaagctgtaactcatacattagctaaattggaaaaagaaggatgtagtgatgaaaaattattaaaagaacttagagaagaaagagataaacttttgcatgaattaaatcttaattaa

SEQ ID NO: 2102 - DNA, 783 bp, Methanobrevibacter ruminantium
  source 1..783: mol_type = genomic DNA
atgattcatatgaaaattttattatctaacgatgacggtgtaaacgcttctggaattcttgctgcaaagcatgcagttgaagacttgggagatgcaattattgttgcaccatctaatcagcaaagcggaattgggcatgcattaactctttttgaaccattaagagtaaataaggttattttagccgacaatgacattggatatggagtttctggaactccgactgacgctgtaacaatcgctcttttcgagcttcttgacgaatgtcctgatttggccatatctggaataaacactggtatgaacactggtaaggcagagctaaccacttccggcactttaggagctgccatcgaaacagccacattcaatattccgacaattgcagtaagccagcatgtttcagatgatgacttgaagtttgatgaaggggaaatagagatagatttttcatctagcgtcaaggtcttaagggagcttgtaaaaaagataatcaaagacggctttcctaaaggcatagacattttaaatcttaatgttcctagccatcctgattcctatgagcctgtgatttgccctttaggagataggatgtattggccggttgtagagaaaagacatgatccaagaggcagggagtattattggattaatggagatgaatatgtgggaaaccctaaagattcagatattgatattttaaatcagaatatacctacaatcactcctttgactttggacatgactcataatatggattatttaagagagtggtatggttag

SEQ ID NO: 2103 - DNA, 711 bp, Methanobrevibacter ruminantium
  source 1..711: mol_type = genomic DNA
atgttatctattggtcaatgttacttagaatttgttaataaaatccttaaggaaggtaaagaaacctataaggacagcgatcatcatcttaaggaatatcttggtaattattactatattgatgatcctcttgacttgaaattcagagctaaatatcagcatatgactccagagcttatgttagaggaaatcaagaagggaagatatgatattgacgcctgtccaattaaaggtgatgctttatatgaatatgtaaagtcttttgaaataagagacgatcagggctttgtctatacttatcctaatcgtatccttgagcattttggtgtagatcagtttgaagttatgaaagagagaatcctaacagctacaggaagtaacagagctgttgctgtaacctacgatcctaaattggaccatgatagggaagacattccatgtctccagtttgtacagatgcttgttagggatggggaattgactatccatgtaatattccgttccaatgacatctttggagcattctactcaaatatgttcttcatatgttatatgggaataaagatgaaagaggaagtcaataaggagattatgggagagaaattgaactttggcggtatccattatcactctacctcagggcatatctataataatgatatgagggctgctaggaagttgatttctgctaataaggctgctcttaaatag

SEQ ID NO: 2104 - DNA, 1200 bp, Methanobrevibacter ruminantium
  source 1..1200: mol_type = genomic DNA
gtggaaaagccacaattagttaattttatagctaaagtgcttgaagattctggctttaaagtctataagaactttaaaacttcccaacagaccgtagatatatatgcagtcttgccaacatcaatgggcgattttggtatggttgttgcatgcaaaaactatgacaaggaatgggaagttggaatcgatgtcttaaaggaaatggaagttatcggaaagaaacttaaggcatcaaaggtcagcgttgtcacaagttcaggattctcctcacaggcaaaaagatatgctgaagagaggaaaatcaaattggtagacagaaacgatcttgtagccttagctaaaaaatacaacaacaagaaaaaacaggaaaatgaaccggtaagacttagaaaggaaagtcctgctaatatcgatagggattcattctataatagggatgtaagccgtgactacatagacaatgtaaatggcacccaatatgatgccggactcaatagagtcccaaatccatatgacagctatgaggaatatgaatcagatatcgattattatgaaaatcaggtgggaggaattgacttaagcggatacagcgcgtatgatgatgacttatatagggctgaattccttaataggcaccctagcaatgaatccaactataatggattattgattgcaaacaatcgagacccatatgtaaattccaaacctagttccaatagcagaagtctattctctagaaataaagcgactgaaaagcttagcagcttaaattcaagaggatacacaaaaaatacaaacaataataataacagacaaagaaatagcagaaccacaactgtcagtagaaacaaaagtccttcaagaaatttcatatcttcaagggacaatgctttatctaagttctcaagaaatgaaagcagatcaagtggcggtttaaaagaaatgattaagccaatacttggaaatacaattgtttcaatcattgttgtaatagttgttgcttatctgattgcattcatacttggaagcatagttaaagtccctacaggatatttaggattaactgaacttgcagttgcattggtattatcttatggactagtcttctatacagacagaggctccgatgtacttgtaaaaggaacaatcatattctttatttccttagtggtattgatgataatactgattgcattctag

SEQ ID NO: 2105 - DNA, 924 bp, Methanobrevibacter ruminantium
  source 1..924: mol_type = genomic DNA
atggcatttgatgaaaatggtaaagtatggatggatggggaatttgttgcattaaaagatgctaaaatcagcgttctttcccacgtaatccattatggatctgctgtatttgaaggaattagatgttacgaaactgaaaacggacctgcagtattccgtcttcaagatcatgtacacagattatttgattctgctaaaatctataagatggacattccatttactgaagaggaaatctgtgacgctatcatagaaacaatcaaagtaaacaacttaaaaagctgttacattcgtccaataacctacagaggatttggcgaattaggtgtaaacccattaaactgtcctgttgaaaccaccattgctgtatgggaatggggggcatacataggagaagaagaaatggaacaaggtgcaaacattggtatttccacctggagaaaaccagcaccaggtaccttacctgttcttgcaaaggctgcagctaactatatgaactctcagcttgcaaaccttgaagcaggtgaacacggctacgatgaagcaattcaattagactaccacggccatgttgcagaaggaagtggagaaaacatattcatagttgaaaaaggcaagatcgtaacccctgacttaggctcttccatccttcaaggaatcactagagacagcattatgaccattgctaaagacttaggatatgaagtctcccaagaaaccatctcaagagaaaggttataccttgcagatgaagtattcttcaccggaagcgctgctgaagttactccaatccgtgcaatagacaacagacaaattggaatcggatcaagaggccctgtaactaaagagttacaagaaaaatacttcgacgcagtaaacggaagaagcgaagacattcataactggttaacttatgttgaatag

SEQ ID NO: 2106 - DNA, 825 bp, Methanobrevibacter ruminantium
  source 1..825: mol_type = genomic DNA
atggatattttacaagcaataatcattggacttgtccaaggattaactgaatttctacctgtaagtagttctgctcatttaatatttattcaacaagcattaggattaagcaatgttccacttgcctttgatgtcttattgcatgtaggaacccttgtagcagtatttgtatacttctttagcgatattattcaaatgattcaaggattcttctatagcctattggatttaagggatggaaatttcattccagaaatcagaagggacccttataagaagcttgcatggcttacaatcattgccacaatccctgttggagttgtaggaatcctattcaatgacattatagaggaaatgtttacaggattgaccatacctgcattcttgcttcttataacaggatgtcttttatatgtatcccaaagaatgaacagtggaaaaattgatgttcaaaacataaccatcaaagaagcattgcttatgggatgcggacaggcaatagcagtattgccaggtctttcacgttcaggaaccacaatagctgccggattatttgcaggactagacaaggaatttgctgccaaattcagctttatcctatcaattccagcaatcttaggtgctgctgtagttcaattgaaagatctaagcggaggcaatatagagattggtgcatgtttagttggatttatcgtagcagtcatttcaggatactttgcaattagcttcttgcttaagatagtaagggaaaagagcttagacatatttgcttactattgttggatagtaggagtaattgttttggttgggagtattcttttatag

SEQ ID NO: 2107 - DNA, 1002 bp, Methanobrevibacter ruminantium
  source 1..1002: mol_type = genomic DNA
atggtatatgtaggtatggatcatggaactactgggatttcatttgctataatggatgatgagaaagttcttgatgtttttaagatatctagagaagatagtaaggctggaagagtttcagctattgaagaattgtctaaacgcattgatttagaagatattgacttaatgattattacttatgctatgggagatggaataagcactattcttcctatggaaaaggttgaaaatagaggaatactctccattggaggtgccggcaaggtaactggagggggaacatctgtctatagtgagatagagaatgctaatcttccggttttaatgattccaggtttgcataaggattgtgattggcttgacccattgtttagggcagcatattcccaccatgcaagtcctgaaaaggtaagcattgtatataatgcctatcttgagacccaatgggagaatatggtagtggctgacatcagctccaatagtgttgaccttcttattgaggatggcaagatcaagggagccattgatgcctgttgcggtgcaatgggtattgttcatgggccattggaccttgaaatgattagagacattgatgagggaaaaagaactgccaatgaatgtttctcacatgcaggagctgttaagatagctaatgttgataataaggttgcattgatgaaggatgagctattggaaatgtattccaaaggggacgagagggctgttttggctattgacacaatgattatgactgtggctatggagattgcaggtcttattgcagttagcaagaatgagatagatggaattgttcttacaggttctatgggttctatgaaagagcctgttgactttgaggctggattgaataagtactttaagaataagtatgagactaggattatttcatctgaatctggagctatcggtgcagcacagatagcaagagacatcttcaatggaaaaagagatattatgggtataaaagtggactattag

SEQ ID NO: 2108 - DNA, 996 bp, Methanobrevibacter ruminantium
  source 1..996: mol_type = genomic DNA
atgaaaatgtattatgatgacgatgttgacgctgaagttgttgcagataaaaccattgcagtaatcggatacggaagtcaaggacgtggtcaatctagaaacatggctgacagcggattgaatgttattgtcggtcttagagaaggaggttcatcctggcaaaaagctattgatgatggaatgaatgttaaaaccatagaagaagctgcagaagctgcagacatcattcacatcttacttccagatgaaacccaagaaaaagtatataaagaacaaatcgctccttatgttgaagctggaaacacaatttcattctctcacggttacaacattcactttggattaatccaacctggagaagacgtaaacattgtaatgtttgcaccaaaaggccctggttccagagtaagaaccacttatcttgaaggattcggaattcctggtcttgtcgctattgagcaagacgctactggagacgcattgcaacttgcattaggtatggcaaaggctgtaggccttaccagagcaggtgtcattgaaaccacatttaaggaagagactgaaacagacctctttggtgaacagaccgttttatgcggtggtctcactgcacttatcaaggcaggatttgaaactcttgtagaagctggataccaaccagaaatcgcttactttgaaacctgtcacgaagtcaaattgattgtagatgacatctatgaaaacggtatggctggaatgtggcatgatgtaagtaacactgctgaatatggtggattaaccagaggaaacagagttatcaccgatgcaaccaaagcagaaatgaaagcaatcttaggggaaatccaagacggcacattcaaaaaagagtttgctgatgaaaacgctactgacgcagctaacttaaaggaaatgagagctgctgaagaaagagaaaccattgaagtcgttggtaaaagattaagaattgcttgtggtttacagaaagaagatgaataa

SEQ ID NO: 2109 - DNA, 492 bp, Methanobrevibacter ruminantium
  source 1..492: mol_type = genomic DNA
atgagggaaaagtctcatgttattagtactttggttgaacacaagccaggtgtgcttcagaaagttgcaggactgttaaacagacgtggatttaacattgacagcatcactgtcggagcatctgaagttgaaggcttggccagaatggtttttgttgtaaaaggtgatgaaaaggttctagaacaggtcatcaagcaattgcacaagcttgttgaagttgttaagattaaggaccttgatcctgaatatgttttaaaaagagagctctgtcttgttaaggtaaagacaacaaaggaaaagtctagatctgagataatcgagtatgcagacatcttcaaggcaaagatcattgatgtatgtgatgatttcattacaatggaggtcactggcaatcctgagaagattgattccttcttgagattgcttaagccttttggaattaagaagattgctcgtacagggcctactgctattgcgagagggcatcactaa

SEQ ID NO: 2110 - DNA, 1896 bp, Methanobrevibacter ruminantium
  source 1..1896: mol_type = genomic DNA
atgagaggcggagacgctattataaaagctttaatggataaaggtgttgacaccatattcggttaccctggaggaaccgttattccattctatgacatgctatatgactcagacttaagacatatacttgtcagacatgaacaatgtgcggcacatgccgctgaaggttatgcaagagcttccggcaaggttggtgtctgcttggccacttccggacctggtgcaaccaatctggtcactggtattgcaaatgcatatatggattcatctcctataattgcaattaccgggcaagtggtaagcaatctgattggaaatgatgcatttcaggaagtggacatcataggtataaccatgcctatcacaaagcattcctaccagccaaaggatgcaaatgacattccaagcattataaatacaagtattgaaattgcttcgacaggcagaaacggacctgtattgattgacgttccaaaggaagtccaagagatggaattagatgaatatgtccttggaaccattcctacccctggatataagcctagcgtaaaaggaaatgataagcaaatagctaaggcagctaaaatgcttttggaggctgaaaagcctataatattagcaggtggaggtacaatccttgcagatgcatcatctgagcttaggcaagttgcagagcttgtcaatgcgcctgttgcaacaacccttatgggtaagggagtcatcgatgagaaggatgacttgtctatcggcatgcttggaatgcatggaaagcaggtggcaaatcagtctgtaaataaaagtgactgcctgcttgcagtgggagtcagattctctgataggaccactggaaaattagagaagttcatgcctgatgctcaagtgattcatattgatatagatcctgcagagattggaaagaacgttccagttgacttgcctattgtaggggatgctaagatagtccttgccaaattggctgatgaattggccagctccagatttgctgaagagtttgatgatgatgaattgtctggctccaagattattaagggactgatggaaaatgatttggctaaggaattatacaagagcaaattagtcaaggaaattgaaagctccaagtttaaggagaattatgaattcaattatgacagttacagcccttggctcaagtcagttgttgactttaagaatgctacaatcccaagggttagctatagcgacattcctttaaagccacagcaggtaatcaaggaaatcgcaagctccattacagatgatacaatcgtaacaactgatgtaggtattcatcagatgtgggcggcacacttcttagacatttcaaagcctcgcaagttcatctcttccggaggtcttggaaccatgggattcggccttccggcagctatcggcgctaaagttgcatgtccggatgatgcagtccttgccattgtaggtgacggaggattccttatggtctcccaagagcttgcaacaatcaaggagcatgacattccggttgtaattgcaatgctcaacaacagaaagttaggtatggtatatcaatggcagaataagatgtatgataagagatactctgaaactgacatgggaaacactccagactttgttaaattggctgaaagctatggaatcaatgctgtgaaagtcgaggaagttgacaagactcaagaggtattatccaaggcacttaaggacaatgaagccattctattggacatcaccgttgagaaggatgagtttattccaatgttcccgccaggcggagctataacagaccttcttggtgagtataaatatgaaagcgatgttaagaacgttgacttagagcaaaaggaatcagaagattctcaaaccgttgaagggggaaaatag

SEQ ID NO: 2111 - DNA, 1377 bp, Methanobrevibacter ruminantium
  source 1..1377: mol_type = genomic DNA
atgatattttctaaactggaaaataatcaattgcttaaaaaactcttaaatggagaaataaaaatgaaagtattagttgttggaaccggtgcaagagaacatgcaatctgtgatgcattaaaagatgatgtagacttatacgcttatatgagcaagaacaaccctggaataagcaagatttccacctttaaaaaaggagatgaaggggaagttgacgaagttgccaaattcgcaaaggaaaatgaaatcgaattggcagttatcggacctgaagctcctcttggaaaaggaatcgtaaacgctttagaagcggttggagtcccttgtgtcggaccggcacaggaatcagcaagaattgaaactgacaagtcattcatgagaaacctatttgaaaaataccaaattaaaggatctttaacctacaaggtatttgacaactacgaagacatcagcgcattccttgatacctatgaaaaggatgttgtagtaaagcctgtaggtttaactggtggtaaaggtgtaaaaatcgtaggagaccaccttaaagataatcaagatgcaaaagcctatgcaaaagaagttatggacaatgcaatgggtggatttgcacaagtaatcatcgaagagaaagtggttggagaggagttcaccatccaagcattctgcgatggggaaaacctagctgcaatgcctgcagcacaggaccacccacatgcattcgaaaacgaccaaggattaatcaccggtggaatgggctcatactctgatgttggaggattattgcctttcctcactcaagaggactatgatgaggctgtcgacattatgaaagagaccttaaaggcaatagctaaggaaacaaccccatacaaaggaatcctatacggccagttcatgctatcaaaagacggccctaagctcattgaatacaatgcaagattcggtgaccctgaagcaatgaacgtgcttcctctcttaaagacccctatggttgacgtatgtaaggccatcgtcgacggcaagctagaagatgtcgaatttgaagacaaggcttctgtctgcaaatacatagttccagacggatacccagacactccacatgcaggagagcttattgaaattgatgaagaggctatcgaagctcttggagcaaaggtcttctatgctgcagtaagccaagaggatgacggagtccacctttcaggctcccgtgcattgggaattgtagctcaaggcgatacaatcgctgaagctgaaaagatagctgaagaagcctgtggtcttgttgaaggaaatgtctaccatagaagggacgttggtaccgaagcgttaatccaaaaacgtatagaccatatggaagcaattagaaacgaataa

SEQ ID NO: 2112 - DNA, 897 bp, Methanobrevibacter ruminantium
  source 1..897: mol_type = genomic DNA
atgaatgaatgtgtgatctttatgtctaaacaagctaaatcaaagaatacaataatcaaaaaggccaaaaaactggaaaggcaaggtaaatacataaaggccttaaaagtctgtgacagctatttagacaacgaaagatctgaagaaacattaatccaacttaaaatagacatattagtcaatctatacaataacgacacattcatcaatgaaatcaatgaaaacaaaagcaaaattactgattttatagaaagggatgaagagatagagcttctaaagctttacaacactttagacaattatctagaattgaactctcaaaatatggctgatgagagaaaggttggaacctatctcgccggaggcctattggttgacaatttagagactatccttgttttaaatgaaatggctaaggacaataaggctgaaaataaggagccatttaaagcaaattccgacttgttagaattcatatacaatgtcaaaaagacaagctatcaatatctggaccttatcctgccaaactcacttgaactattagccaattccaattttaatattgaagcaatcatttcaaagattagacagtttttagagcctaaaaaatctacagattctaaggaagaaagcattaaagaaaatgaagaggatgattcagaccaatccgattcaaaaaacgccctaaaatcaaaagatgataccgaattaatttcagattatagcatagaagatgagatgaaaggcttaaaagaaatgattagctacttaaatgataaaaatgaatttaaaaaagccctaatttaccaaagaagacttgtaaaattagcaagagaggaaaacattagagcagaacaggaccatgattccaagcaaaagacacttagcgactactaa

SEQ ID NO: 2113 - DNA, 915 bp, Methanobrevibacter ruminantium
  source 1..915: mol_type = genomic DNA
atgagaagtcttttatcagtctgtgatatagaagaagaagtagaaacaatactcaatattgcaagtgactttaaggcaggcaaaatcgaagaaaagccccttaaggaccaaaagctagcaatgatctttcaaaagtcctctacaagaacaagagtctcttttgaagttggaatgtatgaattaggtggaactgcactgttcttatctacaaatgatatccaattaggcagaggagagcctattaaggacaccgctaaagtcttaagcagatttgtagatgtaataatgattagggcaatcgaacatgacgatgtcatagagctcgagagagagtcagacgttccaattataaacggccttaccaatcttgagcacccatgccaagcattggcagatatgctcaccgtaaaggagcataagggtggattcgatggaaaattcgtttatgtaggtgacggaaacaatgtctgtaactcactactgcttatctgcggatgtttaggaatggatatggctatagcatgccctgatgaatataggcctaatgaagaaattaccaaaaaggctaaagaatatgctaaagctaacaattccacaataacaatcacatcagatatagaagaagcagtaagcggcgcagatgtaatctatactgacgtatgggtaagcatgggagatgaagaggaatctgaaaaaagaagagcagactttaaggactaccaagtaaatcaaaatcttattgatatggctgatgatgatgtcatattcatgcactgcttgcctgcaataagaggagaagaggttagcgctgaagtgattgacggacctcattctgttgtctacgatcaggctgaaaacagaatgcatgctcaaaaggctgttttatattacttcttaaaagaattgtataaataa

SEQ ID NO: 2114 - DNA, 984 bp, Methanobrevibacter ruminantium
  source 1..984: mol_type = genomic DNA
atggaatttaacgaccctgcattggagcatttggtaaacaagatcacagttgcgctgaacgagaacaataaggaagatgcagcacattatatggacattatcatagataagtaccctgaagttgcaaatattttaatgaactctatcgagtttcaaaacataatggctcaaaacgaagatgttgaaggtgaagaagcatcagatgactttgcaatccagcccggaagtgctatggaacttgatgaagagaaaatcataaatgacatgaatgcaatgcttgatatagagccaaccacagctcaagaatacattcaaaagggtacagtattaacagttaccgaagaatatgaaaaggcattggaatgctttgacaaggctttagagttggacgaaaacaatctttcagcactgatatcaaagggaaacaccctagagcttatggaaaaattcgatgatgcctcaaaggtatatgatgatgttatgaacactgaagtggaagaggtctatgaccttatgagcaaaggatatatctttgaaggccaccaaagatacaatgacgccttaaaaacatatgacaaggctcttcaaaaggaaagatataacgctaacattctatttttaaagggaagctgtctaatcaagcttgaacagtaccaaaaggcaatcgacagccttgaggaagctatagaaaggtatagcgaaaacccatatgaaaccatattcgagcttgaaaacgcataccacaacaaaggagtctcattgcatgcaatcggtgaagatgacgacgctcttgaagcattcagccttgcattgggattaaacccagaatactactactcctactatgaaataggcataatccaagaggacagagaaaagtatgacagcgctttaaagaactataataaattcttagaatatgacaataccgactctgaagttgtagaggctaaagaaagagtagaagaattgttaaaagaataa

SEQ ID NO: 2115 - DNA, 1722 bp, Methanobrevibacter ruminantium
  source 1..1722: mol_type = genomic DNA
atgtattttaaaataaagactgaagctgaagaggctttaagaaaggcagtcgaccagtttgactgtgaatttgatgaggaaattaaattggagtttcctcctaatcctgaattaggtgatttggcaagtacaatttcattccaattagctaaattgcttcgcaaggctcctaatttaattgctcctgaagtggttgaaaaaatcgagcttccagagatttttgaaagggtggaagctacaggtccttatgtaaacttcttcattaatcatgacatctttgcaaagcagctattggactctgttgatgaggattatggtcaattggctgcagtagatgagaagatcatattggaacacacctctgcaaaccctaacggtccgttgcatattggtcatatcagaaactctgtaatcggagattcattaaggagattgcttacaaaggcaggatataatgtggatacccaatattatgtcaatgatatgggaaggcagttggccatgattgtatatggtatggaagagcttggattgaagcttgaggaccagccagcttccaagattgaccacaaggtgggagagctttacttcaaggtaaaccaaatgattaaggaagatgaaagcttgaacgatggcgttgatgcaactatccgcaaatatgaaggcggtccaagcgagcttgatgagaagtttgaatatgctgtcaacagctgccttgaaggtgtaaaggaaaccttgaagagaatgaatgtaaagcatgacgcctttgtatgggaaggacagttcgttagaactggcattgtagacaaccttacccaagagctttatgacattggatatgcaaggcaggaagaggttttataccttgacttaagcgaattcgacattcctaaggagctagtccttagaagggcagatggaacttccctttactctacaagggacattgcttatcacatttataagtctaaaaactgtgacaagatcattgacatattcggctctgaccataagcttgcagcaaggcaggtggagcttgcacttgagattcttgaggaaatcgagccaaacagcgataagattgaagtcattttctatgagttcattaccttgcctgaaggttccatgtccacaagaagaggagtcttcatctctgtggatgagcttatggatgaggctgttagaagggcaactgaagagattatttctcgcagaccggaccttgataaggaaactatcgataagattgctgaagagattggtatcggcgcaatcagatattacattgcaaggctctctcctgaaaagcacataacattcaagtgggatgaggccttaagctttgagagaggatgcgcttcaattcaatatgcccatgcaagagcatgcaaattgcttaagaaggctcaagaggaaaagggcattgatttagctgacttgactgttgaggatacttggtccttggatgaaaacgagaaggagcttgttaagttgattgcaaaattcccaagtcttgtggaagactctgctaagattagaagggtccatcctattgctcaatactgtcaggacttggctagcgcattcaataggttctataaggcagagcaggtaattggctctgatgtggaaaatgcaaggcttcttttggttgaaaagtctagaatcactcttaggaatgctcttgaccttttaggtgtgagtgcgcctgatatgatgtag

SEQ ID NO: 2116 - DNA, 414 bp, Methanobrevibacter ruminantium
  source 1..414: mol_type = genomic DNA
atgaaagaaattgctatttatctcatccttatcataattgttcttattgccgcacaacacttaaatgtagttgtctcaggtagtatggaacctgttatgtatagaggagatattgtagtacttcaaaaagctaatttatttggaatacatgaattcgaccctcacgatgttcaagtaggggatatagttgtttataatgccgcttggtatgacagcccagttatccatagggttataaacactgcagagatcaatggaactacctgctttgagataaagggagataataacaataaatcggacccttattgggtgactccagagcagattacagatagagtcattacaattaatggccaaccattggtaattcctaaaataggatatatcactttatgggttaaaggtctttaa

SEQ ID NO: 2117 - DNA, 1656 bp, Methanobrevibacter ruminantium
  source 1..1656: mol_type = genomic DNA
atgaatagcgataatataaaaaaaggagttcaaagagcacctcacagatcacttcttcgtgcttgcggacttaatgataatgattttgacaagccattcatcggaatagcaaacagctatacagacatcgtacctggtcatattcaccttagggaacttgtcgactatgtaaaggaaggaataagagaagctggagctattccatttgaatttgacaccatggccatctgtgacggaatcgccatgaaccatgacggaatgaaatactcacttgcctcaagggaaatcgttgtaagcactgtcgagagcatgaccatgggtcattgctttgacggacttgtcctcatgcctagctgtgacaaggtagttccaggaatgcttatggcagctgcaaggcttgacattccatcaatattcctaacaggaggtcctatggctccaagcacttacaaaggaaagaatgcagacctaataactgtgtttgaggctgtcggcgaactctcatcaggaaaaatcactgaagatgagctttttgaattggaatcctgtgcctgctcaggtgctggaagctgttcaggcctatttacagcaaacaccatggcctgcattaccgaaacccttggaatgagccttccatactgtgcaacaacactcgccctctcagaggaaaagaagaaattggcaatagaaacaggaaagagaattgttgaaatggtaaaggaagacttaaggccatcccagatcatgacacaggaagcctttgagaatgcaattgcaatggacatggcccttggaggaagcagcaacactgcactgcatattccagccatcgcatatgaattggaggagaagggagtccatgcagatttggacctatttgaccagataagcgataaggttgcacatattgcacttctatctccagctggccaggacactatggcagacctccataacgacggaggaatcccagctgtcttaaagacaatctcctctaaattagacacttcagtcatgacctgtacaggaaaaaccctagaagaaaacctaaaggatgcaagtgtcacaggaaatggcgttatacacactttagacgacccaatccacgaagcaggcggacttactgtactcaagggaaaccttgctcctaacggctcaatcgtaaagtctgcagcagttccagaggatcttatgcatcttaagggaccggctaaggtctacaacagcgaagaggaagctgtggaagcaatattcgaccatcagcttaaggaaggagacatccttgtaataagatgcgaaggacctaagggaggccctggaatgagggagatgcttaaccctacctcagcaattatgggaatgggaataaagaatgtaggactaatcacagacggacgcttttcaggtggaacaagaggcccttgcataggccacgtatctcctgaagcaatgagcggaggtcctattgcagcccttaaggacggagacataattgaaatagacatagcaaatggaaatttaagcgtagagctatctgatgaggaaatcaaagaaagaatagagaaagccgacctaccagaaaagaaggtaaaaggatggcttaacatctacagacgttccgtatcctcagcagacgaaggagctatcttaagatag

SEQ ID NO: 2118 - DNA, 324 bp, Methanobrevibacter ruminantium
  source 1..324: mol_type = genomic DNA
atggatattaaaggaactccaataaatgtagaagatatgattcaatatcaaaaagactctgttgtaagcatggaaattataaaaaaagagcttggaactgtaaccctatttgcatttgaccaaggccaaggattaagcgaacatagcgctccttttgatgccatggttcaaatagtggatggagaagctgaaatcacccttgcaggtgagcctcatacagtcaaaaaaggcgaaatgataatcatgcctgctaatgtcccacatgccttgcaagcagttaacatgccgtataaaatggtcttaaccatgattaaatcagattag

SEQ ID NO: 2119 - DNA, 1299 bp, Methanobrevibacter ruminantium
  source 1..1299: mol_type = genomic DNA
atgagtgatttcaacatgttttgttatcaatgcagccaaactgccagaggcagtgcttgtacaaatgcaggagtttgcggaaagaacgcaactgttgcaagacttcaggataatttgatcttttcaatgaaaggaatatcagcttacaattatcactgtaaggagttaggagtaagcgacgaatctgtagacgaattccttacaaaagggctatacactaccctaaccaatgtcaactttgatatcggcgaccttgtccaattggcccttgattccggtgaagccaactttaaggttatgaagatgcttaaggaagcccacattgaaaacttcggtgagccagtgccagctgaagtaaaggtaggggctcaagaaggaccgggaatacttgtaaccggccacgacctaaaggcattggaagagcttttaaaacagtgcgaagggactgacgtaaaggtatacacccacagtgaaatgcttcctgcccacggataccctgagcttgcaaaatacgaatcccttgccggtcagctaggaggctcctggattgaccaaaggaaagtctttgctgattacaatgtagccatcttaggaacaaccaactgcgtattgcctcctaaagacgcttatgctgacagattattcaccatggacatagtaaagattccaggtgcacaggtaattgaggattatgacttcaagcctttgattgacaaggcaatcgaattgggaggacttgaagcggaagagctctccaccattagcacaggtttcggattaagcacaatactgtcccttgcacctaaaatcaaggaattggtacttgagggcaagataaaaagattcttccttgtagcaggatgtgacagtccaaacccaagaatgagctattacagagagtttgtagagaatgttccagaagactgcatagtattgaccttagcttgcaataagttccgcttcaacaatcttgaattgggagacattgaaggaattcctagattattggacttaggccagtgtaatgatgcaattgtagcaatcgagcttgcagtagcattatgcgagctctttgagatggagcttaatgacttgcctttaacaattgtcttaagctggatggaacagaaggctgctgcaatcctttggacattgctatatcttggaaagactgacatgttcataggaccggttcttcctgcatgggcaaatgatgacatattgaatgttttggttgaaaacttcaatctcactccaatatcaacccctaaggaggacattaaaaaggttatgggttaa

SEQ ID NO: 2120 - DNA, 795 bp, Methanobrevibacter ruminantium
  source 1..795: mol_type = genomic DNA
atggagaatattatcgaatcattggagaagttcggccttacaaggtatgaggcaaaggcatatataggaatgacaaacatcataagcggaaaggctgaggacattgccaaggcctccgagataccgcgatcaaagatctattccacattaaaggaactggacaagaagggattcattacaataacccatacaaggccaatcgaatataaggttgtccctccaagggaagtctacaaaaggaaaaaggaggaattgattaaagagctggaagactcagaggaaaagctggatgagatatacaacagccaaatatctgaagtacaggctcctatctggcttataaaaacaagcaagaacataatcaataaagaagttgagattgtaaagaagacaagaaaatcattgaacatgagggttggattcctccttgaaggggaaggtgaggagcttatcaaggcattcaattcaattccaagaaacataccgatcaagatacttgcaagcccatactgctatataaatcaggaaaggattgatatcattgaactgtttgaaagtgcaaggcttgaaaaccttgaaatcataaaggcagacattccttttgttaagataattattagggatgaaaaggagctattcaggacaattgtaaagtttacaggaaaggaaaagtctgtattgcctgagactgctgtaggtgtattgaatcaatattcagacatctgcaagaactttgatgagcgttttgttaatcagtttaataggattaaggcaaaaaagagtagtatgaattaa

SEQ ID NO: 2121 - DNA, 756 bp, Methanobrevibacter ruminantium
  source 1..756: mol_type = genomic DNA
atgatgttaaactatttatttaatatattaaatactaatacatttttattaaaccctaaagagagagttattcaagggattttattgtttattctaatgagtgttttttccttattatttatatcattcattactttagcaagccctaatttatttttccctcttttaatctcttttgagcttttaatgctctttttaggattaaatatttcattacattcgatttataccaattattttaatatgttagtttctgaaaatcctgttttattgagttatgagggagttatagtaaacttattgtgcttaagtttaggagcttttagtttttggttaagcatcgctattttcatcggtcctttttgggcatttttttcatttgccttggcatggttattgcctctatggataatgtttttcaggagagatatttttaatgaaaaaagcaaggtaatatctaaaaattcagacaagcttataggatactcccctatttggttttacttatttggatgtgtttctttatttattccttttcttgtcatgtttaaaatcgtgtttttttcaaagttcaattttttagcattaggcttaataatcattactttgatagaaacaattttaattttttgtccggattattgggataagattttgccttttgatattagaacaaagaaaggcacttttatttattttttactatctattttaattttatcttgcatttctattattctttataaaatagtttaa

SEQ ID NO: 2122 - DNA, 399 bp, Methanobrevibacter ruminantium
  source 1..399: mol_type = genomic DNA
ttgtttgaagcaggtatgattgctcttcctactggtttgcctggacttgccttgttggggcttggtactgtgttaacagcttatggcagtggaatgttcgatgatttaggaacagatcatccaggttatgcaaagccggaaaatcaattaaacttcggattatccatggggcttaactttataggattaggtgctagtgaaggacttgcaagaggggttctctataaagaagttcaagaaaaactagttacaggatttgtaccatcaattaaagcctatggaaaaacaataatggatgagtcattaggtaaaggaaatgctaagatttcaactgttatttgggcttatgtggaaaatagtgtaattcttgctatagaaaattcaatcaatggtggttaa

SEQ ID NO: 2123 - DNA, 777 bp, Methanobrevibacter ruminantium
  source 1..777: mol_type = genomic DNA
ttgttaaaagcaatattcaaaggtggagacttccaatgttcacagggcaatggaacaataatattcgaattagcagacaactcctctaaattgatatttggcccagatggaagtgttgcaagtttaatatcatctgacatattggaaaataactatttgaatggaggcatggatttaggaaccttcaatttcctaaaaaactccacaataatttccaatctaaaaagcatagtaaactcatcctactatgatataaattgtttatctaattggataatatctttggtaaatgattcggatattaatttcacagcaatagtctcctatttgtctgatcctaaattagttgcaagtgttgtcggcggacttttgtttgaagcaggtatgattgctcttcctactggtttgcctggacttgccttgttggggcttggtacagtgttaacagcttatggcagtggaatgttcgatgatttaggaacagatcatccaggatatgcaaagccggaaaatcaattaaacttcggattatcaatgacactgaactttttaggcttaggtggtagtgaaggttttcttaggggagttttatacaatgaagttcaagaaaaactagtagtaggattcgtgccatctattaaagcctatggaaaaacaataattaaagagacattttatgatgataatggtgttttagcaggtgttgctaaaagttattttgataatattttgcaaaatatcttatttgacactttccttaaatggggtgtaagatga

SEQ ID NO: 2124 - DNA, 1089 bp, Methanobrevibacter ruminantium
  source 1..1089: mol_type = genomic DNA
gtggctaagaaagttttgattattgtaacaggcagaggattaggcggagatgccggaattgcattgaatgtttacaatgcccttaccaaacgaggaatggagtgtgagatagcattggatgaatccgcaccaggtatattgtttaaaaagaacaatatggaatggaataaggttatcattccacaggctggaggccattctgccactcttaagacaactgtaaacgctgcaacacgttctgttaaggctctatttaaaacaagaagcctaatcaaggaaaagaaattcgatctggtccttggaatccttggagggggagccatcataggtgctcttgctgcaaagataacccgaaccccttctgtaagccttttaatcactcctttggacactaagatatgcggaaagattggaactccaataattcttcctgaaaacaatctgtttttagagcctaatattccagataggatggtaaagtccttcttgcctgtaaatgacaacattagtcttggggataagaaaaaggcccttgataagttaaatgaacattgcagtgaacttaagaagaaaaacccagatgcaatggagtttgacccgtctaagcaaacaattgtattctcatcaggttccagcctatttgaaaagactgcccaggcaattgaccagttttcaaaatacagtgacagattcaacttggtcttatgtggagatcctctagaagaggagttttataagtatattgatgaaactaagataatcaatgtaggctttatagactgggtaaatgatcttcttcatcttgcagaccttgcagtattgacaaatgacggccttatgctccatgaggccatggtgtgcaatctgccggtggtcattcttaaaagggtgaaatacggacgctatcatgatatggtttcaatattcaagggagctaccattgaatgtgacttggaagaccttgatgaggccatatttgatgtggtggacaactatgatgactatgctaaaaatacagctacctataaggaagccattttaagtgtaggggacaatatagcagatattgttgaaaaatcttttaaatag

SEQ ID NO: 2125 - DNA, 459 bp, Methanobrevibacter ruminantium
  source 1..459: mol_type = genomic DNA
atgaaaaactggaaaataattggattaatattaatcatccttcttgctgtcgtttcagttagcggctgcattggtgatgactcttcatctgataccacatcaatcagtgcagatgcccttaatattacagaagatggaacctacgactccaaggaagaggttgcagcctatatagatgaatatcacaaacttccttccaactacattaccaaaagtgaggcaaaggctctcggatggcatggaggcagcgttgaaaagtatgcacctggaaaatgcataggaggagacatattctccaatcgtcaatcaattcttcctataggccatgaatacaaggaatgcgatatagacactcttggagctgacagcagaggccctaaaagaatagtcttctctacagacgactatgaggtttactataccggagaccactatgcaagctttgagcacttgacttaa

SEQ ID NO: 2126 - DNA, 240 bp, Methanobrevibacter ruminantium
  source 1..240: mol_type = genomic DNA
atgaatgagatagttttatttggagaggatatgaaagaagatcctcataaatacattaaagagactttggatttcccagattattatggggaaaacttggatgctctatttgactgtctaagcgaggtttataataagacaattattataaaggacagtgtattggtggatgaagatataattcagacattcgttgatgccaatgatgaaaatccagatatggacttgattttagattag

SEQ ID NO: 2127 - DNA, 1827 bp, Methanobrevibacter ruminantium
  source 1..1827: mol_type = genomic DNA
atgagagtattgcttattcactctgattatataaaatatcaagtaaaaaacaaaactccagtggctgaagagattgaagaggctaaagaatcaaatgccttcgaagaggctttggttgtctttacagctgttgaaaaggaagatgagaaaaatcctaatgcagttgtcaagaacttagttgctgaagttaaaaaaacaaatgaagaagtaaatgctgaaaggattgtattgtatccatacgctcacctttcctcatccttaagcggccctaaagtaggggttcaggtattgaaagacgctgaagctgcccttaaggaagaaggattcgaagtgttcagagttccattcggctggtataaggcatttgaactttcctgtaaaggacacccattatccgaactttcaaggaccatcggtgctgaagaggaagctgaagaagaggaagaagagaaaaaaccatccaaatggcttatctttgatgatggggaaacaatcgaacctaaggaatacaattaccaaagcaaagaccttgaaaaattagttgcatatgagctcggcgaaggggcttcagacgaaggagagcctccacatgtcaagatcatgagggaaaaggagctatgtgactatgaaatcgcatctgacataggtaacctcaaatggtatcctaagggcagattggtccgtgacttgcttgctgactatgtatacaacttcgttgtagacttaggtgcaatgcctatcgaaacccctatcttctatgaccttgcaaacgatgcaatcagggaacatgcagcaaagttcggagaaagacaatataagactgcaaccaaaaaggaccttatgctcagattcgcatgctgtttcggtgcattcagagttttaggagactctttccttacctggaaaaacttgcctgcaaaggtttatgaactctccacctacagtttcagatttgaaaaaagaggggaagttgtaggtcttaaaagattaagggcattcaccatgcctgatatgcacagcttctgtgcagacatgccacaagcattagaggaattcgacgctcaagttgacatgtgtgtccagactggagtagaccttgacgtaaactatgaggcaatcttcagggcaactgaagacttctatgaggaaaacaaggaatggatggaagcaacagcaaaaagaatcggcaagccattgcttttagaaatcttaccagaacgtaagcattactggtcctgcaaaatcgactttgcggctatcgactaccttggcagacctattgaaaaccctaccgtacagattgatgtagaaagcggtaaaagatttggcatcgaatatatcgatgaagaggaaaatcctcaaaaccctataatattgcactgctcaccgactggaagtgttgaaagggttatctgcagtttgcttgaaaacactgcaaaagaggatggaaaggctccaatgctacctacctggctctctccatcacaagtcagaatcttgcctataggagaaaagcatcttgaatatgctaaccaattggctgataagattgcagcggaaaacatccgtgtagatcttgacaacagcgatgacagggtcggtaagaaaataagaagcgcttccaaggaatgggtcccttacataattgtaattggagacaaggaagttgaaaatgatgtctactctgtaaccgttagggaaagcggtgaaaaggtagacatgactgctgaagagttaattgcagaagtcaaggcaaaaaccgaaggcatgccatttagaagacttccattacctagaaacacagcagaaagaattaattttaaataa

SEQ ID NO: 2128 - DNA, 1041 bp, Methanobrevibacter ruminantium
  source 1..1041: mol_type = genomic DNA
atgttaaatttaaataaaaaaactatcattggagtaatcctttgttttattcttgcaattccttcatttttgctaggaaatctttttccaataattggagggcctatcattgccattttacttggaatgataattgcaagcttttggaaagataagggaagcgctgaagagggaataaacttcacctcaaagtacatacttcagcttgcagtcgtattcttaggattcggccttaacctaggggtcatagtcgcaacaggaatccaatcccttccaatcatcattggaacaatatccatagcccttatcgttgcctatataatgatgaaagtccttaagatggagagaaactctgcaatactcattggtgtgggatcttccatttgcggaggctctgcaatagctgctacagcccctgtaataggtgcaaatgatgaggaagttgcccaatcaatttcaataatatttttcttcaatgtcatagctgcaattatatttccaatgcttggtagaatgctaggcttttctacagtgaatggagatgcatttggcatatttgctggaactgcgataaatgacacttcctcagtaactgcagctgcagctacatgggacaatatgtggggacttggttcagcaaccctcgataaggcagctacagtcaaattaaccagaacacttgcaatcattccaataacacttgcattatcctatataataggaaagaaagataatggagaaaaaagtaatgaagaaggattcagcttaaaaagagcatttccaacattcatagcattctttattttagcttcaatcataacaacagttgcagtttttcttggtgtggatgcaagcctattcattccaatgaaagaaataagcaaattcctgattgtcatggcaatgcttgcaatcggcctaaacagcgatattgtaaaacttgttaggacaggtggaaaaccattgctgcttggtgcaagctgttggatagcgattaccattgtaagcttgattttacagcatttattaggaatttggtaa

SEQ ID NO: 2129 - DNA, 1239 bp, Methanobrevibacter ruminantium
  source 1..1239: mol_type = genomic DNA
atggtaaaaaaagacgatacaatgtttataggtgaagctcttatcggagacggagacgaattagcacacgttgacttacttatcggcagaaaagatggtcctgtaggaaacgcttttgctaatggattaagccaattatcagttggacacactccattgctcagtgtaatcagacctaacttaatgaccaaacctgctacaatcatcatccctaaagtcactgtaggtgacttggatgatgcaagcaaaatctttggaccagcacaaaccgctgtaggaagagcagtggcagatgctgtggaagaaggaatcattcctaaaaacaaggcagaggaatgggtaattaacgcaagtgtactcattagcccagctgctgaagattacagaaaaatttaccaatacaactatgctgcaacaaagcttgcaattaaaagagcattggacggatatccagacatgaaaaaagtattatacgaaaaagatcgtggaacccacgccattatgggattcaaggctatcaagctttacgaaccaccttacttgcaagttgcacttgaccttgacaatgaagaggctatggcaagaatcatcaagcaacttcctaacagagaaagaatccttcttgaagcaggaactcctcttgttaagaaattcggtgttggaattgtcggcaaaatcagagaattggcaccaagcgcattcatcattgctgaccttaagaccttggatgtaggaagggttgaagtcaagatggcagcagatgaaaccgctgatgcagttgctatctctggtcttggtaccattgaatcaattgaaaaggcaatccacgaaaccagaaaacaaggcatctactctatccttgatatgatgaatgtagacaacttcactgaaaagctacaacaaatcaacaaggacttaatgccagacattgttctattgcacagaaatgttgaccttgaaagtaagcttagagcagaaggcaagaaccttgatgacataagtgcttggggtaatatcaaagaaattaaagaaattaccggcggccttgctgctgttgcaggaggaatcactcctgaaaaggcagaagaagcatttgaaaaaggtgcagatatcatcattgcaggcagatacatcattggctctggagacccaagaagagctgcagaagacttcttagctcatatgcctgtagatccaaaccacatgagagtggttatggaagatgacgaacaaatttaa

SEQ ID NO: 2130 - DNA, 315 bp, Methanobrevibacter ruminantium
  source 1..315: mol_type = genomic DNA
atgggattttgtaactcatgtggaagaccaatgggaagaaatgattatggaaccaatgaagacggcagtccaaatcaagactactgcaaagactgtttccaaaatggagaatttacagaaccagatataaccataaatgaaatgattattagaaatgcagaaagaatgcttagaagaaacagagacttgcgtgaagaggaagccactggaattctatgcaatttcttgcctaacttaaaaagatggaatcctaatcctgatgatgaaatagaagatgaggatgaacctgtaagaggctacagaggaggattctaa

SEQ ID NO: 2131 - DNA, 1014 bp, Methanobrevibacter ruminantium
  source 1..1014: mol_type = genomic DNA
atggattttgtaaaaggtattgttaaaaaatatttcaggtcttataatagaaccttaaaggatggtactaaaaagacctataaaactgaacaggttcaggtaacaataccaaaatccgacaatgtctttgacgataaagaggaagtatttattttatccaagaatcaatttgatgaaattcaggataatgaggaactgatttcagcaatggaattgttcaatgccatgcaatctgaagatattaaaaatctgaattattctttggatgaagccagacaggaattatattcaaatagttctaaacttgaatcctttactttggaattggatgacagtaaattggaattggataaatccaataaaaaattactcattttaaaagaagactgttctaatttaagagatcagcttgaagaaagtaagcttaccattgttaatttgaaagaccaattggataataaaaacttcatcattgaagatttaaatgagtatgtcaattcattgaataataaggttgattcattaaatggtgaaattgataacttaaacactatcaatgcagagctaaacgataatttaaacaatttaactaatgaattgaacaataatgaattaaataacggtttaggcaatggcctaaatggatttaataatggcaatggtttgaatggtaatgggtataataatggtttagacaataatggtttgggcaatggcttaaatggcaatggatatgataacaataatctttatggatataataatggtttaaatataaacaataatcatttattgagttctacagttgatgaagatagtgaagttttaattagtgatgtaaaaagcagcgtaagttttgactattctgattatatagaactccaaagagaatatatagttttgcttagaaaatatgaagaagctcaagaaaacttatataatgaaaaagttaaagtaattcattatagaagcttacttgagaaatttaaagctttcattgcaagattagaataa

SEQ ID NO: 2132 - DNA, 17958 bp, Methanobrevibacter ruminantium
  source 1..17958: mol_type = genomic DNA
atgatatcgtttttaataattttattattaaataaaggaggacattttatcaatactaaaataattaattcgattttaattattttgatattattctgttttatatctttattggggaccgcttcggcggaagatatttatactgatgatatagcatcaattgatgcttcaaatgattttgaaagtattgaaatttctaatgaagaagtttcaactaatgctgttgaaaatctcgatgtttctgctgatgacagcgattatgttgtcaatggcagttcatcaaagaatgtattgactgcaaatgaactttctgcaacctatgatttgtctggttccagcgttcagaatatttctgatttatttaattcaggaactattcaatccggtgatgtaatatatctaggaaatcaaagcatttcctcatcatgggacgaatggacaggaaatcatttaatcaatgtaaatgtaagtaacatcattatttctggaggaagcagttcaaatcctgatggcacatcaacaattaatgctaatggtgcaaaattatttaatatacaagcatcaggggttactttaactaatattaaagttataaatgctcatggtggtaatggacctggctgtattaattttgatggctcagattgttcaataataaattgtgaatttgaaaactgtcaatatgctcaaggtggagctattcatggaacctcatctgcttcaaatttgattataacaaattgtaattttacaaataatgtaggtagatggggaggatcaggtggagctatttatttggaaggttctggctgtaaagtgactgactctagatttgagggtaacaccgctcaaaattatggggcaatttactgtgcgggtgatattaatttaaacaattgtaatttcactagcaatggccctggagctatttatggtggtggaaacactgaagtaatagattgtaattttatttcaaataccggtagctctgtcactgtaatcagtggaggttctacaaaagtaagaaattctaatttcactgataatgccggtgcttccatttacagtggaggcaatactgaaataaaagatgtaattttcaccaataatggtgcaggaagctataacaataagaatgttggttccgtttacagtggaggtgctacaactgatgttagcaactctaaattcgataataatgctggaatagcaatttatgccaatgaaaatgcatttgtagatggttgtaacattaccaacggtggtgtagctatttatagtggctcagatgccaatatttccaattccattatagaaaataacagtgctgatcaagcaatagtttacatttatgggattggaaaagtaaacaattccaatttcacaaataacaccgtttcaggccatactcatggtggagcattaagtcttattggtgacaattcagaggtctcagattctatctttgctgacaataccgcaggggcttccggtggggccatatacactaccggtgaaaatacaatgattaaaaattgtagtttcactgacaatactgttatgcaggattatggtcacgctggggctgttgatgttgttggcgttaacactaagattatagattgtaattttacaaataatagtgcgcctaatggaggagcagtttatggtggatcctatggattaagcttatccaattcagtatttgaagacaataacgcttctactggtggtgctttatatatttatcatgacgatttcgctataacaaactgtaacttcactgataatgatgcatcaagtcagggcggagctatttacattgcgtctgagtgtcacaatgagcaaatgactggatgtaatttttccggcaatactgctccaagaggttcagcaatttactgtgatggagacggcaaggttacagactgtaatttcgatgtaaaacctgatttaactgttagtggtggtaattcatctttaacagttactttaggatcagattattcaaatgtcgttgtaggtgatattgaaggtgtatccggaggatctgtgactcctttagttgatgcacaggttaccgtggaaatttttgattctcgcggtaatttagttgatagtgttaccaatgcaactgatgagaatggtaaaatcaaatatgattacagtggtctttcttatggaagctatacttatagggcttctcatatggatggagatactttaatcaccaaagaaggtactttaactaggcaagcttctttggatgttcgtactggctatccagcattaacatccacattaggccttcaaaccagcattgacggaacagctgtcgaaaatgatccttttgtcaatgaagacattacagtggaaatttttgattctcgcggtaatttagttgatagtgttaccaatgcaactgatgagaatggtcaagtctattatgactacagcaatctccaacggggaacctacacttatagggttacctcttcagatggacaaaccgaagaaggtcctttaagtatgggtgaagttgtaggggataacttttcagctattcaagctgcaattgacaatgccccatctggaggagttattttcctacagggcaagacttatctaaatgatattcaaggacagatggtaatcgataagcctattactattataggtaccgacggtactgttttggatgctcaaggaatttcaagagtatttgagattaccagtgatgcagataatgtaaatttggcaaacatgacattaaccaatggtaatgatgtctatggtggtgctatctacctgcaatcaggttgtgacgacggcacccttacagatgttgtttttgacagcaacactgctgagttagctggtggagctatttataatgcaggtggaaatagatggactatagataataccacattcactgaaaatgaagcacatggtgaaaccaattacatataccgtggtggtggtgctatttggtcttgtgatgctgaaatgatcttgtcaaataccacttttgtaaataaccaagcaccatatggaggtgctttaagaggtgcatttgacatttacgattcattgtttgacaataacactgctaccgatggtaatggtggagctattgatgtaacaactgaggaatttctttacgatactctaattcttgaatttagaaattctacattcgtaaacaatgatgctaaaggaagtcgtggagatgacagagctcaaggtggtgctattcacatctatcaccttcaagaggttaacatgtatgattgtttctgtgaaaacaacactgccgataggggaggagctgttgatttctacgaattaggaaagacttgggtagataattgtacctttgtaaacaacaacgcttcttccgaaggtggaggtcttgctattttctgtaattcaagtacattcaaggattcaaatgtttccaataacattgcaggtaccgatggaggtgctatttgggttattggacacaattccttatttaacaatgtaacttcagaaaacaacacagcatcaagaggaggttcctcttatattgaaggtgaaaacactacaatctacaattctaccttcaataacaacaatgctttatacaatgaaagccttggcagccaatcaggtattggtggtgctttagacattctcggtgacaattgtaaggttattggtgtcacttctgtaaacaacactgccgagcttggaggttccactttcattcgcggtgacaatacattggttcagaatactaatctaagcaataatacagctgtcttcaatgaaagcagaaatgagacatctggtattggtggtgcattagacgttgttggtaacaattgtcaaatcatcaacgtcacttccgataacaacaatgcttatcgtggtggatccactttcattcgtggtaatgacactgtcattagaaattccactttcgacaataacaatgctacccttagaggtggtggattgaacattgctggtgaaggatgtaccatattcaatgtagatgtttcaaataacgctgctggtgaaaacggtggaggtatctacgtaattgctgacggtaccgaattcagaaacattactgctgacaataacactgctgaacgtggtggaggcgcattcgttgaaggtaacgacatcattatcgataatggtactttcaatggaaacaaagctattttcaatgaaagtaaacctgacgaatcaggtattggaggtgctttggatatcaaaggtcatggctgtaatgtaaccaatgtagactcattcaacaacaccgcttaccgtggaggttccactttcattcgtggtgacaacacctatcttgaaaactgtaccttagacggtaacaatgctacccttagaggtggcggtttgaacattgcaggtgagaactgtaccatccacaacgttgacatttccaataacactgctgggctcatgggcggtggtatctatgtaatcgctgacggcactgtctttagaaacattactgctgacaataactctgccgaacgtggtggagctgtttttgtcgaaggtaatgacattataattgataatgctaccttcaatgacaataaagctattttcaatgagagcaggccagatgactctggtcttggtggtgcattggacattaaaggtgatggctgtaatgtaaccaatgttaattcattcaataacactgcttatcgtggaggttccactttcattcgtggtgacaacactcatgttgaaaactgtaccttggagggtaacaatgctacccttagaggtggaggtttgaacattgctggtgagaactgtactgtctacaatgtggatgtttccaataacactgctggtctcatgggcggtgctatctacgtagttgctaacggtacagagttcagaaatatcactgcaaacaacaactctgccgaacgtggtggaggtgcctttatcgaaggtaacaatgtcaccattgacaatgctacattcaataacaatagggctattttcaatgaaaccaggccagatgaatccggtcttggtggtgcattggacattaaaggtgatggctgtaatgtaacaaatgttaattccactaacaacaccgcttatcgtggcggatccacatttattcgtggtgatgacacatatgttgcaaactgtaccttggacggtaacaatgctacccttagaggtggaggattgaacattgcaggtgacagatgtattattgatgatgttgatgtatccaacaacaatgcaggccttatgggcggtggtatctatgtagtatcaaacggtactgaatttagaaacatcactgccgacaacaacactgcagaacgtggtggatctgcattcatcaacggtaccggcataacaatcagggatggtgagctcaacaacaacagagctatctacaatgagtccagacctgacgaatccggtttaggtggaggatttgacattgtaggggacaatatccttgttgatagcgttcactccaacaacaactccgcttaccgtggaggttccactttcattcgcggttcaaatgttacagtgcaaaattgtaacttggacaacaacaccgctaccgtacgtggtggaggacttaacattggcggaggtgacggatgtaaggtcatcaacgtcagtgtgtccaataacgatgccggtgaagacggtggtgcggtttacgttattggtgacttcagtttatttgacaatgtcaattcaactaacaacacagctcaaagaggaggttcctctttcattgcaggtaacaatgtgactgttataaactgtaacctggacaacaacacagcttccaatcgtggtggaggtttggatgttaacggttcaggttgtgtctttgaaaacgtaactctctcaaactgtcatgctgataaggagggaggtgctgtttatgttagaggagacaacgtaacatttaacaatgtaacatctgaaaacaacactgcagaacgtggaggttcatcatttgttgcaggtgataactgtaaagttattaattgtgaccttaacaataacaacgctacctggagaggtggtggtttggacgttacaggtacaaactgtctctttgagaatgtaaccctttcaaactgtcactcagatgaggatggtggtgcggtttatatcagtggtgatgataacaggtttgtaaatgttacctcagtaaataacaccgctgtgaattatggtggttcaacctatataggaggaactagcaattctgtagagaattgtaccatatccaataacatagcttacaatggtggtggaatatttattgagggagaggattccaaattcacaaacaacaacattaccttcaataaggctatagctactgatgaagatcatgactttaacattatgggtggaggagtattcattttaggtggaaattccaatttcaccaataacaatatctcttcaaaccatgctaaggataatggtgggggagtgcaaatattcttcggacctgacacttttatggacaagatttatgcatttaacaacactgcagaaaacggtgggttcgcaaatcttctctactgtgataacttgaatgttacaaattcaaccttctatagcaatcatgctacaggtgacatatcacttgatagaggggaaggtggagctttccacatgtcctatgccactaacattgatgttcaaggtaactttagctataacaccgcaacaaacggatctgcaatatattctgatggttcagacatcagagtacatgattcaagtttctttgacaaccaggcacattcctggttcttattaataactccaagtgatgagacctatttgaaaggtcaggatgtaattattaacattagtcacattggaggggataatattgctaacgctatccataatagagatgctgaaagcagtattaccgtaagaaacgtaacttatccattttataacaatggagttttaataaacaaaacaaccccaattgatgaagatattcctatagagattataggatatgaaaacagtgataatggtaatttgatatatattgatgatttagaagataatcaagtcatatactataacattaccaatagggatacaaatgaatccatattggtaggtttcaataaaacagacatttctggtacagtatcactaagactcactaatttgcctgcgggcaattatgtagtaagtgcatattatccggaaactacttattatactgaaattagaaatgtttcatcatttagagtaattgatgttgatatggttgcaaacaagactgttgataatcagacttccaatgttggcgacattcgtgattggaatgtcacaatatggaatgatggtgcgtctgaagctcagaacgttaccatcattgatttcctacctgacggtcttaacttaactgataatctaaccattcatttctataatggcactggtggcctatggaacaatgctgtccttaatttaactagcaataacctgactttcagtgtatataacaaggcagatggcacctggattaatggtgttgccagttatgatgagtcaagcaatacctggacatattatgtccttagtttggctgataacagaacatttgcttacagtgttttcaatcaatccgattacactgatgcgtttggagaggccaggtattatgaggacatcaacagttggacctatagaaatatcagctatgatgtggataatgccgattggtattattacacatttgaatatgatgaccatacctatgtttatggtgttttcaatgggtcttacttcgttgatgcatttggagaggccaggtattatgaggacatcaacagttggacctatagaaatatcagctatgatgcaacaacaggaaattggtattattatacctttgattatggtggaaatacctttgtttatggcgttttcgatgagtctttcttcgttgatgcatttggcactgccatatatgatgatggttcttggaattatgaaaatatcagttataatgcaacagatggcaaatggtattattacagtcttaattatggtgatgattccaataatgtaacttactatattttcaatcctgaaaatttcgtggacgtatttggaagcaattatcattataatgctgaaaacaatacctatgtatatgtgaatgcatattatgacgctgaaaccgatagcctcattagaaatgacaccatttacaatgtcagttctggcatttggacaattaacaatagattagttgttccagaattggtgtcaattaatccaaatgtatcttacatcagtccggaaaagatttatcttgttaataagattagtttaagcatagcaaaccatactaattctactgacatttctttagatgttggcagatttgatggaaacggcagtgtgcttatgaatctcgtcaccaatgtgactaaacgaggtaactttaccaatattgttaatgtgactacagatagtccggaaaagaattacactaacaatgttgctaacaacagcactatagtttacaacgaccttgtaatcaataagactgtaagcgataatctaaccaatgtttcaggcattgtcgattggaatgtcacagttttaaacaatggtacttttgaggcagtcaatgtaaccatgaatgattacttgcctgatggtcttgatttaactaatttgacagtcaaggtctataatggcactggaagtttatggactaacgctactcttgatttaagcactatgactttgtctttcagtgtttataacgagactagtggtgagtggattagcggcattgctgcttatgatcaagctgcaaagacttggacttattatgttcttgcattggatgatgatgttttaacttacacagcattcgatgaaacattcttctctaatctctttggagatgctttctataatgagtctagcaatgtttggactttcgtcaatagaacatatgatgaagtaactggcgatttgattagcgaagtgaataccacttatgacaacaatactggcatttggactattggtgataagacatttgtggaatataaggtcaatttaaccctagttaatggcactaactctacaaatcttactttaggcattaatagtttagatgaaaacagtacaatggtcatgaatttagtaactaatgtgactaaatatggtatctttaccaatgttgctaatgtcactactgttactccagagaccaattatactaacaatgttgcgaacaatactaccgaaacccttactaacattaccgttactaaggtttgggatgatgctaacaaccaggatggaatcaggcctactagcgttaacattactttgattggtagtgatggcagtgaacgttctgttcttgtaactggaactggtggtgtatggaattacactttcacagatttacctatgtttaacagctctggtgattctattgtttacactgtcaatgagtctgttgttcctaatggctatgatgtcagttacaatcaatccaattggacagtatataacactcatgttcctgaagtgactaacattactgttactaaggtttgggaagatgctaataaccaggatggtatcaggcctactagcgttaacattactttgattggtagtgatggcagtgaacgttctgttcttgtaactggaactggtggtgtatggaattacactttcacagatttacctatgtttaacagctctggtgattctattgtttacactgtcaatgagtctgttgttcctaatggctatgatgtcagttacaatcaatccaattggacagtatataacactcatgttcctgaagtgactaacattactgttactaaggtttgggaagatgctaataaccaggatggtatcaggccaagcagcgttaacattaccttgattggtagtgatggcactgaacgttctgttcttgtaaccgaaaataacggtgtctggaattacactttcactgacttgccagtgtacaatggaactactgatcctattgtttacactgtcaatgagtctgttgttcctgacggctatgaagtaagttataaccaatccaactggactgtatacaacactcacattcctgagcttgtaaacataaccgttactaaggtttgggaagatgctaacaaccaggatggtatcaggcctactagtgttaacattaccttgattggtagtgatggcactgaacgttctgttcttgtaaccgaaaataacggtgtctggaattacactttcactgacttgccagtgtacaatggaactactgatcctattgtttacactgtcaatgagtctgttgttcctgacggctatgaagtaagttacaaccaatccaactggactgtatacaacactcacattcctgagcttgtaaacataaccgttactaaggtttgggaagatgctaacaaccaggatggtatcaggcctactagtgttaacattaccttgattggtagtgatggcagtgaacgttctgttcttgtaaccgagactgatggcgtatggaattacactttcactgacttgccagtgtacaatggaactactgatcctattgtttacactgtcattgagtctgttgttcctgatggctatgaagtaagctacaatcaatccaattggactgtatacaacgctcatgttcctgaagtgactaacattactgttactaaggtttgggaagatgctaacaaccaggatggaatcaggccaagcagcgttaacattaccttgattggtagtgacggcactgaacgttctgttcttgtaaccgagactgatggcgtatggaattacactttcactgacttgccagtgtacaatggaactactgatcctattgtttacactgtcattgagtctgttgttcctgttggctatgaagtaagctacaatcaatccaactggactgtatacaacactcatgttcctgaaatcgtaaacattactgttaccaagatttgggaagatgctaacaaccaggatggaatcaggccaggcagtgttaacattactttgattggtagtgacggcactgaacgttctgttcttgtaaccgaaaataacggtgtctggaattacacattcactgacttgccagtgtacaatggaactactgatcctattgtttacactgtcaatgagtctgttgttcctgttggctatgaagtaagttacaaccaatccaaccggactgtatacaatacacatgttcctgaaatcgtaaacattactgttaccaagatttgggaagatgctaacaaccaggatggaatcaggccaggcagtgttaacattactttgattggtactgatggcactgaacgctctgttcttgtaaccgaaaataacggtgtctggaattacacattcactgacttgccagtgtacaatggaactactgatcctattgtttacactgtcaatgagtctgttgttcctgttggctatgaagtcagctacaaccaaaccaactggacagtatacaacactcatgttcctgaaatcgtaaacattactgttaccaagatttgggaagatgctaacaaccaggatggtatcaggccaatcagcgttaacattaccttgattggtagtgacggcactgaacgctctgttcttgtaaccggaactgatggatggaattacacattcaaagacttgcctaagtttaacggtacaactgtacctattgtttacactgtcaatgagtctgttgttcctgttggctatgaagtcagctacaaccaaaccaactggacagtatacaacactcatgttcctgaattagttaacattactgttactaaggtttgggaagatgctaacaaccaggatggtatcaggccaatcagcgttaacattaccttgattggtagtgacggcactgaacgctctgttcttgtaaccggaactgatggatggaattacacattcaaagacttgcctaagtttaacggtacaactgttcctattgtttacattgtcaatgagtctgttgttcctgttggctatgatgtcagttacaatcaatccaattggacagtttacaacactcacgttccaaatgttacagaaattaatgtaactaaagtctggaacgacagtaatgataaatatggtattaggccttctaatgtgactattgagttgtttgctgatggtaagaaagttaatgagaccaatttaaccgctagaggtgcttggacttatactttcagtggtttgcctcaatataataacggcaaattgattaattatactattggcgaggttcgtgtagatggctacagcgttctaattactaataatactgttggaaattggactgttactaatacacctatagcggttcctaacatgacagttcaaaaaatcgctaacgataaagtggtctacatcggtaatgtgactagctttactattcttgttagaaatactggtgattgtaatttaagtggagtttatgtagttgattctgattatagcgcaggtttaagttaccttagatacgagaatggttctcgtgattggacttatgatggcgctaaatggactttagtcggtaatctcactactgataatcctactgctaactttactgtttactttaccgtagtagataatggtactttagttaacaatgtttctgcaggttccaatttaaccaatgaaaccaatggaactaataacactactgcttacaggcctaacatgactattcaaaaggtcagtaatgatgaggttgtttatgttggtaacattaccagtttcactattgttgtgactaacactggtgactgtaatctgtctgatattgttgtgactgattctgatttcagtgctggtttaagttacttgacttatgctaatggcactaggaattggaattatgatgctgtaggtcatacttggagtttagttggtgatttaaccaatggtagttctgccgagtttactgtgttcttcactgttattgataacggtaccttggtaaacaatgcaagcgttagatctaatttaaccaatgaaaccaacgcaacaaataacactactgcttacaggcctaacatgactattcaaaagattagtaatgatgaggttgtttatgttggtaacattaccagtttcactattgttgtgactaacactggtgactgtaatctgtctgatattgttgtcactgattctgatttcagtgctggtttaagttacttgacttatgctaatggcactaggaattggaattatgatgctgtaggtcatacttggagtttagttggtgatttaaccaatggtagttctgccgagtttactgtgttcttcactgttattgataacggtaccttggtaaacaatgcaagcgttagatctaatttaaccaatgaaaccaacgcaacaaataacactactgcttacaggcctaacatgactattcaaaagattagtaatgatgaggttgtttatgttggtaacattaccagtttcactattgttgtgactaacactggtgactgtaatctgtctgatattgttgtcactgattctgatttcagtgctggtttaagttacttgacttatgctaatggcactaggaattggaattatgatgctgtaggtcatacttggagtttagttggtgatttaaccaatggtagttctgccgagtttactgtgttcttcactgttattgataacggtaccttggttaacaatgcaagcgttagatctaatttaaccaatgaaaccaacgcaacaaataacactactgcttacaggcctaacatgactattcaaaagattagtaatgatgaggttgtttatgttggtaacattaccagtttcactattgttgtgactaacactggtgactgtaatctgtctgatattgttgtgactgattctgatttcagtgctggtttaagttacttgacttatgctaatggcactaggaattggaattatgatgctgtaggtcatacttggagtttagttggtgatttaaccaatggtagttctgccgagtttactgtgttcttcactgttattgataacggtaccttggtaaacaatgcaagcgttagatctaatttaaccaacgaaaccaacgcaacaaataacactactgcttacaggcctaacatgactattcaaaagattagtaatgatgaggttgtttatgttggtaacattaccagtttcactattgttgtgactaacactggtgattgcaacctttccgaaatcgttgtgactgataatgattatagtcttggcttaaaatacagcagatatgagaacagcagcagattatggaattataatggtggcaagttcactctggtaggtgatttggctcctggtaattccgcaaacttaactgtgttctttattgttgttgacaatggtacattagtaaacaatgcaagtgttaaatctaatttaaccaacgaaaccaatgcaacaaataataccactgcttacaggcctaacatgactgttcaaaaggtcagtaacgatcaacttgtctatgttggtaatgagaccagtttcacaatcattgttactaacactggtgactgtaacttaactggtgtttatataaaagatgatgatttcagtaaaggtttacaatacaacaataagttcgttcctgttaaaggcacttggacttatgctggaggcagatggaaccttgaaggtcagttaactgttggtgataatgctagcataactgtttactttaccgtaattgacaatggtactttagtaaacaatgctaccgctggttctaatttaaccaatgaaaccaatgctactaacaataccactgcttacagacctaacatgactgttcaaaagatcagtaacgatggtgttgtctatcttggaaacaccactagtttcactattgttgtaactaacactggtgactgcagcttatctgaaatcgttgtaactgataatgattacagtgctggtctacagtacagcagatatgcgaatactagcagtaaatggaattatgatggagataaattcactttagtcggtgatttggctccgggtgcttccgctaacttaacagtattcttcattgttattgacaatggcacattggtaaacaacgcaagtgttaaatccaatttaaccaacgaaaccaatgcaacaaacaacactactgcttacagacctaacatgactgttgaaaaactcatttatgaggatacagtctatgttggagacacagctatctttaccatatttgttaaaaatactggtgattgtagcttgtctgatgttgttatttgcgaatattggttcagtgaaggtttagagtacaatggtgtttgggtacctaacggtgaccgcaaatgggattatgacgatgaaacaagaacatggaccttaataggagatcttgctcctgaaggtttcgctagttttgttgtctacttcaacgttaccaaaaacggtactttatataacaacatcagcgccaaatccaatttaaccaatgagacaaacgctaccaacagcacaagagcatatttacctaatatgactgtaatgaaagtagctaacgatgaaatcgtttatcttggtaataccacaagctttacaattgttgtaagcaacaccggtgactgtaacttatcagaagttgttgttaccgatacagattacagcactggtctaaaatataagaattatattaatggcagtgctaattggaattacaacaatggcgaatggtcattggtcggtgatttaacacctggcagttcagctaactttactgtgttctttaccgttgttgaaaatggtactttggtaaacaacgcttcagcaagttcaaacttgactaacaaaacaaacacaacaaataacacaactgcatacagtcctaaaatgactgttttaaaaattagtaatgatgaatctgtttatgtcggaaatatcaccagctttacaattcttgtaagcaatgttggtgattgcgatttaagtggaatatatgttatagatgatgattattcaaatggtttactctacaatagatatgagaatagcagtcgcaagtggaattatgatggttccagatggaccttagtcggttcccttgaacctggagattctgcaaacttcactgtattctttgacgttgttgaaaatggtactttggtaaacaatgtttccgctggttctaatttaaccaacgaaaccaacaataccaacaatactaccgctaaacctgtctgtgatttgattatttacaaagctgttaatgctacagaaattcttgtttatgatattgtcgaatggaaaattaccgttgtaaatcttggtccggatactgctttagatgtaattgttaaagatcttttagacaatggacttgaattaattagtgtaagcggtggcaattataataatattaccggtgaatggaatattggtgatttagagcctaatactcccgtttctttaagcttagttacccgtgttcttgtaaatggtactattgtaaacactgctactgtaaatactacaagccatgaatctaattatactaacaataatgcaagtaactttactgaagctgactatctctgtgatttagtcatttctaaagccgtaaattgtactaattgtaatgtttcagatctggtacaatggaatattacagttactaatcttggtccacatgatgcttctaatgtcattgtaaaagaaatcttaccgaaaggtttagaattaattgattataatgttagtgttggtaattttaatgaagttattagtgagtggtctattggtactttagaaaaggatactgcagtatctcttgtcttagttactaaagtccttattgatggtactttaattaatattgctactgttaatactactactctagataataattatactaataatgtagcaaataacactacagttgctagtccgatttgtgatttagtcataagtaagatcgttaatgctacaaaagtgaatatagatgatatactcacttggactgtaagagttactaataacggtcctagtgaagctttaaacgtatgtgtaagtgatattttacctgaaggtcttatgtttgttggttataaggcaagtacaggtaggtatgatgacgaaagtggaacttggactgtgggtaaattgtcaagcggttctagtgctactattaatatatatactaaagtcatcgaattaggaaatatcactaacccagtttctgtaaatactactactgttgagtctaattattcaaataataaggctaacaatactacagaagtttatcctattgttgatttagtaattgaaaaatcatctgataaaataaagtataatgtaaatgatacaatgcattggattataaaagtcatgaatgaaggaccttgtgatgcaattgaggtttatgtatatgatgcattacctgctagtacaaaattcattgcttataattcatctaagggaactttcgatgcggctaaaggtatttggtctattggtgatttagcaaatggtgaagaagtgacattagacatatgttgtaaagcacttatttctggaaactttactaacaatgctactgtaaattgttcaataacagataagaacacttctaataattttgataatgcaactatcgaaatcgctgataacaaatccgataatccagatcctattcctgataaaccaaaacatggtgtggatattagtttaagaacaggtaatcctttactaatattcttgatggcaatctttgctatctttggaggtataggactaagatgcaggaaagaataa

SEQ ID NO: 2133 - DNA, 597 bp, Methanobrevibacter ruminantium
  source 1..597: mol_type = genomic DNA
atgaaaattttaggaatttgcggaagtccaagagatggggcttcaagttttctgcttaaaagagcattgaatgaacttgaaaaagaagaaaacttcgaaacaaagtttataagcgtgaaagacaagaatatatccccttgcacacattgcaatttttgccttgaatcaaaaggagagtgttcaattgaggatgatatgaatgaaatctacgattcacttaagcaagctgatggaataatatttgctagcccagtgcattttggaagcatatccgcccaattgaaggctgtaatcgacagatgccaagctttgataatggaggaccttgacatcttcaaaaataaagttggaatttcaatagttgttggaggggacagatgtggaggacaagagttggccatccaacagatcaatactttctatcttttaaacaaaataatccctctaagcggaggatcatttggagccaatttgggagcttgcctatggtcgcaagacgaagggaccgatggagtgaagaatgatgaatatggtttaaaaactttggacatgaccataaaccatttcaaggaatttttattagagtttaaacaatga

SEQ ID NO: 2134 - DNA, 1569 bp, Methanobrevibacter ruminantium
  source 1..1569: mol_type = genomic DNA
atgagcgaagagtcaagcagttccaaagttgcaaaaggcagcgcaattatcctaataggaaacgttatcttccgtgtaggaggatatatctaccgctttttaatggcttcccttttaggacctgccgcatatggaattctcggacttacaactcctttccaagggatctttcaggttctctctgctgcagggcttccacctgcaattgcaaagtatgtatctgaatacaatgcccttgatgagaaggaccttgctcgccaaactatttttacgtcccttaagattatggtattcctagggcttttcttcggattcataatggtattcgtagccgccccaataattacaaactactatcacaagcctgaggctcttcttccattgcaggctgtaggtctcatcactcctttcagcgttatcgttggaggattccgtggagccttccagggagtatataaaatggaatacatcctctatacaagagctatcgaacagatattcatgattctaatggctacagcacttgttcttcttggattatccacccttggtgcagtattaggttccgttttaggttttgtagcatctgcaatctctgcagtctacatcttcaaaagatatatgggcaaatacatacctccggcaaacccagactttaagtttccattgaaggacgagctgaagctggctaagacactgattttcttctcaattcctgtaaccgttgcagcccttgctgaaatgggtatctacagtatctgcacacttcttatgggagccttcctccctgcagctgcaatcggatactttacagcagcagaccctatcgcaaggcttcctttagtcgtatcaaattcccttgctacaacaatactgcctgcaacatctgaagcatatgccttaaaggaccaagtgctccttgaaaaatatgtgacagcaccatataagtatggaatgttctttgttattccaatgtgtgtaggaatagctatcttcgcaagaggaataatgggacttgtatactttacaaacgctgcatatatgaacggagcagtatccttagcaattctagttgtcggaatgactttctactcagtatacacaatatccggaagcatagttcaaggaattggaaatccaagaatccctatgtatatcctgattataggatgtgtaatcactttaggtcttggatggtatttaatcccgctttttggaatagaaggaggagctttagcaacaacaatatcctcatttataatgatggtgccaatgttcctgatacagtttagaatgacaaaaacacatgctccttattcattcttaattaaggtgacagttgcatccttgataatggcaatcgtatccataatcgttccgaataatgtatatggactaatcaccggcattgtggtctgtccgattgtttatgtgatcatggtaattcttcttaagaccctatcccatgaggacgttgctgaatttagaaaatacgcaaataagctagggccaataagaaaatatgccaacaagttattggactttattgacaagcatagttccgactaa

SEQ ID NO: 2135 - DNA, 693 bp, Methanobrevibacter ruminantium
  source 1..693: mol_type = genomic DNA
atgacagatgtaaaagctggagtagaatataaaatcaacatagatggaaactcctttctattagatgagaagaaattcaatcttcttttatacatcaatgaaagcggatccatcacagaggcagcaaaaaggactaaaatatcctatagaactgctctacactatattgaaaaaatagaaaccacattaaacatagccattgtaagcactaaaaaaggcggaaccggtggtggcggaggtaccaaactcaccgaagaaggcttgcaaatcgttaaggaatgtaaaaaaatcaatgctatcatggagcttcacagagatgtcaatgagcttgaagctgaaatccttgaagtggatgcaagcaaaggcataatgaaaatcaagatggaagaccttaccatgaccatgcctttgaataagaaatatgtggttggagataagatacttgccttaatcagctatgacaatatattcataatgctagagcctcaagcatccagcatcagaaacatcttcaagggaatcgttactgaaatgagacttcaggatgagatggtgagagtcaagatagacattggcggagttgacatattctcagacataactctatcagcaggtaaagacttagacttaaaccttggaaaagaagtttatattggctttaaagcattgtcaatagctacattgaaattataa

SEQ ID NO: 2136 - DNA, 105 bp, Methanobrevibacter ruminantium
  source 1..105: mol_type = genomic DNA
gtggcacgtgtatcaaacttgagttattgtcatgtttgtacgctatgtgcaatgaaatgcggtccagatgcaattaaaataataagaaatgcaccagatgaatga

SEQ ID NO: 2137 - DNA, 603 bp, Methanobrevibacter ruminantium
  source 1..603: mol_type = genomic DNA
atgaatatagaaaaacgtgatatcatggaaagaactgcaaaagtttcaagaaagacttccgaaacagatattgaaattgaaatgaacattgatggaaaaggaaaatacgatatagacacaggggtcaagttctttgaccacatgctagaatcattttcccgccacagctttattgacttgaacatcaaggcaataggtgacattgaaatagatgatcaccatactgttgaagatgttggcatcctacttggagaggcttttgctaaggctataggagataagaaaggaattagaagaatgggacatgcgattgtacctatggatgattccgttgcaactgtagcgattgatatcagcggccgcagctattgcaatatgagtcttgactttagaaacgataagattggagaccttagttctgatattattgttcacttttttgaatcctttgcatctagtgccaaaatcaatatctatggaacttgtgaaggctttaatgatcatcacaaggcagaagctgtttttaaggcatttgcaaagtcaatctatgatgcctgtaagatagagcatgatgagattcttagtactaaaggcgtgctttaa

SEQ ID NO: 2138 - DNA, 1221 bp, Methanobrevibacter ruminantium
  source 1..1221: mol_type = genomic DNA
atgatgaattataattatgatatagatatggaaaatccatttgagcctggaaaatcagtatctccagacagatttaaaggccgtgagaaaaacattaaaaagattctaagggatatgggtaaagttcaaaagggaaatgtacagcattttttcttaacaggcaataaaggcatgggaaagacttccttagctgaatttgtaaaggaatatgtcgaaataaactatggcatgattggaatatatgtatccaataagggaaataattctttaaattcccttatcacagctataattcaagcctttttaaataaaattcctcgcaacgttctttttgaaaagataaaaaccctattttctagcattgaaagtgtagaaatcataggcaatagggtaagctttaagcccagcaaaagccttattgttgatattgaaaaggactttccttattacttaaatcagatcattaaagatctccctaccaacaatggtgttttccttataatcgatgacattaatggtttaagcgagtctaaaaagtttgttgattggtataagcgctttgcagacactatagaagtaaataggggggacttcaatcttcccttatatgtcctatttgcagcctatcccgataagtttgacagcctagtatatgaagagccatccttcggcagaatatttcattatgatgaaattgacaggctaagcgatttggaggtaaaggaattctttaaagacaccttttcaagtgtaaataagcaaatcaatgacaattccttggaattattgtcatatttctcaggaggaatccctttgataatgcaggagataggttattcaatctattggttatcagaaaagaccacaattgatgaagaggatgtcttaaacggcattatggaggcaattggagagcttgagtcaaagcagataagaaatatcgtaaatcagatttcaagcgatgactttgaagatttattgcttaagatagcaagccaaaagcagcaaagttatattgaaacagactttaaggagaaattgaattgggatgagtacaatatatgggatgagtttttagattgcatgataaaattgggagtcattaagacaagcaatcgaaaaagcaatttgaagttcagcttttccaatcagttttatttcacttatttctggttgaaatcattaaaccttcacgaggaattcgctaaaattgagtcttaa

SEQ ID NO: 2139 - DNA, 501 bp, Methanobrevibacter ruminantium
  source 1..501: mol_type = genomic DNA
atggcatcaatagactattttgaatgtgaagactgtggattcagatggaaagatcaaggcccactcctcttctttctcaacgaaaacaataaaatagaagaatacatactccttatctcaaacatgaacttggattcaaattccaatatctcaggtgatatcatagagacctattgcacaaattgcgataagaagataaagatatacattatctctacaataaaaagcccatatgatgaggattcggctatagagtcaataagaaaattggcagatgaaaatcagatagacaataaggcccttaagcctttcattagatcttcagacctaaaggacaacttttacatcgtggatttatatagaaacttctattcaaataaggactaccattgtcctaattgtgatagtataatttccaagtatatcttatcaaaaaacaagtgtcctaagtgcggtggagagataagctcagtggatggtctctgtttggataaattttaa

SEQ ID NO: 2140 - DNA, 837 bp, Methanobrevibacter ruminantium
  source 1..837: mol_type = genomic DNA
atggtagttaaaattggtatcgtaaaaagtggtaatattggtacttcaccagtattagatttattattagacgaaagagcagacagaccaaacatcgatgtaagagtatttggatctggagcaaaaatgaaccctgaacaagttgaagacgtcgtacctaaactcgaccaattcgaccctgacttctgtattttcattagcccaaacccaggagcacctggtccagctagagcaagagaattattatctgaaaaagatcttcctgctattatcattggtgacgcacctggtaaaggtaaaaaagatgaaatggatgaacaaggtttaggttacattattgtaatgtccgacccaatgatcggtgcaaaaagagaatggttagacccaactgaaatggctatctttaacgctgacatcttaaaagtattagcagaaactggtgctttaagattagtacaaaaaactctcgacgctgttattgctgctgctgatgctggcgaagaaattgaattacctaaactcattgttactgctgaaaaagctgttgaagctgcaggatttgcaaacccatacgcaaaagcaaaagctatcgctgcatacgaaatggctggagctgtcgcaggcttagacatgaaaggttgtttcatgaccaaaggcttcgaaaacttcatcccattagttgctgctgcacacgaaattgcatctgctgctgctaaattagctcaagaagctagagaaattgaaaaatccaacgacactgtcttaagaactcctcacatgaaagaaggaaacttaggttgcaaagttgatttaatcagcaaacctgtagacaaataa

SEQ ID NO: 2141 - DNA, 669 bp, Methanobrevibacter ruminantium
  source 1..669: mol_type = genomic DNA
atgttaaaaatattggcagctgataaaatggacaaaaaattaatagtcagatatataatgctcattgtaggtgtaatcataatgtctatggggatagcattatctatcaaagcaactttaggaacatcccctatttcatctgttcctgctgtcctatcaattgcctttccctggactgtaggagagtttacaatagttttcaatgcacttcttgttatttttcagatggttttgcttagaaagatcaccatctcccaaatagctcagatgcttgtatgcgtcctctttggatatatgattgacttcagtcttctaatacttaattttccaaatcctacagattatatcagccaatggattctatgtatcataagctgctttgtacttgcatttggcttgcttattgaagtaaagtcagatatcaccatgcttccaggtgacggttcagttgtagccatcgctgaagttacaaatagggactttggacagatcaagccattttttgaccttaccatcgtatccattgcagccatattggcattggtatttttaggccaccttgagggggtccgtgaaggaaccatatttgcagctattgttgtcggattaatcatccagttttatgacaggatatttggatataatattgatgcttatttggctgattag

SEQ ID NO: 2142 - DNA, 315 bp, Methanobrevibacter ruminantium
  source 1..315: mol_type = genomic DNA
atgaaaaaggtaaagattacagttatgaaaaaggcaagatacgatgacctcattgaaaaatacgaaaatccattggagcatgaatgtgaggtagagcttggagatgtcttcattgcaaatggttgggaaaaaccggaggacttctgcagcagcgcttgggatagcatctctccatttgtattggcattatccagcgggggagaagacttatatgatggatggatgaaggataaaaagtcagcaatgatatcctgcaatgatgggtttcgtcctgtaagtttctatcttgaggcaatggacgaggatgctgattaa

SEQ ID NO: 2143 - DNA, 1125 bp, Methanobrevibacter ruminantium
  source 1..1125: mol_type = genomic DNA
atgaattctaaaaatattgctattgctggtgagatcaccccttcaaagaccataattcctctaattcaaaggttaaatgaattagataaggaagataaattaaacttcaaaataaacaagatatatggtctttatcatggggagtcatctaaattgcttcttgagccgtattgtgatgagctttatgatataggtcaaggaagacgaggccaaaagaagaactcaactgctaaattggcttatcttatctcaagagacataataaaggcattcaatgctctaaaaggaaataacatagaccttctaatcactgcaggcaatgcaggtgatgtaagaaagtccattgttgcagccaaccttttaaaaatccctattcttcatatagagcaggacatctacaaccctattgaagtaatttcacatgccaatctagtcactgttcctaaagaggattataaggactatcttgagagaaaatataatttaaaaaacgttgcatctattgacggctatcctatggctaaatatgtggacaatcatataaaagacaataatctgattgataaggaagagatatatggcgaatatggagttaaggaatttgtgctggttgttcttggaggggacttaaaggatgatgagattgagcctcttataagatcagtggaacagcttaatctaaagactctcattgctccttataggtttgatagaaatcttgttgaaagccttgtcctttcaccaaacattaaggttctcccacagtatgttgaccttttaagctttatgaatgcagcatcccaccttatctatgctgcgggaatgggactcaccattgaggcgggtgtattcaatatcccttcactaaagattgaaggatttcataaaacccatggaagcgtagaccttgcaagggaacttaatattcctattgtaaaaatagatgagattccagatgcctttgagaagctatccgctcatcaggataataatcttgttaaaaacagtgaaatcgccattgataagttggtggatctaatcaatggatttgatgagaatggtcttcaaaagagcggattcaagtcaacaaagcaaatctggaacagtcgtaaggtgtttagataa

SEQ ID NO: 2144 - DNA, 1182 bp, Methanobrevibacter ruminantium
  source 1..1182: mol_type = genomic DNA
atgaacttagaaaacaaaagcattgaccttttaaatccatttatcataatcgctatggtaattgtattcataatcattgcccttcctatgtggtatgcttaccaaaaattgccaagtcccagcatggacttatttctatacataggattaggccttattttcttcatatttggaattttgataagcaatctattgctaaacagatttttaaaaaaggatctctctttagattcccttaaggacactataaaaattagcataagcaaaaatccaaaaaagctttcaatctttgaatcctactcaagaaaggaaatgattctggtcatcatggttttaatcggaatcatccttcagataatcaacatagttcgtcttggaggaataccattattctcagcaacactaaaggctgaagctgcaggaaagatatggctcgcatcatatataatcttcttgccatttattaacatactccttgcagaattcaatagggattcacattatcttttagtatttttaggcttgcttttatttactttaactggctatcgaactacaccaattgcaatcgtgttatctatattaattacattatattatacaagaaacataaaattcaagtatcaggtcctatttttaggactctttttagtcattgcagtggcacttctgcttgctatagggttcatagcggtacaggcaataagctggcagcactggagccttaatccaatagaacttgtgtcatatagggcggcatttacattgaatgttcttggccatgcaatcagcaatcagtttgcaactgccggaaagcttttctactcaacccttacaggatttttcactcacacagaccctagggttcttgtaggtcaagcaactcttggaaggaaccattcaataacatctacaatattcggaccggctcttcttgactttggattgattggaatgtgcattcaaatgctcttgatcggattcattttaaagacattgcacagcattcaaaagcataagaaagaggtttattcagcattttatggaatcttgcttgcacagacaataatttggatagagacaggtccaactgatgtggtggtgtggatattctatttgattgcaattgttcttatggcgcttttctttttaaaaggttccagcagggacttggaggcttga

SEQ ID NO: 2145 - DNA, 16956 bp, Methanobrevibacter ruminantium
  source 1..16956: mol_type = genomic DNA
atgagaaataaaaagattttcatttttactttaatgattgtcatgctattatcgcttgctgcagtttcagcaaatgatctggataatcttgaagttgatgatggaaatgttgtatctactgatacggtaatcaatgatgtgcccatggagagtacgtctagtgataagattgccctgaatgtagattcgacacaatctaatactacagagatacttaatgaaaatgaaataataacaaataatagtactttaagcattgatttgaatgaatcgattacaaatgaaatcagttctgatcatgaagattcatatcaggctgatagtaatcaagaggattcctatttcacttcagatggaaacatttatgttaaagtgaaaacttccatgcttaaagcggacggcgatcagatttattatatacatcctgccggtagccctacagcaacaggaactcgcgatgatcctttggatagtatgaattccgccttgaatttatttacttcagatggaacacacactattgtggttatggatgggatttataaagatacatactatgactataacaatacagatgtagacacaaacttaagcaacttgattataaagtccgatgaaggggcaagtccacattttaacctgagcacttcagattatcgaaggtctttatattgggcctttacaggagaaaacataactatagatggattgaagtttactgattcacaatacggctcttttaatgaggatggggtatacaaataccatacagtattgagattcattaattccactaatgttttggttgaaaactgtgtatttgacaatgacggataccttatcaatgcaactgattcaagtgatgttgttattaaaaattgtaatgtttccaatagtaatcgttcaaatgtatttaatgttttgaattccagctttactgttcaggattcaaatttatccaagattagagatagctatattaccaattcaagttttaagctaatcaacaacaccatctgtaacaatgtaaattcaaatttgttcacagtaaaaaattcaagtttggatattataaacaacacttttaaagacagcaattattcatcatattatgtgttccgtatttataacaataatgaaacctatgcgaatttcactggaaataattttacaaaccttacaggcacagattaccttcttcaggtaaactactatgttaacgataataccactgtgtcatttgtcaacaatagccttaaagacgttagtttaggtcttaatattagatattccaatcttactatggacggcaactcctttgacaatcttagtcttagttcccggccttcttattctggaataagtacaagttattcaaatgtatcattcaccaacaataatttcaccaactctgactcttacatttatttaggctatggagtcaatgctacaattgaaaacaataactttactgacaatattccatcatactatggtcttttgcgagctgagggtaacagtcatgacattaaagaaaacaatttcacaaacaacaaaggaaattgttcaattattcaacattactctggcaatgctacaattcatggaaatcatttctataacaattccttgaatggatgtggtcatgttatcaatgttactagtacttcaggttctgaaatttataaaaatgactttgtaaacaacagcgccgacaatggtactgtatatctatatggatcatctaatgtacatgataacaatttcaccaataacagcgtcaccggactcggaggagctatctattcctatagtttttataatattaatactacaattaaggaaaatgtctttgatggaaacaatgctagctttggtggtgcaatctattatgaaaactatcctagctataataataaaagggagattgtaaacaacaccttcataaacaacagcgctgactttggtggagcaatctactcaaataaatcaatcaacaacattatcgatgataatgactttataaacaacagcgctcaaattggaggagctatttttgttgattatctatacataaacgatttcagatacaacaacaccaataacaccattagcaacaacttgtttgcagaaaataatgcgcaaagtggtggagcagttgtattatattcacaaaacagcaccgtggaaggaaacagattcatttccaacaatgcaagtcgctatggcggaggagcattgattacaagcggaaataactctatcatagtaaacaacacctttgcaaacaacacagctcaattatatggtggtgctattggaaccaacgactctaagataattgacaataagtttgaaaacaacagtgcttatcaggctggagctatcttaacaatcaattccacaattcacaacaatgatttcgttggaaatgaagcaactagaggtccggcaatagtatatatagacgactttaattacactgcactcacttactacacttataactgcagctgcgaaaactgcagcaattgcagtggatgcagcgattgtgaatgctgtgtaactactatagtagaccctgaaactggggatgagataaaaattattaattgcagcaactgtgacggttgcaattgcacttgcgaaaactcaaccgtaactgaacataatataacattattatataataataccggcattgatatcgacgaagacgtttacgcctatcatgaaaatcagcttttaagggttgccaaggaaaacaatggaatgtattacctttatgacaatgttaatgttacaagcgctgaaaattacacttattgggcgtattgcatagagcagaacaattcctacccttggctaggaaatggaactcttggagttcatgtagatgatctatactttgtcagaaacagtttggatgactcttatgttggtgattaccttaagatattgatttcatacttctatcataatcttgatgaggataagatcaatgtcaaggagtatatctatatctttacagacaccgactatcgtagcaacaatgaccgcataatccaaaagattattaagctagccaataatgagtcaacagttcttgagaatggtaacaactggataaacggagtttacaactgccttgaattctcaacattcataaaccctaccacaaggcagaacctgattttaatcaatggatgcgaacctctagacaagcctgactttaacataactaaaaaagccaatgctacacatgtgaaaaccggcgattacatcaactatacaattcttgttacaaacaacggaacatgcaatttgcatggtttgaaagtgactgaaagaatgaattccatgttgatatatatgggcttcgatgatgttagcgataattggacccagacaggggatatggaatggatgctgaatagaaccttgaaggtcaacgaatcggcggaattacacatctacttcatgacaaataaggtaaccagctataccaacattacaaatgtcattgaggcaagaagtgatgaaagtgacacaaagatagcagaggaacatattgaaaccatatatcctaaattggtttaccgaaaggtcagcgtggaccctgttgcctatcctgaatccacaattagattcatacttctcgttaagaacataggtactgccaatgcatataatgtagccattgaagacagtggctttagctcaagtcaattgttatatcaagggacatggtccaactataagggaacttggtataatagcggatctagcgcaacatcaaccggacgcttcactcttaatgggtatttggctcctaaccaggaggcgggggtttacgtttcctttaaattgaaggaaggtgttaaaggtacaacagtatccaattcattcaatgtatatttaaacaatacttgggatggaagcgcttccaattttacaagagttgtctcttctgcaatgaaagttgaaaagctttgggtcgatcctcttcctattgcaacaatcggcgatgaagtaactttcgccataaatgtcagcaatgttggagaggccaatctgacaggagtctatgtagaggacttcttcccaagcggattggaatacattagattctataataccgatgcccacaactggactcattatgaaacccttgacggcacccataggttcattttacaaaacaccctacctaacagtcaaaccagcaggacactttcatcctcaatcatttatgttgtatttaaagccaatgaaataggcgatttaaccaatacagctattgtaaaaagtgactacactgaaaatgtcactgataatgaaacaatcattatcagtccttatggaatgaaagttgagaaattcagcaacaacccgatttcacaatctgacaatcaggtttcatacgtaatcagggttacaaacacaggaatatataacttgacagatgtttatgtaaatgaaagccaaaatgaatacatggtttatgaccatttcgaagatagttccaataaatggatctataacgattcaggcgatagcccaagatgggtttacaatggaagcttggagaataatacctattccgacttcattgtatattataacatcactaaaatacctgaaaacggattaatcaaaaacaccgttagggtatattcaaatgaaactgtagagagaaatgcaagcaatgaaaccaaagtctataaattatccctttggaaagtaagcaacaatcctgtatccagacttggagaccaaatttcatttaccattgttgtcaaacatgaatataatggaaattcttatgataaggacttatatcttgacggcgtcttcgttaaggaactgattcctgacggcttgacctatgaccattacgttgatgaaagcggcaaatggtcctatgattacaataccgacaattgggtatatagcggtactttagttcctaatactgaaactaactttaccttgttctttaacgtaaccaaaatggagaacttaacaaatgtagttattctcggtaccaatcaaagcaataatgtaaccgtcaacaacagctccgacagcagatactacagcatgcttgtagataagataagcttgaacgagactgtctttaaaggaaacatcacagaattcctaatcaaggtaactaataacggtgacttgaacttgactaatgtcactattcgcgaagtcattcctgatggattggtctatgttggatatcttaataaaaccggcaaatggatttatgaaggaggaaatggagcttcaagcgatgatcaaccaatgtggacttatcaaggcatattggctccaggagaatctgcagagttcatcattctattcaatgccactgaaacaggcacatttttaaatatagtttatggaacctctaatgaaacagaggaatttgtcgcagaaaacactacaaaggttttaaatcctctcttgtatgtagataaggtcacattgaatcaaacagtatatcgcggtgacttgactgcattcgagatattcattgtaaacattggtgattgcgatttacacgacctttatattgatgagatattccctgacggccttgtctattatggattggtggatgatacaggttcattgtcctatgatgagaaaactcaaagaatcagctttgacggaacattgaaagttcgcgaaactttggtattcacagtcatattcaacactacaaaggtaggcaacttcaccaataaggttgaagtgggctctaacgaaaccaagaaggaatatgctaataatactacccaagtattggaaaaggacttaaatgtcacaaaggttgcaaacaataaaaccgtcgtcaaaggtgacaagacagaatttacaattgacattactaatgtaggcgaatgcaatttaacaaatgtatatgtatatgaggaatccttcgagggactttcctattatgcctacatcgatgaaacaggcaaatggtttaaaaacggcaataaatggatttatgatggtgtcctgaaacctggcgaaagcgttaagttcactgttgtattcaatacaaacgagacaggcaactttaccaatatcatcgttgcaggtgccgatggaatcccaaataaaactgcaaacaacactacagaagtgcttatttgcgacatttccattgaaaagctcacacttaacaaaacagttataagcggagaggacacccaatttgccatccgtgttaaaaacattggattaggcaatttaactgatgtgaccgtaactgacagcttccctgaaggcttgacttacaagaccttcattgacaatagcggaaaatggtccaaaaacggcaataaatggatttatgatggtgtcttgaaacctggtgagtctgccgaattcattgttgtatttgctaccaatcaaacaggtaatttcactaactttgtaagtgtaagcaccaatgaaaccaaatccaagaacgcttccaacaaaacagaggttgtcttggcagatgttgaaattcaaaagatcaccctcaataaaactgttataagcggtgaggagactctatttgaaatagttgtcacaaacaagggcattattgatttgtccgatatcactgtaactgacagcttccctgaaggcttgacttacaagacttatattgacgaaagcggaaaatggtctaacagcggcaacatttggacttatgatggagttttagctcctggtgagtctgctggattcattgttgtgtttgatactaatcaaacaggcaatttcaccaactttgtttctgtaaagactaatgaaaccaaatccaagaatgcctccaacaaaaccgaggttctagtggcggatattgaaattcaaaagatcacacttaacagaacagtcatcagtggtcaagagaccatgtttgaaattgttgtcacaaacaagggacttgttgatttgtccaatgtcattgtagctgacagcttccctgaaggcttgacctataagacttatattgatgaaagcggaaaatgggctgtcaacaataataaatggctttataatggtgttctagctcctggtgagtctgctggattcattgttgtgtttgataccaatcaaactggtaatttcactaactttgtaagtgtaagcagcaacgaaaccaaaaccaagaatgcttccaatataacagaagtcctattggcggatattgccatccaaaagataactcttaacagaacagttgtaagtggccaagagaccatgtttgaaattgttgtcaccaacacaggaatcattgacttgactaatgttgttgtaactgacaccttccctgaaggcttgacttacaagaccttcattgatgaaagcggaaaatggtctaacagcggcaacacttgggcgtatgatggtgttctagctcctggcgagtctagtggattcattgttatatttgacactaaagatccaggcaactttacaaatattgttagcgtaatatccaatcagacaggcaataagtctgcccgtaacattactgaggttatcgttgcagatgtaggcattcaaaagataactcttaacagaacagtttatagcggtgaggagactcaatttgaaattgttgtcaccaatacaggaatcattgacttgactaatgttgttgtgactgacaccttccctgaaggcttgacttacaagaccttcattgatgaaagcggtaaatggtccaacagtggcaacaaatgggtttatgatggcattttgactcctggcaagtctgctggattcattgtagtgtttgacactaaagatataggcaattttaccaatgttgtatctgtaaacacaactgaggtaggtcctaagtattcctataatataactgaagtaattattaaggaaaacaagaccaaccataccaatgaaactcctccaggtcctaaccctccaggtcctagcccacctggtcctaaccctccaggtcctaaccctcctaagcctcatgttcctacacatccgcataagcctatagttccaactaatccgaaccagcctaaattggttaaatccaataaaaatccgttatctgatgtgaaagcaggtaaccctatagctttattattaatcgtattagtggttcttggttctgtgccatttgcatcatgcgatagcggtggaactagaagaagaagaaaaaccaaagagagaaaagcagcgaaacataaggaaatcgataagaagaaaggcattatcattttatccggatgtcttttattgatggtttctgtttcagccatttcagcagctgacactggtgatttaggctatgatgatgctggcagcgatgttgctgtacaatcagtaagtcacgaaccggctcaatattcctattcaactagcgaaaacatggcatatgatagttatgattatggcgattataatgattatggtggctatggcgattatggcgattatggcgattatgatggctatgacacttacaatgactattacatccttgacaacaacgaaacagtctatgaagatggcatggaaaattcagctgatggaaacagcgctgatgcagctaacggtcaagcaaatcaatatgctgaagatggttctgatatggaactttacagcattgatgatgaatcttatgattccaatgacaactatgacaattacaaagaatattcctatgatgatgattcatcccgcgaagatgcatcttcaattgtaagatataatgattgtaccgtaaacggcgataataaagtcaaatcaatttacacatcttcttcacttgctgaaggggaaggtgtagtggtttatgtttcccttgatggtagaacaggtgctgaaggtacctatgacgatccgctcctcactattggggcagcattgactaaattgtccactgtcagttctactgagacaaaaaccataattttgaaaggcggaaactattcaggaaacaattatagatatttatctactcgtttgaataatttgattataaaggctgaggacggcgctgaagtaaatgttgatttaaggggaatgaatcaaaacagtttgtattggactttctatggtgataatgtaactgtaagcggcattaactttatgaatgccaatatgacatcttacaaccttaacaattatcacgctgtattgaaatttatcaactcaagcaattctcgtgtggaagattgttcattcagcaatttgaaatcctatggaattcttgcaggaaacagtactgatgttgtaatcagcaattgtaatttcacaaatggaagctctagaatgttcagtataaccaattcaagtgtcactgttgaagattctatcatgaagaacttctctaccagctacattagaaattccacattcactatggtaaatagcaccgtgacagatttcaatgatgacgacatctttaatttcgcaaacactgatttggatattagggacaatacattcaagaatttgacattcccaaacaaaaccaattttcaacgttttggagtgttctatgcctgggatgataatgctggcataagttataatttcataaacaacacctttgccaatttcactggaacagatgcttatatgatttatcgttcagcatcctcttcagtcaaaccaatgtgcaaagtaaacttcacagacaacaatgtatcaaacgtatctgttggagttaatatatattatggaaatatcactgttgaaaataacagcttcgatcatatgagtccggccaatactttacgtttcagctattcaaacattgacataagagataacaactttacagattctaactctacccatgtttattcagatagatgcaatggtacaattgaatataataatttcattaacaactctgcattgcctgtttcagctgagtggggtaatttgaatatttcctttaacaatttcactgacaataagggcaatttctctgcaggagccattcaatctactggagtagtgaatatatttaacaatactttctgtaacaattccgctcgcgttggtgctgtgaatgttgccagcattagtagtaataaaaccatttacaataacacatttgtcaacaacacaggtgttagcggtaccctttatgtcaatggaaatgcaacagttcatgacaacagattcatagacaataatgtaagcgaaaatggaggagccatctatgcagcatatgataatagctataataattattataatatttctgctaatattactgacaatattttcgatggaaatattgctaataagggtggtgcaatctattatgaacaatataatagcgcttatggccttgataacttggcaaacaacacatttgtcaataacaaagccgaatatggtggtgcaatttattcaaataaaacagtgaatgtcactatttcagagaacgagtttgtcaataacagtgcaacaattggaggtgctatctttttagacaattatacctctgcctttaacactggaacaaacattactctaaacaatttcacaaacaactctgcacaaagtgctggagctgtagtggtttatggaaacaacaccaatgttataggcaataactttgttggaaacaatgctacacgctatggtggtggtgcacttgtgactgatggtgcaaatggattgatttataacaacacatttgaaaacaacaccgcattcctatatgcaggagccatcggaacaaacaacagcaagatcataaacaacactttcactaacaacaacgcttatcaggctggagcaattttaacaatcaattccactatacataataacacattcagtggaaatgacgctacaagagctcctagtgttggctatatagacaattacaactacactgtttcctcttactacgtttactactgtagcagtgaagattgcagcggatgcactgcatgcgaatcctgcacaagcacaatcatcgaccctataaccggagcggaaatcaaggtaatcaactgctctaacggtgatgtacctgagtgcatttgtgaagattcagttgcaacattgtataatattagcctattgtacaataatgaaggtctcaatcttgatgaagatgtttatgtttacgatgaaagcaccattcttagagttgctttaaacaataatgatatgtacttcctatatgaaaacgcaagcattccaaatgccagcgaatatcattactgggcatactgcattgaacagaacaactctaagccatggcaatggaacggaactactggtgttcttgtagatgacttgtactttgtaagaaacagcctggacggctcttatgttggagattacattaaggtattggtatcctacttctactttaaccttgacgaggatgtctataacttgaaagattatgtatatgtatttacagacactgactatcgtgctaatacagatagggtaattcgaagagttattaaccttacagaaagagaggacacatctcttgtaaacggcaataactggattaacggagtttataactgtctttcattccatagctttatcatgcctaccacaagacagaacctgattctcattaattcatgtatggctatgcagactccagacttcaatcctcagaaaatagccaacaaggagaatgtcggcactggagacattgtaaactacacagtcactgtttacaacaatggtactgtgtcactgcataatgtgactgtaaccgaaaggcctaacagcatgcttacctatctatcattcactgatttccgcaatcaaggatgggtgcaaactggtgagatgacttgggtcttgaataggcctctgaaggtccatgaaactggtacattcaatataaactttagggtaaataatgtcacatatctcactaatatcacaaactatattgatgtaggctgtgatgaggtttcaaacaaatctgcttttaccagaaccgaaaccaaatggccacgcatacaggttcaaaaaatcactttggaccaaaatgtaactccaggatcaactgtaagattcttgcttttagttaaaaatataggaacccttgaagcaagcaacatcactttggtggacaattttaatagaaatgaattggagtacgaatatagatgggattcatataaaggtaattggtctggaggacacggatggggaggaagcagctcttcttggcatgtcgacacattatacttgaaccaagtcctctatccgggtcaagaggctggagtgattatctacttcaaagtacctaacaatgtaacagtagggtctgcttataattcagtaaatgcttatagaaacggaacatctgaaggttattcaagcaattacacaattatacaacgtccttacttttcaatttggaaaaccttggttagctcaaaaacttcaaccataggagaggaagtggtattccaaatcaacgtacagaatacaggttatgtgaatttaactggtgtttatgtagaagacattcttccaataggattgaaatatcttaggttctacaatacagataatcataactggactcattttgtagatgaagatggaaaacatagattcctattgcaaaacactcttcctacctattattcagacagtcagaattatgttgcccgactttatattgtctgcaatgctacagaatatggtaattggtacaaccttgctacaggatacacagaacagacaaataagagtacctctcaggcaaatgttacaataattccatttggtgtatcaattgagaaagtcagcaataatccaatatcacaagttggagatcaggtctcatttaccattagggtaagaaacacaggaatatataacttaactgatgtctatgtaaatgaaacaaggaactcctatatggtattcgatcactttgttgacaattcaggcaagtggattttaaatgaatcttatgcaacttcaggcgtgcctagctggaattataatggtacttttgaagtaggagctgtaagcgaatttgatgttttctataatgttactaatattaattattatggaaacataacaaataccgcttatgtctcttccaaccaaactaccaacaggtctgtttccaatcagacagctgcctataatattaaggtaagaaaaatcagcaataatgctacagcaagggttggagatcaagtttcgttcactatccaaatatcacgggatggctattcttgggaaagtcctttctcattatatggcattcatgtaaaagatttggttcctgatggcttggtatttgaccatgctgataacagttactattggatttataatgaaagcgatgagacatggtactatagatctggtttgacagcaggcagaaccattagccttacattgtactttaatgtgaccaaggcagccaacataaccaatgttgcaattgtcggagtcaataacagtacagtgaaaactgcaaataatactacaaacagtatttaccataacttgcaagtggaaaaggtcactttaaacgaaacagtttacccaggaaatatcacagaattccttgttcgtgtgaacaacaccggtgacaataacctcacaaatgtattcgttaaagaaaacattccaaacggacttgtttactatgattatattaataagactggcaaatggaattatacggaagatgatgacggacctatatggctttatgatggcattttagctccaggagcattcggtgaattcattataagattcaatacaaccgtacctggaatctttgtcaacaatgtcgtagcaggctctaatgaaacttccaataagtccactgagaattcaaccaaagtcttgggtccaataatctctgttggaaaaatcactttaaacaagaccgtatatattggagagctaactgaatttagaattaaagtctctaatgatggggactgtaatttatctggcgtatatgttgttgaatacatcccagatggcttaaagttcgttgaatttaaagatgaaagtggtttatggacttacaatgaatcaagcagaacattctattacaatggaattttagaacgtgatgattcccttgagtttgtcgttgtatttaatgcaacaagagcaggcaactttaccaatgttgttcatgcaggatctaacgtgactaacgaatcagttgcaaacaacactactgaagcattggatgtaagaatggacattcaaaaggtcaccttaaacgaaaccgtattcactggtcaggaaaccggatttgtaattgtcgtttccaataccggacttaaggacttgactgatgtccgccttaaggaaatttatccagatggcttagtatattcacgcttcatagatgattcaggcaaatggtttaacagaggtgattattggatctataatggtgttttagctgttggagaaagcactaacttcactgttatattcaacacaaccaagagcggcacattcaacaatacaataattgtaagctctaatgaaacaggtcctaagaacacttcaaataccactaaggtagttgtagcaaatgttaccgttgcgaagatcacattaaatgaaactgtcatgagcggagagcaaaccagcttcgacattgttgtcaccaacgacggaatctataacttgactggtgttgtcgttaccgacgccttccctgaaggcttggcttacagcggcttcgttgatgcttccggcaagtggatctttgatgattccaaaggaaatgcttggatttataatggcactttggctcctggtgagtctgcaagctttacagttgtctttgacactgatgaagtaggtgaattcactaacatagtcaaggtaagcactaaccaaacccaagataagaacgcgtccaatataaccaaggtaatcaagcttattccaaatgtcgcaatccaaaaggtcactcttaacagaacagtctacagcggagagcaaaccagcttcgaaattattgtaagaaataatggagaaatgaatttaactgctgtgacagttactgacgccttccctgaaggcttggcttacagcggcttcgttgatgcttctggcaagtggatatttgatgatgctaagggcaatgcttggatttatgatggcattttggctcctggtgagtctgcaagctttacagttgtctttgacaccaatcaaacaggcaactttacaaacattgtaacagtaagcagcaatcaaactaaagagaaaaatgcatccaatattactgaagtaatcattaaatctgttccaggcattgagattataaaaatcacaatcaacagaactgtatacagcggtgagcaaacttcatttgacattgttgtaagcaatgatggtaatgtcaatttaagcaatgtgactgtaatcgacagcttccctgaaggcttgacctacagcaatttcattgacgacactggaaaatggtttaacataggcaataagtggatttataatggaattctacttcctggtgagtctgctggtttcagaattgtctttgataccaataagtctggaaacttcactaaccatgtaaaagtcacaagcaatgagactggagagaaaaactcatccaatgttaccgaagtaatatttgctgatgtcgctatccaaaagatcactcttaacagaacagtctatagcggagagcaaacctgcttcgatattgttgtaactaatgttggtgaaattgacttgactaatgttgtcgttgctgacagcttccctgaaggattggattacagcagctttgttgatgaaagcggcaagtggatctttgatgatgctaagggcaatgcttggatttatgatggcattttagctcctggcgagtctgcaggatttacagttgtctttgacacaaacattacaggtaacttcacaaacattgcaactgtaagcagtaatcaaaccagcgagagaaacgcttccaatattactgaagtaatcaagctcattccagacattgctatccaaaagattacccttaacagaactgtctatagcggagagcaaacctgcttcgatattgttgtaactaatgtcggtgagactaacttgactaatgttgtcgttgctgacagcttccctgaaggattggattacagcagtttcgttgatgaaagcggcaagtggatctttgatgagactaagggcaatgcttggatttatgatggcattttagctcctggcgagtctgcaggatttacagttgtctttgacacaaaccttacaggcaacttcactaaccttgctacagttagctgcaatgagaccgaggataagaacgcttcaaatattactgaagtaatcaagctcgttccagatattgctatcataaaggtcacacttaacagaactgtctatagtggccagcaaacttcatttgacattattgtatctaatgtcggtgaaactaacttgactaatgttgtcgttactgacactttccctgaaggcttgacctataacagtttcattgatgagactggcaaatggatctttgacgaagaaaaaggaaatgcatgggcttataatggtactttagctcttggagaatatgcaagcttcacagttgtctttgatacaaaccttacaggcaacttcactaactatgtaagtgttacaagcaatgagactggagagaagaactcatccaatgtgactgaggttattaaagtgcctaagaatgacactcctccggtacctgttcctccagagccagtggttcctcctgaacctgtaactcctccagagcctgtaattccaaataaaaaagttccaagacatgaattaccaagaactggtaatccattaatggtcttactcattgctcttgcagcagtaggattaagttctgtaagaagaaaaagagaataa

SEQ ID NO: 2146 - DNA, 1509 bp, Methanobrevibacter ruminantium
  source 1..1509: mol_type = genomic DNA
ttggggttatttagggttaaaagaattccggatgaaaaacaaataaaattaggcattagaactttagattttaacattccagaggatcatatttctcgttttgttggggatttcattgacgaatattatcctcttttaggaatcaaagaaaataaaaagaagaaagggcgtgacagttttccggtgaaagagatgttaaaattgcttatttatgctaaaatcgagcatattgatagtatgagattcttagcagacatggtaaaatatcatgacgtatataaattcgttggaaatggaatttgtccttcagaacgatcattacaacgatacagagaaaaatacggcaaatattacaatgaattgttaaaagcaaccttaaaaaaagcttcagatgtggattacactgatttcaacgaagtttccattgacggaaccatcaaaaaagcatacaattcaaaaaataaagtgatcacagaaaaagaaactgaaatattaacccgttacttcgaaggaggccgtgtaagtcaggaagagctagataaactccataaaccggcccgagagattcttgaaaataaaaaaatcagcaaccaagaaaaattatacctcttggatgacattaaaacacaattcacactgtctggtcaaaaatcagtgccagtaaccgacatagaagcacgttggatgaaaagcaagaaaggaaactcacaaataagctataatatccaatctgcagtcgattacgatacaaaaatgatttgtgcaataaacgtcgtacaagcccctacagaccattaccaattgccaaaaatcgtagataaggcaataaacaacacaaacgtaataccaagattcgtattggcagatacaatctatctgaatgaagaaagcttatcatatcttgcagataatcaaataaatggagttataccagatagaaagcaatccaaggaaaaaatcggaagattgaacaagaacccatatcacaaggatcacttcaaatacttccctgaaattgatgcatttgaatgtccagaaggccaaataatgtattttttcaacaaatacactgaaaaaaatgatgatttggacaagccagacaaaattaagcgtttatattccaattatggtgcttgtaaggcttgcaattgccgtgaaaactgcctttcatccacccaaacccacagaacaatcaccgaatatggcggaagtttaaagaaagcaatgtgggaaaaaatggaaacagaggaatatatggaagaatatgcaaaaaggtcatctgtcgaaggaccttttggcattttaaaggaacaattccatatagaaagcgaagtagtgataggaaaaacaaagacagaagaaagaatactattagatgccgtggcttataatttaatacgattatttaacttagaacaagaaataaaaaatgataaagaagatatagttgatttctgtgagaaaatttctgtccaagagaaattagaggtcagagcaaccatattttaa

SEQ ID NO: 2147 - DNA, 690 bp, Methanobrevibacter ruminantium
  source 1..690: mol_type = genomic DNA
atgttagagaaagaagtaaaacaatataaaaggggaaatagtttcacttatcgtattgatctatctaagaaagataattttgaaggtggagaaaaaataatgatttttaggatgagcgaatatgaagcttatctaaatgaaatagaagatctaaagagtcaaattgaagaaaataataaaaccatctctgaacttagggaaagtcgcagcgaagctaattccaatataaataatgttgttgacaatcataataaggaaatagcagataaaaataaggaaattatggatcttattgaagagaacaaatcagctatccaaaaatgttatgatattattgaggaaaaggacaagctcctgacacaggctaatgaagagattagaatcgaaagggaaaaaaccgatgccactcgcaaacaggcccaggaagatattctcaatgagagaaaacgacatgatgaattaacccttgaaaaggataaacaattgaaattagtcaatgaacaacttcaggatagtctaaaagatatagcttataaggataaagtcattaccgcagataggcttctaattgaaagatataaaaatagaggttttgtagatcgtttacttaatagattgcctgatgacagcgatttaaaaatagatgacgtcaaggaaacctatgttttagaagctgaaaagaaggaatag

SEQ ID NO: 2148 - DNA, 138 bp, Methanobrevibacter ruminantium
  source 1..138: mol_type = genomic DNA
atgatattatcattgcatctattttgctatggttacttttttatagactttgatgatattgtattgtcattgcattctatttgtaatttattttttatagattttgatgatattgtcattgcatctattggatattga

SEQ ID NO: 2149 - DNA, 1443 bp, Methanobrevibacter ruminantium
  source 1..1443: mol_type = genomic DNA
atgaaagtcgtacttgctggaactggaagcgcagttggaaaaactacaatttcaaccggaattatgaaagcgcttagtgatgaaaatgtccaaccatttaaggttggccctgattttatagatccttcctatcatacaatagctacaggaaatgtgagccgtaacctagactcctttttcatgactgattttcaaataattaattcatttgaaagagccttaaaaaaatccaattctaatatgggtatcatcgaaggagtcagaggtctttatgaaggaataagtcctataggagatgttggaaacactgcttcaattgctaaggccatagacgcacctgttgtgcttttgatggatgcaagaagtctcgttaaaagcgctgcagcagttgttcttggatttaaggcacttgatccagatgtcaggattgaaggagtcattttaaataaggtcaaaggtcagcgtcactataaaaaggctaaagaatctgtagaaaagcttgctgatgttccagttataggaggcattccaagagacgataagattactgtagaggaaaggcatctcggccttgtccctgctctcgagaaggaaagaattacaagaaacattaatctttggggcgagattgcagaggagtatatagatttggatgcacttaaggacattatgaagacaagctccaagtctactgcaagggacaataagaatattgcaatggaaaagcatgaagatgactttaatagagagcatactgaagcaatcgacctagaggttaccaatgactcaaagccagggcaattatggaaaaccggcaacaggaataaggtcaagattggagttgcccaggacgagatattcactttctattataaggaaacccttgaatcattggaggaaaattctgcagagattgttccattcagtccattaaaggatgagcatcttcctgatgtagatgcattatacatcggcggaggatatcctgaagtgtttaaaaaagaattatccgataataaaaccatgttaaatgatatcaataaattccataaggaaaatagacctatctatggtgaatgcggagggttgatctacctttccaaatcaattgacggcttagatatggttggtgcagttccatactcatctgagatgactaataaggttcaaggccttaattatgttgttgcaagggccaatcaagataatctcatatcaaatgagggcgatgtattcagagctcatgagttccattatactaaattaaatattgataaaactgattctttagtattcgatgtcttaagaggaaggggagtcctaaacaatatggatggtgtctgtgttaacaatactctggctaattacattcatattcatgcatgttctcatcctaactttggatacaattttactattaatatctcagagttagatatttag

SEQ ID NO: 2150 - DNA, 1116 bp, Methanobrevibacter ruminantium
  source 1..1116: mol_type = genomic DNA
atgtcaaccttagaaaagatgcaagtattagcagattcagcgcaatatgatttgtgcgactatgttagccatagcaagagctctcaagtaaacctgccaggaatataccatgcaacaggccacaacggatgcaagataccgctctttaaaacactgatgagcaataagtgcaaaaacgattgcaaatactgcataaatcaaagcaaacgtgatttcacccgtcttgaacttagcccggaagagcttgcaaaggcatttctccactactataacaacggctatgtaaacggcctattcctatcctctggaatctctaatgaaatcgatgaaacaatgaacaaaaccatagagaccgcaaggatattgcgaagggactatggataccaggactacatccatcttaagataattccaggctcaagcaaggattcaataaaaagggcgatgagccttgcaaatagggtaagcctaaacatagaagctgcaacaaaggacggccttagcgaaataacctcaacaaaggactataacaaggacatcctaaagagaatagactggatgcatcagattgcaaagaaaaatccggattatgcaaaatcaggccacaccactcagctcattgttggagcaaacgatgaaagcgattatgaaatactaaagcgaatggacagcctatatagaaaggcagaccttagacgcagctatttcagcgcattctcccctgtagagggaacagactttgaaaaaagagaagcatgcagcagtgatagaactgcacagctataccatgcagacgccctattgaatgactataagtttaaggtgaaggagcttgtatttgatgaagatgataagttgttccttaatgaggatcctaaaatcctagcagctcgtgaaatggatatcttcccagttgaaataaatacagcaccttatagggagcttataagagtccctggaatcggcccgaaatcagcaaggagaataatgagcataagaaaaaagatgccttttaaaaaactggaagaccttcaaaaattaggagtcgttataaaaagggcagagccttatattcaattggaaggcgcttatcaaaactctttagacaattattaa

SEQ ID NO: 2151 - DNA, 216 bp, Methanobrevibacter ruminantium
  source 1..216: mol_type = genomic DNA
atgtctttagaagagattccttttgaagagcaattacgtggagttatcctagaaggagaaattgaacgtgctgaactaaaaggtgtagaaaaaggtagaaatataatcatcattaaactattggaaactatgaatcctcaagaaatttctgagagcttagatcttcctttagataccatcttaagtattcaagagtctcataccaaaaatgtttaa

SEQ ID NO: 2152 - DNA, 888 bp, Methanobrevibacter ruminantium
  source 1..888: mol_type = genomic DNA
atggcggatgcgaaagattctaaagatgataaagtttatcatcttgaggatctattatttgtaaagtgtctagttcaatttgaagaatttccccaatatattactggatttaaggatattcgcaattcatttgacagtcgttttgcttcttcttctaatttttctagtttaaatcttgattgcgttcggcaaagagaggatttgagtcttattgatattgagcatcatagctctataaggccagatttaatgagaagaaattatgaatatgctgtaaatctgtataatgtgactggatatactgttcatccttttatcttttatactggagacttgcctgttaataaaataatccgtatgaatgattttaatacttttcagcctcagtggtttattttaaaggaaaaagatggaatgaaaagcttaaataacattaattataaaacatttaataaaattgattggaatgtttttgatgctatagattttgcttggatacctaaatttgatattgacatgtcaattgaagattgtatagttgaacttgctgaaatctataaaatgatgcctgctgacaataagttcttgcagttttgtagagaaagtctaaaattgtggacaggtaagtatataaaggataaagaaagattagataaagttaaggagtgtttaaatatgtctgagttagaagagattccttttgaagagcaattacgtggagttatcctagaaggagaattagaacgagctaaactaaaaggtgaagaaaaaaataggattgattttatttctaaagctttgaaacatatgagtcctaaagaagtttctaatatgtttgagcttcctattgaatatgtagatgaaattgcaaattcttattctaaataa

SEQ ID NO: 2153 - DNA, 1536 bp, Methanobrevibacter ruminantium
  source 1..1536: mol_type = genomic DNA
atgtatgcaataaacatggaacagaacaagaaggaattaaatatcccagatgaaatcaagatatttgacaccacccttcgtgacggcgaacaggctccaggaattgccttgaccgtggatgagaaaatcaagatagctcaaaggttggatgagcttggagttaacgttatcgaaatgggatttccaacagtttcaagcggtgagcgaaaggcagctagagagatggtaagccttgggttcagctctgagttatgtggccttgcaagagtggtgcaaaaggatatagatgcattgattgactcagacctttcatatgcacacctgtttatcggaacttctccccttcacagagactataagctaaagaaatcaaagacagagattctaagccaatccatggaaatggtggaatatgcaaaggatcatggccttaaagttgaattttcagctgaagatgccacaagaaccgaactgaactatcttatcgaattctacaagggagtggaaagcgcaggtgcagacataataaatgtgccagacacagttggaatccttgtgccatcaaccacaagaacattaataagaacccttagaaagaaaattaacctcccaataagccttcattttcataatgactttggtttagcagtatcaaactccctaataggcatagaggaaggtgcaaaccaagcccactgtacaataaatggaataggcgaaagagcaggaaacacctctcttgaagagcttgtagtaagccttaaaatcgcttatggagcaaacctaacagtagatacaaccaagctatatgacacttccaatttcatcggatcaattacaggtataaagatgcctcctacaaaaccgatagtgggagacaatgcatttgcacatgaatctggcatacatgtagatggaatcttaaagaacagctcaacctatgagccaatagccccggagatagtagggcataaaagaaggatagcccttggaaagcatacaggccatgctgcaatcaagtcaaagcttgaggagttcaatatagaagtgacccaaaagcagtttgacaatatctataatcaggtcaagacccttggagacaagggaaaatgccttacagatgatgacttaagatccattgcaataacagaaataggaacaagtggcaaggaatacataaagctcctaggtcttagcgtaatgacaggagagtcagtctcagcaacagcaacaattaagctttcaatagacggaaagattatggaaacatcccagataggagtgggtccagtggatgcatctgtcttagcacttaagacacttgtgcaggacagagttaatataagccttgatgaatacagacttgaagcaatcacaggtggtacagacgcattagcagaaacctttgtagtgatttcagacgacaaaggaaacaaggccacaggaagggcaaccagagaggacgttattctttcaagtgtaattgcggtcataaactcaataaacaggatacttgacatccaggagaactgttaa

SEQ ID NO: 2154 - DNA, 792 bp, Methanobrevibacter ruminantium
  source 1..792: mol_type = genomic DNA
atggctaccgtagacagtttcctaccggatttcatacaaaccaccttcttttcaggatacactatattcaatacagtcatctacactctaattcttcttatttttataatagcaatcataaagatgtttaagaagataaaaatagaccctatctccataatctatcctatcatcccatatatctttcttggatctctcatacgtgcattggttgacaatggggtctatccaaaaacagtcttcttaataacccctggcctttacatacttgttggccttataacaattgcatcactgctattcagtctatttctatacaacagaaaaaacatcgactatagatacaccctttcaatcataggagtcatacttctcataccaaacataatcatgattcctagactaaacattattccagtaatctatgtgctaatcacatggataatagcaagttcaatatttgtcttgatttcatacattatcccatttttcaaggacaggataaacttgtcaataatttcagcacatatgttcgatgcttcaacaacatttgttgctgtcgagttcttcaactacagcgaacagcatgttttagcaaatactctatatcaactatttgatacatctattacaatgtttcctatgaaaattatagtcatcgttgcagtattatacataatcgatcaatatttcgatgacgaaaccataaaaagtctattaaaattaaccgtatttgtattaggattggcaccaggtttgagaaactttttgactatggcaataggtgtatag

SEQ ID NO: 2155 - DNA, 666 bp, Methanobrevibacter ruminantium
  source 1..666: mol_type = genomic DNA
atgaagtttgatccacatattcacagtgttttttcaggggactcacgttcggaaccaatagacattctcatacaggcccaaaagatagggctagatgcaattgcaataagcgaccataatgaaataaaaggctcccgacttgcaagaagcatacctggagatataattgtagttccctccatagagatttctacagagaaaggccatatgttaggattgggagttgatgagattattcctaaaggattgtcagctgtagagactgtagatagaattcatgatgctggtggattagctatagttcctcatcctttttcctattatagacacggtctattctgcaatgtggattctaacttaggagtggatggtgttgagaccaagaatgcaagatacatatttggatactcaaacaaacaggcccaaacattggctgagcgaaaaaggcttgccagattaggagcaagcgattctcattttttagaatcaatcggggatgcctatacagaggtaaacactaaaggatatgattctgtagatggcatattaaaggcaataaaacacagacgctgcagggccatgggtcatggaacaagcaactttttggttgcaaaagaagtatttgttaagaaggtgcttagaaggtatccgaaaagggacgaataa

SEQ ID NO: 2156 - DNA, 1077 bp, Methanobrevibacter ruminantium
  source 1..1077: mol_type = genomic DNA
atgaagattttagctattgatgtaggaactggtactgaagatatcttattatacgatacagaaaaggaaatagaaaactctatgaaattggttattccttctcctcaccttacaatcggacaaatgataagcgaatcagagtctgatttatactttgacggagtaatcatgggtggaggaaaaataaaggacagatgtcttgaacatatggaaaaaggatataagatagtatttgaagaactatcaggcaaaaccattcgtgacaacattgaacaagtcaagtcatttggttttgaagtggtaaaagaaggtagctttgacaaggagctaaatgaagattcaagcttaaagtatgcagattatcaaaagatatccttaaaggatgtggatgtagataagttaatagacattttcaagtcatttgacctagaccttgaggttgatgagcttatcattgcagttcaagaccatggatacagtgaagatatgggagatagggacttcagatttgaaaagatcaaggaaaaattgccagagcctcttcctccggaagtttttgcaatggaaagggaagaagttccagagtatttcacaaggatgcagtctgtaatccaatccctagaggagtcaaatccagaattcaagccagttcttatggataccaaattcgcttccttagcaggggtctgctatgacaaggaagttctaaagctaaacagtttcattgtcatggacattggaaacggtcatacaactgttgcgtccattgaaaacggcaagatacaaggtgtttttgagcaccatactagagatcttagtccagagaggtttgaagagcttgtacttgcacttgcagacggcacaattaagcatgaggatgtccacgatgagggaggtcatggcgcatttgcactaaatcctatctcaaagatagagaaggtagttgttgcaggtccaaaaagagcccttgtagaaaagacaaatcttgactattatcatgcagctccaggtggagatgtgatgatgactggaactgttggtctagtaaaatcaatggagtacctaaggaaaaattag

SEQ ID NO: 2157 - DNA, 1302 bp, Methanobrevibacter ruminantium
  source 1..1302: mol_type = genomic DNA
atgcaatacagaattgatttaactaacgatgaagtacctacaaaatggtacaatattaacgctgatttacctgtagagcttcctgctcctaaaaacagtgaaggaaaagatcaaatatcaaccttacctcaaatatttgtaaacgagtgtctaaaccaagagttctccacagaaagatatataaaaattccatctgaagtaagagagctctaccaaagattgggaaggccgactcctttatgcagagcaagaggattggaagaaaagctcaacacaccagcaaagatctattataagagagaagacacctctccaactggaagtcacaagttaaacagtgcaattgcacaggcatattatgcaaaaaaagaaggaatcgaaagaataacaaccgaaacaggagccggacaatggggtactgcattatgtcttgcagcatcaatgatggacattgaatgtacagtatatatggtaagggtttcatacgaccaaaagccattcagaaagaccatcatgcaattatacgacggaaacgtacacgcatcccctagtgaaaacactgaagtgggtagaaaagtccttgcagaaactccggacactcctggttcccttggaatagcaatttctgaagctgtagaagacgctttaaaatatgatgatgtaaaatacacccttggaagtgttttaaaccacgttatcctacaccaaaccacaattggtcaggaaatcaaattacagcttgaaaaagctgaagaagagccagacacaatgattgcatgtgtaggtggaggaagtaacttcggtggatcattattcccattcattaaagacaaaatccaaggaaacagcgacactgaattcatagcagttgaaccttcagcttgcccaaccttaacagaaggtgaatacagatacgactttggagacaatatgggattcactccgcttttaaagatgtttacattaggacacaacttcgttgctccttctgtacacgctggaggacttagataccatggtatgaacactcaaatatccttgcttaaaaacgaaggttacattacccctgttacagctcatcaaagagatgtatttgcagcaggtaagatgtttgcaatgtgcgaaggagtcattccagcacctgaaacaaaccacgcaattaaagcagctatcgatgaagctaaaaagtgcaaagaaactggcgaagagaaaactattgttgttaacttctcaggccatggtttaatggactttaaaggatacgcaagttacatggacggatccatggaaaattccaaatag

SEQ ID NO: 2158 - DNA, 777 bp, Methanobrevibacter ruminantium
  source 1..777: mol_type = genomic DNA
atgggagaaacaatagctgtaatgaatcagaaaggcggatgcggaaagacaacaactgtagtaaacttggcaacttcacttgctgccatgggaaaggcagtccttgtagtggacatggatccacaagcaaacgctacaacaagctttggaattaacaagacagaaatcaaaaagacagtatacacagctttagtaaacgaatgcagtgttcaaaaggcaactataccaacaaggatagaaaacctattcctcctgccaagcaatatcgacttaagcggtatcgaggtagaattaagcaaggaagacaactaccacattgctttaaagaaactgcttgagccaataaaaggcatattcgactatataatcatagacttacctccatcccttggtataattacaatcaactcattaatcgctgctgacagcgtaatcatacctatccaagcggaatactttgcacttgagggactggctgatcttatgaacacaatcaaccttgttgaaacaaggctaagaagcccaactccaataaagggaattgttctcaccttatacgatgcaagaacaagattaggcagagaagtatatggagagcttaaaaactacttcaaaggaaaggaatacatctttaagacagtgattccaagaaacatacgtttagcagaagctccaagttacggcaagccttgcatagcatacgaccctgaaagcaaaggatcaatagcttacctcaaaatggcaagagagctcttaaagctggatggtgaaatataa

SEQ ID NO: 2159 - DNA, 747 bp, Methanobrevibacter ruminantium
  source 1..747: mol_type = genomic DNA
atggcaaaaaaacaaaattctggattaggaagaggactagattcattgattccaaaaattaaagaaatagaacaagatgtagaagaaggattatcattagaagacttattaaaaaaatcagatgatgaagaggaaatagaagaaacagtagaagaaacagttgaagaagaagcaattgaagaacaagaagacatttcaactgaagaaactgaaactgaagaagaacctgatgaagaagaagatgaacctgtagtagaaaaagatgaaacagaagaagaaaaaatagaaattgaagatgaacctaaagaagaactcgaaaccgaagctaaagaagaggaaacctcaaactatacaaacatcttcagtaatgatgatgaaatagtaactgaaaacagtacaaaaaccatagaaatttctagctcaaaaaataatgataaaaatattgaaagttcagttaatttaaacaaagaaactgaagaaagtatcaaaataaatgaagataaaactaaggaaaatgattctgatagtgttcttagtgaaaaagaagaaaaactggtatatgaagttatcgaaactgttgaaaagaatccaagaatcacattatggtctgcaagatcagctgctgtattaaggtatcttagaaagaccgaacctgaattcagcataagcaatgaagcatcaaatcttattgatgaggcaattgctcaaaagtatccagaaatctggacattgtttaatcatttatga

SEQ ID NO: 2160 - DNA, 759 bp, Methanobrevibacter ruminantium
  source 1..759: mol_type = genomic DNA
atgaaattaggattttcactgctttcactgtttatgaaagaagttgatgagatgcttgagatagctgtagaaaatggatttgacagtgttgaactgcttgcagagggaccatacagacaagacatattattggaaaggaaagaaattacagaaacattccactcatatgaccttgacatatacattcatggtgtaaatgtggacataaaccttgcaagcctaaacgagggaattagaaaagagtctgtaaagcaaacaaaggaatgtcttgaccttgcagatgagataggtgcaattggggttactgcacaccctggaaaaataggaaggcctgaaaaataccttagagaaatggcattaggttttttaactgaatcaacccatgagcttgttgcatatgctgaagataaggaggcgaagatatctatagaaaacatgccagaacgcttttcttatcttggaaatagagcatatgagctagagaatctgaccaatgagactggctgcaatattacaatagacttaggccatgttaacacatgcaaagaccaattaagcttctttgaaattcctaacattctttattatcatattaatgataatgatgggataaaagacaagcatcaggccattggagatggaacccttgacttgaatcttttaaaatatgtggacaatggcataattgaattgaataattttgataatgtcttaaaaagcaagaaagttattgaagatttcttagcaaaaaatcaatga

SEQ ID NO: 2161 - DNA, 807 bp, Methanobrevibacter ruminantium
  source 1..807: mol_type = genomic DNA
atgataaaaatgactaaaaaagctattgtatttgataactctggaacattgcttgagcgatttagagtcattaaagacctatctacaggtgaatttatcactcatgtaaactctttagacctaattgacagttgtctaaatgcagctttagttgttcttcaattcaatacaaatcgattaaaagatttagacccaaatactttaataagcgattttgtattggaaaataatattgattttgacattagctattattcaacagacgtttccaaagaagaaataaaggccattttagaaaaggacacagctattatcaaagacattacagacactttccctcttttaaaggaaagggttcctggaatggagctctgcaatggatcagcagtcatcatagacatagaggaagagagaatttcctatacaataacctctgctggtcaattgtttagcggagtaaaggatacaatagcaaagcttcaagacagcggaacagatgttttcattgcttcaggagacaggtcaggagatataaggaaacttgcaaatattactggcgttccagaagatcatgcctttgctacagcaagcacagacagaaaggcagaaatagttgctaatcttcaggatgagggttataaggtaatgatggttggtgatgggcctaatgacattttagcatttcaaaaggctgatgcagcagttctcacaacagaacagaaggatggagattttccagacaagttaaagtcttatgctgattttgttatagaggatattagtgaagtgctgcaaattgatttctaa

SEQ ID NO: 2162 - DNA, 951 bp, Methanobrevibacter ruminantium
  source 1..951: mol_type = genomic DNA
atgcatctagacagccctttaaaaataaaaaacatctgcttatccaatcgcatagtcatgcctcctatggctagggaggagagcatagacggaaaggtcacatatcctctgattgaatactataggatgagagccaaatcaacaggactgattatagtggaacatgaatatgtgagagaggaaggaaagtcaagccctaaacagctttcaatggcagatgacagcgtaatagatggctatatagagcttaccgaaagcatacacagagagggatcctttgcaatagctcaaataaaccatggcagatatgggtcaatatcttcaaataatgtcaatttaaatggaatatcaatagaggaaatcgaagatataaaaaaggcctttgttgaagctgcagttcgaagccagaaatctggatttgacggcgttgagatacatgccgcccacgaatatctcttgaaccagttctattcaccatatacaaacaaaagaactgatgaatatggaggaagccttgaaaatcgcatgcgacttcataatgaaatcattagagaaatcagagaggctgtaggtgatgattatataatagccattagatttggagcatatgactatttggaaggtggatctaagatggaagatattccagctgcagtcaaatcttttgtagaaagcggagttgacatgattgacatatcaggtggactttgcagatatcagaacccttattcaagggagcctggatactttaaggacttgagcaaaatagctaaggaatcttgtgatatccctgttattcttactggaggggttaagaaagcaaaggatgctgaaaggttgattaatgagggatattgtgatttgattggcattggtagggctcttttgatggatggagattggtcaaagaaggctataagaaaagtaagaaaaataaaatcagacaaataa

SEQ ID NO: 2163 - DNA, 282 bp, Methanobrevibacter ruminantium
  source 1..282: mol_type = genomic DNA
atgagggcgagagaaagacgagcacgactaatgagtttatatatttacatagtgatgaccatgatacaaacaaaagtatctgcaaggaatcagacaactattccttcaaaaatccgtaaaaaatacaatgttcaacctaatgacatagtggaatggaaagaaaacagaaatggggaactgacagtcacattcagaaaaagaatttccttcagagatatgataggaaaaggcacaataaaaactacaacaaatgctttagatttggaaaaggatttatattga

SEQ ID NO: 2164 - DNA, 1059 bp, Methanobrevibacter ruminantium
  source 1..1059: mol_type = genomic DNA
atgtttgaaaaaagaaaaattaagagactatctaatcatttaaataattcatatgatgcagaagattatgtttcagcgctatcttattgtgatatgattcttgatattgattctaataatcctcatgctttatttaataaggcaaagattttagttattcaaggagagctcttagaagcaatgtcctattataaaaaagctttacaaacaggtttctttgatatgtctacatgggttgatgaagtctcttattatatggatggggatatttcttcaacaaattataaattatctaatcgaaacgaaatttccttggaattgtgtgagatatgtttagagaaatatgctaaagatattttctttagcatatataaatctcaagctttagataatttaggaagatttgaggaatcattaaatgcaatctctctagatttaactcctgctgatggagagctttatgtttttcaatgtatcggccaatgttttccattatctaatttgaataggtgggaagatctattggaaacatcatcaaatggattaaaattgaagagtgaagatccaagcttaaatagttttaaagcaaaagctttatattatttaaatagattgaatgagtcagaaggattttttaataaatatattcaacttacaaatgatagtagggcatataattttctctcaaaaatagaattcaaaagaaaaaattatacaagtgcattaaaactaattaacaatgcaatacaactttctaaaaaggaacatttagatttactagaatcaaatgttttgatagaagatgatggaatatatgaaaatgattactatatgaaatcactaatcttattaaaattgaatgaattagacaaatcaaataagattattgattgtctaatggaaaaagaggaatctgctaagaattattgtttaaaagcgagaattctatatgaaatgaaagactatagaacttctttgagttttgttaataaatcattagatttaaaatccgattgcagtgaagcaattgaacttaaagaaaaattgggggagttttaa

SEQ ID NO: 2165 - DNA, 1119 bp, Methanobrevibacter ruminantium
  source 1..1119: mol_type = genomic DNA
atgtttacaaaaataaaaattaataaactttttaaagaattagattctgcattaaataatcaaaattttgataaagctttgattattcttaataatattttaattttagatgaaaataatttaggtgcactatataaaaaagccttgattttatataataaaggtgaatacgagaaatctttatctgtattggatcatctgctcagcatagattattgcattgatgcattcctgttaaaaggaagggtttattgcaatttaaatgattatgaaaattctttaaattcttataaggaggcatccattaatttcgatttggataaaatgaataatgaaatgacatattatgcaagccatccttctttatttgataaaggaattcatacaaaaattttcatagatttatgcaatatcatattggataatgcagatattattgaggtccgtcttttcaaatcttatgttttatctgaaatcggtcgcagtagagatgccttaaataatgtgaattatattttggcacataatccaaataatgaaaaagccatttctcttaaatcttccatattaattagtcttaatcattttgatgaagcattggcattaattaatgaaggtttaaatttatatccaaacaaccttcaattaatagatacaaaggctaggctttattatgctttgtctgactatgatgaggctctagaaatatgcaaagaatataattccatggatgattttggaaattattatctcctttcaaaaatagaatataaaaaaggagattattcattggctttgaaaaatattgatattgcattagataaattttttaaaaatcctaattttgatgacaaaaaggaattttctcatgcttattattggtataaatcgttaatcctttctaaattggatagatttgatgaagctaataaaatctgtgattgcctaattgaaaaagaggaatctgctaagaactattgccttaaatcaatgattctttttaaagaaggaaattatacagatgctttaattttcattgataaggcattggaattagattgtgaatgtgataaggcattagaacttaaaaacaatattgaagataaattatcttcataa

SEQ ID NO: 2166 - DNA, 1506 bp, Methanobrevibacter ruminantium
  source 1..1506: mol_type = genomic DNA
ttgagcaacaatcaaatttctggttgttcttatgccttatatctggatggaagcgataatggctcattcattggaaacaagattttcaataatgattatggcatcttagccaaatattcaaatattaatcttttcaaaaataatagtgtattcaataactggattgccattgaggactcttccaaatacaatcagttcctatccaataacatccacgataactatcaagggattcgactcatcgcatccaatagcgcattgatagagaacactaatgtctataataactatttaggcattttaaagtatagctcttcattcataaacaaatccgcatctgtttataacaatacattaataaatgttcagtcattgaatgatggggaaatagtgattcaagacaatatgtggtactgcggccctgcagccctttcaatcatcttcgaaagcctcggattaagcctatcacaagaggacatagccaaaattgcaggaacaaatacaaacggaaccagcctttacggactataccaagcctgcatcaaaaaaggattcaatccctcagtattaaagataaatagctcagacctaatgacaaatgacttagctgtgcttttaataaatgaagactaccatttctccgtgatttatagcataaacgacaccgacattgtattaaatgatccctcaataggattgtttgttctaagtagggaaacattcgacgaaatgttttccggatatgttttagatgttgaaccaataaaagatagggtatctaatgtaagcatagccaaaatgaaaactatagttgggactgttttcccagcacttgcttatggaggttatttggctttagcaggggtaactgtaattgccggctccttagcaatagtttggaattcaaactcacattacaattccaaaagcattcaaaaaccacattatacatggaagcctaataataaaattcattttccacgaaatgtcaaatatcctacaagcactggaaataacggaaatagacctaaagtaagttacaatccagtaaccagttctataagcggcaataagtactacactaataataaggtgtatacatataattataagagcagtaatagaaaagtttcttcttctaatgctgcaataattgcatatcaagaagcttataattattatctaagtactaagaataacgaaagggctaaagtagaaaaacctactaatattacaagttataattattttttaaaggatgtaaaagcatttgaaaaaggttcatataaattttctttaggacctaaggggccagatgatgatttgtatgatagtgcaaagattgttaaagcattatatagggatgctactagaaattataattatgggaaatttctaatcaatacaggtaataaatctagaggtatttgttacatatttttagctacatttgaaatatcgtttattccagctattatatataatcaattatcattgaatccttga

SEQ ID NO: 2167 - DNA, 1404 bp, Methanobrevibacter ruminantium
  source 1..1404: mol_type = genomic DNA
atgaaaaaaggtgttttaatgaatatccttgaaaaattaaatgcaattaaaaatcaggaaataactgcaaaggaaaatgttgaatcttatattaaagtcattgaagagaaaaacgatgaactcaatgcttttctcgaactaaacaaagaagatgcaatagctaaggcagaggaaatcgatgctaaaatcaaggcaggagaggaagttggagctcttgcaggattggtattcggtatcaaggctaacataaatgtggaagaccttatcatctctgcagcatccaagaccttggaagactacattggaagctatgacgcaactgtagtcaagctcatcaaggcagaggatggaatcattatcggaataaacaatatggacgagtttgcagcaggaagctctactgaaacctcatactatggagctgtaaacaaccctgcagcacctggaagaattcctggtggttcaagcggaggaagcgcagctgcagcagctgccggcatgtgcgacatcgcaataggctctgacactggaggatcaattagaaacccatcctcccactgtggagtgtatggtatgaagcctacctatggcgcagtctcaaggcaaggccttcttgacctttcaatgagtcttgaccagataggccctatggcacgtgatgtaaccggtatcacccttgcattggatacaatcgtcaaatacgaccctacagaatgtacaaccttaaaatgggacgctcctaactttactgaaatagcattaagcgtaaaggataaggaaaaacctcttgaaggaatgaagatagcaacttgtaaggaattcaaggaagtcacaaatgacgaaatcaatgaaatcattgacgaatcagtagctaaattagaatcccttggagctgaagttgttgagctcagctttgactatattgacatctgtcttccaacatactatcttatcaactatgttgaattcttctctgcaaccagaaaatacgacggcagaaaatacggctcaagaatcgaagaggtctgcggtcctgaagtacttagaagaatccaaatgggttcatacatttcacaaaaggaattcagcggaaaatattaccaaaaagcacttcaagcaagatccctcattagaaatgcaatcaatgacatgcttgaaggtgttgacttgattgtaggccctactgttccaaagcttcctcacaaacttggagaggaattggagcctatggaaatgtatgcatacgacgttcttactgtaatagctaaccttgcaggaatacctgcagcaagccttaaggcaggggaagttgatggcatacctgtaggattgcaattgcaggccaagccacaagacgatgcaaagatcgttaaggcaatggctgcatttgagtatgcccaataa

SEQ ID NO: 2168 - DNA, 570 bp, Methanobrevibacter ruminantium
  source 1..570: mol_type = genomic DNA
atgatgagcgaacttgaaaaactaaaatccggccttgtatactgctatgacgatgaggaagtctcagcaataaaggacaatgcaatctatcaaagctttagatacaacaatatcgacccaaatgacaagcaaaagcaatatgatgcattggaagagattttaggaagctgtggagatgatgtctggataggaaaaagatttagctttgacaatggaaaaaacatacacataggaaacaattttacaggaaactacaatctaaccattcttgatataagggaagtctacattggagacaatgtaatgataggcccacacacccttataaccactgtaggccatccattagagccaaagggaagaaggaagcatcttgcaatggctgattctatacatataggtgatgatgtatggataggaggaaacgttacaattctccctggagtgaatataggaaacaatgtggttataggagcaggagcggttgttacaaaggacattccagacaattcacttgcaattggagttcctgcaaaggtggtccgcgagatagaaaacgatatagaatga

SEQ ID NO: 2169 - DNA, 864 bp, Methanobrevibacter ruminantium
  source 1..864: mol_type = genomic DNA
atgacagataattcatcaaacatgggaagcaattcagataaaaaggagtttgattcagatagaaaagagtttaattctgataaagagtttaattctaaaaaggagtttgattctaaaaaagaatttaattctaaaaaggagtttgattctaagaaaaaagactttaattctaaaaaattcaattccaattataaatccaatagaagcagaaataacataaacacaatccaagatttaaaaaattctatcgaacttaaggaaaataagattaatgacttaaaagagcttttagaaatcaaggatgaagagaagcaagaagtagaatatgagctttccctaaaggaccaggaattgaatgacctgcaaagcaagttagacattttaacagtggaaaatgaggaattgaccatagagttaaatgaaaaggaaagcaaaataagcaaattaaacaatgctcttgtaaaatgcaaatacgaaaaggacaaagtggacttggttttaaagaatgaagttaacattgaaaaatcaaggcttaaggaaatggataatctaaacaatacaatcaaggaaaaaatagcaattatccatgataagcaagagcaaatcaattatctaagaactctcattgatgactataaagaccaaaccaaaaacaatacagacaatcttgacttgcagcttaaaaagattacaaaaacatatgaaggactgctcaatcaaaaggattcaattatagaaaagcaggaacaaaatataaatgaattgattgaatctcaaaagcaaatagctaaagacaataaagcaactattacacgtcttgaattggaaattggtaaatatagggaagagttgaagaaaagttaa

SEQ ID NO: 2170 - DNA, 795 bp, Methanobrevibacter ruminantium
  source 1..795: mol_type = genomic DNA
atggttaaatgttcaaaatgtgggagtgaaaataagtctgaagcaaagttttgtcatagttgcggtgctaaattagatataaaggacccatataatcttgatggcaaatcaagagagtatggttctacaacaggcaagagtgctggctctgctagcgcctattatgaccatagcgctaattctggtggttccagttcagattccaccggaggaattgataattttagaaatatgagcaattttaaaaagatcatttttgcttgctgtgctgtttttatagttttattcattttgtccttagctgctcaagcacttggatttgatatggaaccttatagcgaaaataaaaccgcttatcataattattcaagtttggatttagatgatgatggggcattatgcttggaagagcttgagatagaatattctaatatttcaagttcaaagatgagtgatatctttaaaaaatccgataagaatcgtaatcatctgataagaggcgctgagtatgatatgctgaactattatgtgaatgagcattttaaagacttggagaaaaagaaaaacgaaaaaacaagtagttccagttctagttctagctctagttcaggttccagttcatacaagtctccatttacaacaagcggttcctcggatgatggagctgaaacatgtccgttctgcggtagtgaagctgtttatgaatctggaaactcgtataaatgtgccgaatgtggtagaactatttcaaatccagatgatttagatttaaattatgatgagggctattattag

SEQ ID NO: 2171 - DNA, 1227 bp, Methanobrevibacter ruminantium
  source 1..1227: mol_type = genomic DNA
atgaaaaaatgtagtaaatgtggttcagaaaatccagataatgctaaattttgtcataattgcggctcaaaggattttggaacaaatgaaaatatttgtcctaaatgtggcgaatccaatgtgaaggaagcaaaattctgtcataagtgtggagctagcttaagctctaattcttcttctggcagttctagttcttataatcccactggaatgaacggtccttttggtgctggtgctaatgataagcctggttctgttatgaatggtccttttggtgctggtgctaatgataagcctggttctgttatgaatggtccttttggtgctggagccaatggtgtagctgattcttttgcttttgatcctagttctaatgataaatctagttctagttctaactctaattctagttctaactctaattccagttctaactatagttctagttctaactctaattctagttctaactctaattctagttctaactctaattctagttctaactctaattccagttccaataatcagggttctacggcttcttctgctaatcaatctaattcaacagcctctaccaaaaatcaatctaattcaacaatctcttctaccactgccaatacaggaaatgaagggcctggattaaagaaaatatgctgttgctatgttcctgttattcttttagttctttttataatatttgcaattttattgaatgcttttcctgaaaacttttcagcaacttatgatgacgaattttaccaattggacattgatggggatggaagattgtcactttcagaggctagtcagttaaaccctggaatgtctgattcaagcattagttcatatttcaatgaagctgataagaacaacaatggttatcttataggccatgaatttgatgacttttatagtgatgtgaaaccttattcctcatcatcaagtagttcttcttcatcaaattcccataagtattccagttcaagctcatctagctcatccagctcatctagcagctctagcgattatgactcttccagtgacggttatgtattaacctgtccatactgtggaagcgaggctatttatgagtctggaagctattataagtgtgcagactgtggtagcattattcataatcctgatgacttggaattaaactatcaggaaggttatatggatctcttggctcctatagtccagattaatctagggggtgtataa

SEQ ID NO: 2172 - DNA, 390 bp, Methanobrevibacter ruminantium
  source 1..390: mol_type = genomic DNA
atgattaaaatggaaattacaggaattgttacaacaggtttaggaaaagcagcttactttctaggtcaggatttctacaaaagtcaattcaatgaaaaatgcggttttacaccttttccaggtactttaaaccttattgtagaagagaataagctcgaagacatcagacttatgaaaaacagttgcacaaatgttataaagccagatcaaggatttggcggagtcaaacacatcagagcttatttgaatgagaatattgttggagcaattgtatttccagacaagaccactcatgatgaaaactatttggaatttatttcaaaggataaattgagggataaatataattttaaagatggagatgaggttgtaataacaatagacatttaa

SEQ ID NO: 2173 - DNA, 1710 bp, Methanobrevibacter ruminantium
  source 1..1710: mol_type = genomic DNA
gtgtcttggctagttgttcttatagtgtttctgcttgcttcaataaaatcaactaagaatccatctgtgtctgtggttataccagccttcaatgaagaagcgactgtagctcaagtggtaactgtagctcgcaagctatcatatataagcgaagtcatagtggtggatgatggatcaactgataaaactgtagaggaagcggaaagggcaggagcaactgtcataagccataaaggcaaccaaggtaagggggtagctatcaaaacaggatttaaaaattcccatggtgatatagttgcctttatagatgcagatgtatccaatttcactcctacaaagatagacaagataatcaagcctattttggaaggtaagacagacattacaaagaccaaatttgcacgggaaagtggccgtgttacagagcttactgcaaaacctcttttaagtttcttcttccctgaattgaattatgaacagcctttaagcggtcaatttgcaggaaagcgttctgcacttaataaaatcaaatttgaaaaggactatggtgtggatgttggcatagtattggatgctgatgttcatggaataagcattttggaagttgatattggagacattcaacatgacatgtcttcccttgccgatttaaacaaaatggcaaacgaagtggttagaaccatcattgacagggcagttgattatggccgtgtcactatgatggatacccttggaaattatatcagaatggccatcatgggattgtcccttatcattcttggactgttcatgattttctttgttccattcattccattggtcatatccgttttagtggctcttgttggaattgcactgactatagcctatataattaaaatagttcaaaggtcaattcctattttaaggaaaggggatacaagtacggcattaaagtcatttgttaagatgcactttcctgtaatcgtatcaggccttatattgattctaatgctttccacattcttatcagcagcaacatttaatgatggcaggatatcagtggagcttacttcaagaaactttgtatattccccttcagatgactatcatcaaaccatttcagtaagagggccttataccattgacagcgcaattgaaaatgaaacagatatggttagaatccctccagatgcattgagcacgttggagatgtctgcaaacgatacgatgattatagacggtgaatattattctgtcaacacttcaagagaaggggaagtggatgtattccgcctttcaaaagcagtaaggcatgatttggatttatatcctcgtgaagtcataccaaacagtcgtttggctgaagtcttcaatggagtcattgtcaatcataacatcaacttcaataattcctctgaagtcatggaaggatatgtccaattcagcataagtcctaaggctacaaatgcaactttcttcaatcttacattggataatgaatcacttctttcatcagtgggcaatttcaaaaacgattcctattatacaattgcatatgacgacgatattctatgtgcatttacaggagacgacatcaagaagggaaatgttacttttgagtatgcaggcaaggatggaatgatagtgtttgaagacagaaacaatacctctataaggaactttatagattccgatagggattcatttgttaagctgtacactctttaa

SEQ ID NO: 2174 - DNA, 315 bp, Methanobrevibacter ruminantium
  source 1..315: mol_type = genomic DNA
ttgattgcacttgtccttgctcctactgttttatcattgttcacttcttctgtaaccgctgctgcattggttattgtaggtatcttaatgattgtgcaattgaaagaagttgattgggacaatatggttgtagctgcatctgtattcatgactatcatcatgatgcttttaacctactcaatttccttaggtatcgcatggggattcgtcacctacgctgttgcagctatcgctactggcaaagctaaagagttcagttggattatgtggttaatggttattatatttgcagcatacgtgttcttcggactttag

SEQ ID NO: 2175 - DNA, 996 bp, Methanobrevibacter ruminantium
  source 1..996: mol_type = genomic DNA
atgttaaataaatttttcaaattggatgaaaacaatactgatataaaaactgagtttcttgcaggtttgacaacctttttagcaatggcttatattttaggtgtaaacccaaccatgcttgctgaaggtggaatgcctgcaacaggagtatttttcgcaactgctcttgcttcaggggtatcttgtatcatcatgggtcttgtttccaaatatcctgttggtcttgctcctggtatgggtatgaatgcattgtttacctatacaatcatattggctatgggtaacacttgggaaactgcacttgcagctgtattcgtttcaagcataatctttttattaattaccatttccggtttaagggaagcaattcttaacgctcttccatttgacttaaaattagcgattggtgctggtattggtttcttcttggctttcattggtttgaaaggtgctggaattatcgtagcagaccctgctactctcgtaggtatgggaactatcttatccgctcctgcgcttttagctgtaatcggcatattgcttactttgatattatacattaaaaaagtccctgcagctgtattccttggattggtaataactgcaattttaggtgtaatctttacattgttcggtttcggtgctggagatccattaatgcctgccattcctacagagttcatttcctttaatttcgacacttctgtagttggagcatttttaaaaggattttcacaattgttcactaacatccctaaccttatcatgattttattctcattattattcgttactttctttgatactactggaaccttgattcctttagcaaatcaatgtggtttcgtcgatgaagaaggtaaggctgatggaattgacaaagctttccttggtgatgctataagcggaatcattggtgctatcttaggtacttcaaccttaactgcatatgtagaaagtgcaacggtattggtcttggtggtagaacaggtttaa

SEQ ID NO: 2176 - DNA, 9240 bp, Methanobrevibacter ruminantium
  source 1..9240: mol_type = genomic DNA
atgagtattaaacgaatattacttacgagtttaatgctatttataataatattttcaatttcgtttgtaagtgcaaatgaaaatgtaacaaatgacgtaagtacgaatgaactatcaacacaaactgtatcaaacgatataactactagtgaaagtataagcgatactagtctagactctggagaaaaccggggtttggatgagatcaaatcgaattcgacagaagagtcatcatcatccaatttggaccttgaggatggcactttaaataacgatgaaattgaaagtgatgattgtttaactaaaaatggaaaagaagcaacattgcaagcaaataaacttagtcttgacattaatatgagtagaggtacagcccaagatgtactggacgcaatcgtacgaatttccagtcaagggggaggtacactctatctgaatggtggaacctatactgaaggaggccatgccagagtttataataatgacactgatagtttccgtaatatcgtaaggaacgatggaatagtagacatttcaaatgttcgcgtagttggtggtagcgtagacaatccaaatcaatatgctacatttcaaccaaatactcgtgatagtacttcattggcctttagcggttacggtgtttgggatggtaatggaactagatattaccctgattccggttttaatttaactaacgttacttttgaaaatttaaactgtacaggtagattctttagttttaacagcgggtatttgacagattgtgtttttaataatctggagtcctatcagcacctcttcttcgtaactggagcttacaatgatggtggtaagccaatagtactaactaattgtaacttcaccaattccaaacaaacttacaggggtgacggccctggggatggtactgatggtaccggtcagtttggtgtagtattcggtgctgaaatgtatggatgtaacttcatcaatacaagcactgctactcacggtggtgctttttgtctttcagacgaatggataagtgctgcatgcgttccaagtaagttagttgattgtaattttatcaacattacttctcgatggtttgcagtttacatacatggaaattactccaataccaccagatttattacagaacctcaagtggtggaaaactgtagctttattaattgtacagcaaccggtgaatttggtggtgcactcggaataagtcataacaatgtaattataaataacactgagtttatccataacgtcggtggaaaaggttccgctattatggttggtggaatcaataatactcatgacggattcttgggtgttaatacgcaaggtaataatattacgatttataattgtacctttgaggacaatattgcaaaaattgaaggtcaaagcagtgctcacagtactgatcctccattcactacttaccctacaggttatggaggtgctgtttatgtgtatggtaatcataccaaaatcatagatagtacatttaacaacaacactgcagatgattcttgtggtgctgcaatctacattagaggtgacaataccactgtcgttaattctgagttctataaccataccagtgaaaacggtactatatatttagttggtaacgattgtaaaatcaaagattcccttttccacgacaacgatgcagactctactggtgcttgtattttcgttgaaggaaatagggcagaaatcggcaatactacattcgtcaacaacaccgctcctaatggtggatgtgtattcattataggtgaccataccttggtagacaatgacaccaaattcataacaaacaatgctacaaacggtgcaggaatctatgttaacggatcaaacaccatgattctaaataccagctttatcaacaatacagctgtaaacggatcaggtgcattcatctatggtcacgacactgacgtaaacggctcttactttgaaggaaacgatgctacaaacggtggagcagtattcattgaaggaaacatcaacgatatttccaacaatacattcctcagaaacaatgctaccaatcaaggtggagcagtatatattgacggaaaccataccaaagtcaattataacaacttcacagagaatgaagcgattccaattagcgaagatcaggaaaccggtctcggtggagctatcttcataaggggaaacgatacaaatacaactgcaaacactttcctccacaacaaggcacgtaacggatctgcaatctacacagacggaactaacttctatcttcacaatgatcatttcttagaaaaccaagcgtggagttatctgttaattacaactgcagaccctgcagaaagcttatataaggaacaagatattgaaatcaacgttttatacagagctggagacaatattatcaatgctattcacaacaggaacaaaccaaatgaaacacacttcatgaatgtaacctattcccacagtgaattcggtaatatcacaactagtcctgccgaccagtatgtcgaacctgtagacggcgttgaaaacagtcgagaaggagagttattgtaccaagacgaccgtgaaaactatcaacaaatcgaactcagggtagagcatgaaaatggtgatttagcattgccaaggacaccatttagaaccaacatctacggaaatgttaacactaccttgaataaatcttccttaaggaaaggtttatacgttgtaggggctgagcacattgaagattggaactataagttcattatgaattctacaagtttcagaatccttgatacaatggacataatggttaacaaaaccagtgacaaggaagaatacttccaagacgaaatagcagaatgggaattaattttccataacacagacaacggtactgacgctgaaaacgtgacaatgaccgatcacttgcctaatgtatttgaattgatgaatctcagctacatgttctataccccaacagaggcaattacaaatgctacactctacttaaacaataataccttaagatacggagtatataactcaagcagtcagcaatgggtctacggcgatgcaagatataatgcaagcgccaatagttggacatattatttctttgactatgacaatgtcacttatgtctacactgaattcaacgctgatgactttgtacctgtattcggacctgtcatatacagcaacagcactgatgtctgctatgacaacatcagctacaacattcctgaagaggactggtactatgataccatcatggtaaacggtcaggaagtaagatacggtcatttcaatgcaacagaattcgaacaatacttcggaccatcatactatgatgaagacaacaagacttgggtttggatacataggggagaggacccattgaatccaggccaggaaactgatcttcgcactatctatgatcctgagtctaacatctgggttatagatgattatatgcactatccagagagaaagacagttacagaaaaagtcgtctttaccattgtaaacgacacagcaaacaatctgacccatctttcattatacgcaagagactttgatgtaaacgtaacaggttacgtaaacttcacaacaaactgtacaagatcaggtgactacactaacgttgtaaacgttacaaccccagactatgactgggacttgtcaaacaacgtagctaacagatctgtactcgtcgacccgcttccaaacaagacagtcagcaacacaactccttactaccatgactatgtcgactacaacttgacaatcatgaacacaggcaattcaacctacgaccaaatcctaaccgttgtagacagcttgcctgaaggactagtctacaatacaacagtaggcattttatacgctgaccaaatcggcgaaacacttgtggaaaaccaaggacgcacagttacctggaacgttacaaacattccggcaaataccaatgcaaccataattgtaagggtatatgtagatgctcttggaaacttgacaaacaacatgacactcatagctccaagcggagacaacagaaccgtaaacgctacaattacaccggtaacctataccgatgtatctgttaacaaaacagtcgaaaaagaggaatacttcataaacgacactatagtttggaccataaccgtatccgttgcaggaaacggttcaaatgcaacaaacgtcaacctttcagatgtattgcctcctgaagtcgaatatattagcacaaacggtacatacgacaatgcaaccaattcctggtacatcggcaacatgaccaatggaagcagcgtatcaatcacaattgatacccgggcaataagagttgcagaaaatgttaccaacgtagcaaacgtaagctgtaacgaaaccgaatgggactatgaaaacaacagagacaacgcaacagtaagcattattcctgttcctcagaaaaccgtcaacgaaacaaatccaacatttggcaaatacgttgactacaacctaacaataatcaacaatggtgcagagccatatacagacacattgaccgttgtagacaacttgcctgaaggactagcctacaataacaccgtaagcattctatatgctgatcaagttggcgacacaattgtggaaaacaataaccgcaccattacatggtacgttacaaacattcctgcaaatacaaatgcaacaataattgtaagggtctatgtaggcattcttggcgaacagataaacaactacactcttataggtccaaaaggatctaacagaactgtaaatgcttcaattgttgtagaaccaaaagttgacatatcagttgaaaaaacaagcgacaaaatcaactactttgaaggcgaaaccgtaatctggaccattactgtatcaaatgcaaacaatgcaactccagcaaccaacgtaaccctcaaagacatcttgccagaggaagtagaatttgtaagtgccaacgacacatacagcaacgaaaccggaatctggtacatcggagacatggcaaacggaacaagcagaacaatagtaattaatactactgctataagatccaaaacaaatgtcacaaacgtagcaagcgtaaactgtactgaaaaagaatggaattacacaaacaatgttgacaatgcaacaataaacatctacccattgattaacaagactgtaagcaattctacccctgactatggagatgaagttgaatacaacctcacagtgataaacactggagacgtaatgttcaacgaaactgtcacacttgtggacaggctcccagaaggagtcgacttcataaaagtactaaacgaagatggtttaaaggtaataagtttcgaccactctaccaaaaacctaacatgggttgtcacaaacatatcagctaacacaaaagcaaccataaccatcctagcaaattgtaccttggtcggtctccaagaaaacacctggaccatctacggaccagagggcatgaacagaacagttaacgcaacaatcgtagtaggaccaaaagtagacgtatcagttgaaaaaacaagcgacaaaatcaactacttcgaaggggaaacagtcatttggaccataaccgtgcacaatgcaaacaatggaacaaacgcaacaaacgtgacccttaaagacatattaccagaagaagtcttatacgttagctcaaatggtacatacaacaataataccggaatctggtacataggcaacatgaccaatggatcaagcagaacaatcgtgatcaacaccactgcaataaaatccaaagcaaatgtaacaaacgtggcaaacgtaagctgtaatgaaaccgaatggaactacacaaacaatgtagacgatgctgtaatcaacatctatccattaatcaacaagaccgtaagcaatccaaccccagactatcacgaagagattgaatacaacctcaccgtggaaaacactggagacataatgttcaacgaaaccgttacactcgtcgacaggctcccaataggagttgacttcataaaagtagtgaacgtaaccggtttaaaggtaataagtttcgataacactaccaaaaacctaacctggaacgtaacaaacataacagcacatacaaaagcaactataacaatacttgcagtatgtaatgctattggagtccaagacaacacttggacaatctacggaccagaaggtatgaacagaaccgtaaacgctacaatcgaagtaaaaccaatagtggacgtgtcaattacaaaggtagccgaccaagaaatataccacataggcgacaacgtaacctggatcattactgtgcacaatgcatggaacggaaccaacgcaaccaacgtcaacgtcaacgacatattaccaaaagaagtcgaatacctaacccacacagttacacaaggtcaatacaacaacagaaccggaatctggactataggattcatggcaaacggaacaagtcagacactcacaatagtatccgtcgcaaaaatcaacaaaaccgacataaccaatgtcgcaaacgtaagttgcagcgaaaaagaatggaactattcaaacaacagagactacgcaacaatagaaattgttgacactccaatcaacaagactgcaagcaaaccggtcccagactaccacgaagagatcgaatactacttgacagtcacaaacctagcaaatgaaacctataacaaaaccgtgacactagtggacagcctaccagaaggagtcacattccttagagtggtaaacgaaaccggcttaagagtactaggcttcgaaagacgtggcaatcaccaaatctggaacgtcacagacatcgaaccaaacacaaccgcagtaattaccatactagcaagatgtgacgcagtcggaacaaaaatcaacaactggacaatctactaccctaacggagacagcgaaaccgtaaacgcaacaatcgaggtaaaaccaatagtggacgtgtcaattacaaaggtagccgaccaagaaatataccacataggcgacaacgtaacctggatcattactgtgcacaatgcatggaacggaaccaacgcaaccaacgttaacgtcaacgacatattaccaaaagaagtcgaatacctaacccacacagttacacaaggtcaatacaacaacagaaccggaatctggactataggattcatggcaaacggaacaagtcagacactcacaatagtatccgtcgcaaaaatcaacaaaaccgacataaccaatgtcgcaaacgtaagctgcagcgaaaaagaatggaactattcaaacaacagagacaacgcaacaatagaaattgttgacactccaatcaacaagactgcaagcaaaccggtcccagactaccacgaagagatcgaatactacttgacagtcacaaacctagcaaatgaaacctataacaaaaccgtgacactagtggacagcctaccagaaggagtcacattccttagagtggtaaacacaagcggcttaagagtgctaagcttcaacagcactgaaaaagtccaaacctggaccgtaacagacatcgaagcaaacacaaccgcagtaattaccatactagcaagatgtgacgcagtcggaatagaaatcaacaactggacaatctactaccctaacggagacagcaaaaaagtagaaactccaatcgatgtacagccaatagttgacttgtcaactacaaaaaccagcaataaggacgtatacttcctagacgacacagcagtctggaccattaccgtccacaatgcatggaatggaaccaacgcaacaaatgtcgtcatagacgaattgttcccaagtgaatttgaaatcatcaactacacaacaacaaaaggaagatacgatcctagcgcacgtgcatggacaattgatttcatggaaaatggcacaacagaaacattggtaatcacctcagttgcaacagtggttacaccattcgttgacaaccctgtaaatgtaacaagcgatgaaagggattggaacctatccaacaacccatccaataagtctgtaaaagtcatagacattccagatccagaaaaaaccgtgaacaatgcaactccttactacaatgataccgttgtatacagcttgactatcaaaaacactggagacattaaatacactaacaagttaacagttattgatagcatgccacaaggattggaatatgtcaaaaccgttggtataagtggtgctaagttaatcaaggaagttgttaaaggacaagtgatcacttggacaattaccaatatctctgcacactcaaatgcagtgataaaagtaagagtcagagcaaaagcacttggaaacctaaccaacaacttgaccattgtaactccacatgcaaacaagactgtaaactgtaccattactccagtacctattgctgacttagcagtcacaaaaacaaatgaccattatggcaaagactgccttaacagcacatttgtatactggactataaaagttgtaaactacggccctaacaccgcagtgaatgcaatcgcaaaagacatcttacctgaaggaataatctacctttcagatgattctgacggagcatacgattacgaaactggaatctggacaataggaaaccttgcaaaaggcaaatctgtaacaatgaccatagaaacaattgttgacgctatcgacacaagaatcaacaacaaagtggtcgtctcatcagacacctacgatccggacaaatccaacaaccgtgacaacagctctataaaagtcatttcaatcgctgacttgaaactcaccaagacagctaacgtgaccaaaacttatgtaggagaaaacttcacttacactattaccgttgtcaaccttggtcctgatacagcagtaaactctcgtgtatacgacgtattgccaaaaggagtgaaactcctaagcttcaacgaaagcaaaggaagttacaaccctcaaacaggcaaatgggccatcggagacatggcattaggtgaagaagtaacccttaaagtaaacgtcagagcattaacaactggaaaaattgttaacgaagcacgcgtcgaaagtgacacttacgacaacgacacttcaaacaacaatgactcagcaactgtaatcgtgatcggagacaatcctccaatcaagatgctacctacaggtaatccaatactaattgcactcttgtcattacttgcaattgttggcgtaacacttagaaggaaaagttaa

SEQ ID NO: 2177 - DNA, 2187 bp, Methanobrevibacter ruminantium
  source 1..2187: mol_type = genomic DNA
atgatgattgctgatacattatcacaagaacttaatataaagatatcacaggctgaaagcgttataaaacttatagatgatggaaacaccattccatttattgcaagatacagaaaggaacttacaggttccctcgatgatgaagtgctacgtaaattcgatgacaggctaaaataccttagaaaccttgaagagaaaaaggagacagtgttgaattcaatcgaagagcaaggcaaactaacagatgaacttaagcaatccatccttgactgcaaaacacttgtagagcttgaagacttgtatcgtccatacaagccaaagcgcagaacccgtgcaacaatagctaaggaaaagggcttggaagagcttgcaaacattatccttgcacaggaaatcgaggttccattagaggaaatcgctgaagactacattacaaaggatgactctgtagaagaggaattaagagtaaacactgtggaagaggcaatcggcggtgcacaagacattatcgctgaaatcatatctgacaatgcaagcttccgctccctaattcgtgagctaagctatgaagatggagaactaatctctgaagcaaaggacaaggatgcagattcagtctatgacatgtactatgaatatagcgaagaggtcagcaagattgcaagccatagggtgcttgcaatcaaccgaggagagaaggaaaagttcctgaaaattaagataagcgctcctgaagaggatataattagctatcttaccagacatgtgcttatcaataagggcggaaagccaacaaagcctatatataacaagtatactgaagagactcttaaagaggccatacaagactcctataaacgtcttatagctcctgccattgaaagggagcttagaaatcagctctttgaaaaggcagaggacaagtctataaagctcttttcaaaaaaccttgaacagctcctgatgcaggcccctatcataaacaaggttgtccttggctgggaccctgcattcagaacaggatgcaagcttgcagttgttgacgaatatgggaaagtccttgacactacagtggtctatccaacagagcctcaaaacaagatagctgaaacccgctcaactgttcgcgaccttattttcaaatatgatataaacatcattgcaatcggtaacggaaccgcttcaagggaatccgaggcgattgtagcagacataataaaggaccttgacgttcagtatgtgatagtgaatgaggccggagcaagcgtatactctgcaagcgaacttgcaacagaggaattcccagactataatgtaggggagaggagtgcaatctcaatagcaaggcgtcttcaggaccctcttgccgaacttgtaaagatagatcctaaatctatcggagtgggacagtatcagcatgacatgaaccagaagaagctaggtgagtcccttgacaatgtggttgaaaagtctgtaaataatgttggggttgatgtaaacacagcatctgtatccctcatggagcatgttgcagggataagcaagacagtggccaagaacattgtaagctatagggaggaaaacggcaagttctatacaagggatgagcttttaaatgtcaagaagcttggacctaaggcattcgaacaatgtgcaggattcatgaaagtcaaaggccctaatccattggacaacaccacagtacacccagagtcctatggggcaacaatagctttcttaagcttcttaggctattctattgaggatttagagaataagaagataaaggaatcagaccttgaccttacagacaagcagtttgaggacatggcccaagaactaggaataggttcaataacattgaaggacattgcaaaggagcttaagaaacctggccgtgacccaagggatgagatgcctcagccaatccttagaaaggatgttctaacaatggaagaccttgaaaagggcatggtattaagcggaactgtaagaaacatagttgactttggaatctttgtagacattggggtccatcaggatggcatggttcacaagtcagagataacagacagccaatacgtaaatcatcctatggactttgtaagtgtaggggacataattgatgttaaggtcttggatgtggacattccaaaacgtaggattcagttatctatgattatttaa

SEQ ID NO: 2178 - DNA, 1050 bp, Methanobrevibacter ruminantium
  source 1..1050: mol_type = genomic DNA
atggaaagagtcagattacaatacattgatttattgaagtttttcgctattttttcaatcatagcattgcatgtgtttctagtatggcccaaagcaaaagtcatgggcataaaagtatattcattatcaagtattgtaaggttcggagttcctgtttttataatgataagcggagctcttcttttaaatagggatattgaaatcggttcttttttaaaaaaaagaataaatagaataacatatcctttcctgtttttttacattataacattcatattcatagcattgactaaccatacccatgaacagcaaaacatatttgctttcagatggtatttctggacaatcttaggtgtttatttaagcatacctataataaataaatatattcaacattcatcattgaaagaaatcgaatatttcatttacatatttatctttgcatcaatattctatcaatttacttacttctttgaaataaaacaatatttttacttgactttgttcttatccccattaggatatttggttttaggttattacttatctaaaaaagactttaatctcagtacaagcaagatgattgtcatttccataatcctattcatattgtctacatccataaagatttgcggccagttaggatacatacctataactgaaaattttgttgccagccaatcagtcatcctatcttcatggctagatgtcagcttcataggaatcttgcaagcagcttcattcttcttattatgtaagagcatttatgaagcttcaaaaggtatcttttcaccaatcaagaagtttttagaatcaaatatcatttcaaaatttgttctttcagtaagcagggcaagctatggaatgtatttaattaatctaattcctacagtcattgtttattattatatacagccaatgaatttaacaggcagtcaagtctttttagcaattcccttgatttccataatcatcttcttggtcagttggattatcattgtaatattatgtaaaataccatatattaaatatgtatcaggttattcctaa

SEQ ID NO: 2179 - DNA, 3537 bp, Methanobrevibacter ruminantium
  source 1..3537: mol_type = genomic DNA
atgaaaaccagaattagtgtcatcattccaatttacaatgttcatgaattcctagaggattgcatagaatctgtcttggcacagactatcaatcattgggaccttgtagatgattatcaaaggaatcttcaaatcattttagtggatgacggctctaccgacgacagcggtgaaattgctaagtcttatgcagccaaatatgaaaatgttgaatacagatatgaggaaaatcaaggattaggccatgcaagaaactacggatgcgaatttgctgaaggggactatatcatttttatagattcagatgacatcattcctccaaaggcatatgaaaggatgtatcgcattgcgcttaaaaatgacagcgaccttactatcggatctgtatggcgatttaattcaaagctgacttgggcttccaacattcatgaaatcgcttttggcggaacaaaagagcttactcacattaaggaaagccctgagctattttatgacaccactgcatggaacaagcttatcaaatttagcttttggaaagagcatggtttccaattccctgaaggaatactctatgaagacattccagttacaatgcctatgcattatttggcaaacaatgtttcaatagtctatgaaaactgctatttatggagagtgagggatggaatatccaaatcaataactcaaactacagatgacctgaaaaatgttgaggacaggctttatgtcatgggattggtggataagttctttaacgaaaatgtcaaggaagaggaattgcatagggtaaagaatttgaaatggataaagaacgatttgatgatcttcatcaataagctaaaaagcatggacatagacgagtctcaagaaatcattgaccttttgcttgattatatcgaccgtaacatagaccctaaatactttgatgagataaatgagattgaaaagctcaagtatgaatatttgtttgaaagggattttgacagactattgaaattgcttaattatgagcatgttaatttctatactttaaatattcactcaaaaggttccgatgttgtcattgaaggagataaggacgtttttaagacatcatcattcattgtaaacgatttcattaaggaagggaaaaaagcaaagtacattcaaaaggtcaatctagaggaagaggcattggaagtcagcggttttgtagtcattcccggtttggaggcaaaggaattcaaggatgtggaatattccttttatttggtaaatagcgaaaatcgcaagaagattgccttgcgtcatgaacagatttatttgggtaatatcaattcctatcgtcttcgttttggaaagaaattctcttataaggctgcaggatatacggtatttgttccttatgaattgattgaagacaacgaggacttcttaggagaaaataaaatcatagtggtctttaagcaaaggggagtcactcataatatttttgcaggaaacgctaaaaagaatgtccgcagcaggagcgaaaacagggcggttctcattggaaaaacatatatgtccattggatatgataagaataacgagattataatcaatgtttcaaaagccagacattcttatgataggatagagattgaggatgatgatctatgcatattcggcccttatgatggggatgtcttcctccattacaataaaagtttcatcagtcccgaaagcaatattccatttgcttatgatgatggcaatcagtgttaccgtttagatttagataatattcggtcaacagaaggccagattctatatgataatggagaatcccttgtttataaagataaagagcttttatgtttgtattcttctaaaggccaatgtgtaatcagcagtcttttggatcataatattaagataaataagtttaagaatttttcattagtctctgagattagtgaaagaaataatgagatagatattgtttcaaggcttcactctttagaccttggtgatagacagttgaagtctgcaaccctttatttctttttagataagaatcaatcttcttatcctattgcagaggctaagataattaaagatgtttctactacacaagatagtcatattggggataatgcttacattgatgataaggatagtgaggatattgattcttcttcccttaatggagaaaatacttatgaattgaattttaaattcaatatgaacaataagataatcacagaaaatctttatcatggttactttgatctattaattcgctatgattttggcgatttggtcttttcaacacctatacatcttttggatgatttcaaggcccttcttaagaagaaggtatttcattttactatctataggggaaatgcttggactttaaggataagggcaaagaaaaaatggaattggtgggatggcagacctagaatatatacaagagcatatagaatcttcaagcacttgccaatcaataagaaacgaataatgtttgagtcaatgtggggtgcaaaatacagctgcaatccaagatacctttatgaatacatagacgaaaaccaccctgactatgaatgcatttggtccttgaatgatgagcatatccctattaacggaaatggaattcgcgtaaggcgttggactctaaaatatttctattatcttgcaacttctaagtattttgttgacaatgtcaatttcaatgagcgctatgaaaagagggagcctcaaagatatgttcaaacaatgcacggaacacctttaaagacattgggattggatgttccaggggatttccctacaaaagcaagtgaggaacgcttcattgaaagatgtagccgttgggattatatcactgttcagagcgaatatgttgaagacattgccagaagctgctttaagttcgataaggacttcttaagatatggctatcctagaacaagcatgctttatacaatgaacaatgaagaggacataaataagataaaggaaagaatgaacattcctttagataagaaagtgattctttatgcccctacttggagaaagaaaaataaggtggaaatcatgttggatttccagtcatttaaggaaagcctctccgatgattatatcttgattctaaggctccatcatttgatgttttcagctgattttgcccctatagaggatgattttgtttatgacctttctagacatgattccatagaggaactgtatttgatttcagatattcttatcactgattactcctctgtaatgtttgactactccattttagataggcctataattctttttgcttatgatttagaggattacgctgaaaagctaagaggattttatattgatattcaagagaataagcccggccctattttgtttagctcaaaagaagtggaggatgccatcagtaatattgaaaaaacagaagaggatactaaatatcttagagaagagtttagaaataagttcattccttatgaatgcgctaattcttctgaaaagatctttaatgatttggtttctggaaaataa

SEQ ID NO: 2180 - DNA, 3675 bp, Methanobrevibacter ruminantium
  source 1..3675: mol_type = genomic DNA
atgaaaactagagtaagcgtgatcattcccatttataatgtttacgaattcttagaggagtgccttgaatccgtcgttaatcagaccataaatgatatggaactgactgacggatatgaaaggaatcttcaaataatactgatagatgacggatctacagattccagccctataatcgcaaaagaatatgcccaaaactacgaaaacattgaataccaccatgaagtcaatcaaggattaggccatgccagaaactacggatgcgaatttgcagaaggggactacataattttccttgattcagatgataagctttctccaaatgcctatgaatggatgtataaaacagccataagaaacgatagcgatatgaccattggaggattctggagatttaattcaaaaaaatacaagatttcaaacattaataaaatagctttcaatggaaacaaagagaaaacacacatcagcgaaagcccagaactcttttatgatacaaccgcttggaacaagctaatcaagcacagcttctggaagaaacataatttccagtttcccgaaggaatactctatgaggacatacctgtaacaatacctatgcattttctagcaaacaacgtttcaatagtctacgaaaactgctacttatggagaataagggaaggaaaatccaaatcgattacacaaacaaccaccgaaattaaaaatctcgaagacaggctttatgtcatggggctggtggacaagtttttcgatgagaatgttgatgatgaaaggctccgccatgtaaaaacaatgaaatggcttaaaaccgaccttcttatttttattagaaagctaagaagcatggataaggaacagggatataaaataatgtcactaatccgagattacatccaaaataacatagatgctgatgaattcaagtacttgaatgagtatgaaaggttaaaatatgaatatctgatggatgatgaaattgacaagatagtttcaatattgaacttcaaggctgaaaatataaaggagacaaaggtctatcaaaaaaacggacatataatgttcaatgcagataaggaagtgtttaagcaaagcccattttacatagaccaatacatcagggaaagatacaatagaaaatacattcaagacattgagattagggatgacggatttctaataagaggatttatgcttattccaggactggatatcaaaaactttaaggacagagagcacagattccatctgacaaatgccaatagccataaaaagatcaagatagattcagaagatgttgaaactggaaacataagctccttcaacataaggtttggaagaggattttcatatgatgctgcaggatataagatcttcataccattctctaaaatatgtgatgatgaggacttctttggagagaatagaatatctgtagacttcaagctaaatggcatctatcaaagcccattcctatcttatgaaaaaaaggaactctgtcaaaatttctttttaggatatgcgaaaaaggacattcgtcaaaaaaccaatatgaaagctgtaatctataaaaacacctatttcctcattagatataccttgaaggatgaaatcattattgaagcactccctttaaaaaactactttaaagagattagactagatgaaaatgttttaaaattagatagcgaccatatcggaaatttatacatttattacgaagcggactcaataaatgaagaagaaaaaatagcttttgaatatgacaacgaggataaaagctaccagatagatattagaaagctaaagaagaagccaggtaaaatactttgtgatggggaaaattccatatacaagtcaaaagaacttatattattagattccaaatatggacaatgtcttattagtaccttaaatgattattacttggacatttattattttgatagcttgacacaagttttagatatcagacaaaatagggacagaattgatattgatgccaaattatattccaataggtttaatgaaacaagaagcacatataaagcagatagaataaaaacagccaaactatactttaaagacgattcaagcaaagagaattacatactatctgatggaatgatagataggcaaaccggagatataaaattcagcatagacttttcaaataaggagattactaaaaacctatatgagaagattcatgatctctatgtggaatatgcttatgatgaaacttctacagaagaagaagcaattgtaaataaagaagtagatgaaagtgaatatgattcagtctcaaaagaagaaaaagaaaataataaaatagaaaaaaccgaaaatgaaccagttccagttgaaggaagaaacaataaaatcaatgaagaatcccgattttcaactgaactctatcttttcaagggtgatgataaaaccatctctaaaagctactatgaatataaggtctatcatgatttaaaaggcttcttaaaactaaaagtcttaaaaagatggccagtctatgaagacacccctggaaaaaggcttaaacattcacaaatatcctataaattgttttcaaaactgcctataaataaaaagcgcataatgtttgagtcaatctggggtggaaaatacagctgcaatccaagatacctttatgaatacatagacgaaaactaccctcactatgaatgcatctggtcctttaaggatgagcattaccctatcaaaggaaatggaaaatgcgtaagaagatcttcactgaaatacctctattacctcgcaacttcaaaatatctaatcaataatgtaaactttaagaagcatttcataaaaagaaaaggccaggttgaaatacagaccatgcatggaactccattaaagacaataggactggacgccccaggagagtttccaaccaaaaagagccaaaaggactatatcaaaaagaataagaattgggattacctcactgtgcaaagcgattatgttgcagagataagcagaacatgttttaaatatgaaaaggacttcttaaaatttggatatcctcgaacagacatattatatacaaaaaacaataaggaagacattcaatcaataaaagaaaggatggggcttccatcagataagaaagtaatcctttatgcccctacatggcgctttaaaaacaattttgacttgatgctggatttgaagtcctttaaggaaagcctgaaggatgaatacatattgattctcagattgcatcacttttcagcgggaggctggaaacagcctctggatgatgatttcgtatatgacttttcaggatatggctcaatcgaggagctgtatctgatttcagatattctaataaccgattactcctctgtaatgtttgattatgccattttagacaggccaataatactgtttgcatatgatttggaagaatatgatgaaaagcttaggggattctatatggatattgaatcaaataagcctggacctattttacatagctcaaaagaggttgaggaagccattttaaatattgaaaagactgaaatgaaatataaggatttaagaagaagcttcaaagaaagatttaatcagtatgaatgtgaaaactcatcagagaaaatatttaataaagtgatagataaaaagaagaataagaaataa

SEQ ID NO: 2181 - DNA, 2091 bp, Methanobrevibacter ruminantium
  source 1..2091: mol_type = genomic DNA
atgcaagatcctaagatttctgtaattattccaatatataatacagaagactatatcgaagagacattactgtctgtaattaatcaaacaatctttgatgagatagaggtcatcatagttgacgatgagtcaacagacaattcaaaatacatcatagagaaatatgcattggactacagcaatattcaagttttccatcaaaagaatgaagggcagggaatatcacggaattatggcctatcaaaatccaaaggagaatatatccactttttagactctgatgattatctgccaccaacagcatatgaaacactatataatatggccttaaagaatgaaagcgatattgtcataggaaatgtcttaagatttgcattatacaacgtatgggaagagagcctttataaaaatgcatataatgactttgatgaagacattgccatcatgagcttaaacgaaaggccttccatattatgggatacccttgtaacaaataagttattcaatagggaattcctgattaggaagaatataagattcccaaacaaaaaaatatcattccaagacattccattttcactggaaagttatatcttagctgattcaatctcattttcaaaggaaatcttccactattggagattgagatccaatcaaagctccgtcacacagcaggacaagagcctaaagaacattaaggaccgccttgaaatcttaagaattgtgcaaaatctcttggaaaagtacgaagttgaagaggagataaggaattatgagtattcaaaatggctgaatcatgacttgaaattctttttgaaaaggttcaactattatcctaaggaatatcatgaagaattgtttgaagaggtctatgggatagttaaaataataccagatgcgctgatagacagcttgaattcatataagaaggttcttttcaccatgataagaaataaggattatgagaatttcctcctgtttgcacctttggaaaatgagctatacaagaatcctgaaattccatcgtttttaaatgatgaatataagtcctatttcgattttgaaaaagcgatggaagaggaggaattgaatatagaattgctggactttaaaaatgataatgataacttatacatagattttgatggctaccttaattacttatcaccgaatgataattacaagattatagcaaagctagttgatgagaatgattatgaaaatcctcttttagtaaatcatttggaaaataagcaaatagccattccattttatttgctgaaggataagaagcgtgcccaaattaaggtcatttatgaatttgaaagcttcaaaaaaactgcatatctcaaaaacagacatagaaaatccattgaaagagaaaagttctttatagatttggatttaggtaaaaattcctatttatatttagatatacgtgaaaaaaacatagaaaattatattgacattattgatatatcattcaattccaaggaatttacaataaaagccaaatcaaaaaagtcgattgataaaatatcaatggaaaatataattagcttcgaaaaaatagcatatccaatatacgatttaaaatatgaagagaatgaagataataatttaaaaaatgaagagaatggagaatatacgtttaaatttaaaataccttattatgatattctcaaatcagcagttaaaaaatgggaattgaactgtgatgaatactttaattcaataaagctatccgaaacatttgaatttttcactgaaacctataagattaaatttgtaaatacaagaaataagattttgatcgaaaatgaaatatttaatccaattaaaatgatttatgccttaaatcacgaaaatactgatcttaaattgaatatcaagacattgaagggtgaaaacagtagattaaataaagagattaaaaagaccaatgaaaagaatgagatcctgaatgaagaaaataaaaagcttattgataaaaacaagaccttaaataaggaaaataaaaaattgaataagaaaatagaggaatataaatccaggaaagtggttaaaatagtggatagtttaaagaattaa

SEQ ID NO: 2182 - DNA, 639 bp, Methanobrevibacter ruminantium
  source 1..639: mol_type = genomic DNA
atgatattaggcacttatttaatcatgcctattttcaatagatggattaaggattgttcaattagggaagttgaatatttcttggctatttggctaattacttgcatttttgacaatactttattgatcggattccctgttaccttgacctactttacaggaccaataggcatggtggtattaggatattatttaaggcatacggatagaaaaatattcaatagccttccatatgcattagctttcttattgattggaatgattgttataatgctatgttcatatttcctatctagtccagagggaatgtatgtctttgatagatattctattcttttagcgattgaagtagttggaattttcaccctttataaggtcattgataaaaaagagcttaaaatcttccataaggaaaatggtttttttagaagagcatctttctcaattgcaaaatatagctatgggatttatttatgccatgaatttattatgaatatctttattataatatttttaaaacatgctccatttaaagtaaccttgcttttagtctttgtttgcacattaggaacatcttgggctctattggctctattaaatagagttccatatttaaataggattatcggtgctaaatag

SEQ ID NO: 2183 - DNA, 294 bp, Methanobrevibacter ruminantium
  source 1..294: mol_type = genomic DNA
gtgaattgggttgtaattccagaatattcattaattccttctttaaattggtttataactgattttttagggacttgctgcagatgcggtgttgatatatttttaatgctctctggagccttgtccttagggcgtgattgggacatcaagtcttttttaggcaaaagaattccaagaattacctatccgtatctgttctgggccacattattaatttccataatgttagttgcagtttatttcaatcccgatttattaaaactttttttcggcatatcacattcctttatataa

SEQ ID NO: 2184 - DNA, 1008 bp, Methanobrevibacter ruminantium
  source 1..1008: mol_type = genomic DNA
atgatgattcctaaagttatgataattcttggaagtgcatctgataaggatatagcaatgaaatccataaagattttggaaaagcttcagattccatatagcttaaaagtggcatctgctcatagaacccacgataaggttaaaaagcttgttaaagatgcaacagataaaggcgtagaagtatttataggaatagccggacttgcagcacacttgcctggcgctatagctgcatatacccacaggccagtcattggagttcctgttgacggagctgtgggaggtcttgatgcattgtatgcatgtgtccaaatgccgtttcctacagcggttacaactgttggaataaacaggggagacaatgcagcaatccttgccggagaaatcattgcaagctatgacgaaaaggttggtcaaaacatttccgatttaagggttgaatatcaggaaaaggttgaagcaggtgaaaaggagcttatcgaaagcattgaaggggaatacttccaaaaagacttcttggaagaagaaaaatacgaaaagatagagtttgaagagcttgatgacactccagatgttatgatccttgcaggaagctattcagatatggaaatagctaaaaatgtagcgatactacttgaaagaatgcgaataaattataaacttgattatatttctccaataagacatgctaaggattttgaatcatatatgagtaaaagaaacaatgctaaaatattcattgcaataagtggcctgtctgcacttgtagcaggaagtgttgtagcacttactgaaaagccagtgattggggttccttgttctaagaaattaaatggccaggatgcattgctgactatggcaaacatgccacctggagttcctgttggaaccgttggaattgataatggtaggaatgctgcaatagttgctggagaaatccttgcaatatccaataaggagatagaagagaacttaaaatggataaagtataagaatgctgatttataa

SEQ ID NO: 2185 - DNA, 1263 bp, Methanobrevibacter ruminantium
  source 1..1263: mol_type = genomic DNA
atggcagaagaattaaacattattcaaattgatgaagagctagatgctgaatatgaagctgcaaaggtgcttcgcaagtatccaaaggatacagtcatgctaaacaatataaaaggatacgacattccagttgtctccggtatctgcaatacaagggaaaagatagcacagtcccttggatgtcaggttgatgaaatattatacaagataattgatggaatgaacaatccaactccaatcaccaaattcatagaccttaaggatgaatacgacagcaaaagagtggatttaggaaagatcccaatactcacccactataaacgtgacggaggggcatacattactgcaggggttgtctttgcaaaggaccctgaaacagggattcaaaacgcttcaatccataggatgcttgttctggaaaagaacaaattagctattagaatcgtcccaagaaacctttacacctatttccaaaaggcaaaggatatgggaaaagacctagatatctccattgcaattggaatggagccttccatacttcttgcatgtacaacttcaattccaatcgatgcagatgaaatggaagttgcaaacaggttcaagaatggagaattggaacttgtaaactgtaaaaacggaataaaggttccagaagcagacattatctttgaaggtaagatattgattgatgagaccgctcctgaaggaccatttgtagacttgactgacacttatgactatgttagagaagagcctgtaatcaaattaagcaagatgtatcttaaaaaggaaaatccaatgtatcatgcaattcttcctgccggattcgagcacaagcttcttcaaggaatgccgcaagagcctagaatattcaatgcagtcaagaacacagttcctaccgtgcagaatgtagtgcttaccgaaggaggctgctgctggttgcatgctgctgtaagcatcaagaagcaaaccgaaggagatggaaagaacattataatggctgcactcgctgcacatccatcattaaagcatgttgttgtagttgatgaggatgtaaatatatttgacccacaggatattgaatatgcaatagctacacgtgtaaaaggtgatgatgatataattattgtacctaaggcaagaggttcttccttagatccaaaggcttcagaaatagatggaaccactacaaaagtaggtgtagatgccactaaatcaattttagaaccacataagttcgaaagagtaagctttagtgagtaa

SEQ ID NO: 2186 - DNA, 972 bp, Methanobrevibacter ruminantium
  source 1..972: mol_type = genomic DNA
atggataaggtaggaattataggagcaggtagtctaggtacagctttagctcaaacagtggctaataatgtagatacagtttatctgcacttaagaagagaagaattagctaaaacaataaattcaactggatataacagcgaatactatccaaacactaaattaaaaaacaatatcatagccactactgacatgaacgacttgattgattgtaagataatatttttatcaattccttcatctgcattcagatcaacccttgaaaacctaaaagaggtcatttcagaagatacaatacttgtgacaacagcaaaaggtattgaatatccctcattgaaatcaatgggtcgcttgatagaagaatactttgatgaaaacttcgtagccttgtcaggccctaattttgcatctgaaattgtcttgaaccttgcaaccgtatcaaacattgcttcaagaagcagtgaaaatgccataaaggtcaagaaagtcctatccacaccagaattcaaggtaaaaatcattgatgatgttgtaggccttgagatatgtggagtcatcaagaatatcaatgcaatagcaaacggtatctgtgaaggaatgaacataaatgaaaacgcaagatatgccgtcttgacaaagggctttgaagatactggtaggattatagaagcatttggtggaaaaatatccacagcaagcgaatactgtggattcggagaccttgtgctaacctcaacttcaagtgaaagcagaaaccacacccttggaatgctctatggccaaagaatcatcgtagatgaaaaggcaagcggtatagtatttgagggtaaaaactcaatcatggccataaaggacatctgtaataataccaatactaacagtgtggttgtaaactttgtatatgatgtaattgttaaacagattccgcctaaaatagcttttaaagacctatggaacaatattgaggagtga

SEQ ID NO: 2187 - DNA, 1092 bp, Methanobrevibacter ruminantium
  source 1..1092: mol_type = genomic DNA
atgatgagtgaagattcaattttgcttactataaaatcttttacagatttacaaactgaaataaacaatactgcaaatggcggaatattaatcttagaaggatattacaagtataatagcaatttagacagtaattttttacagaaaggtgtattagtaaataaaaacataaccatttttggaaatgggtgtgtcattgatggaaataatacttcaagtttaatggaaattaatgcaaataacaataccgttaaaatttatgatttaaattttattaatggtcaccaaaatacttggaactatggaagggttagtattacaaattctattgcttattttaataactgttcattcttaaactccacaaatggttattatggtagtgtatatatagcaaaaacatctcaagcacattttaacaattgtatattcaataacaattatgcaaaatttggtggagctatcttcaataataatattatgtattgtaaaaattgtagctttgaaaataacagtgcacagtctggaggttcattgtgtataaatggcgaaaataatggagtggaaaatacaaacaattatacttacttagaaaattgctccttttcagataactcttcaacagcacatggtgcagtaatatattgtgatgaatggtcaaaaggttgtttcaataattgttcatttgaaaaaaattctgcaacaacaagtggaggagcaataacaatagatggtgcaaatatagatataaataactgtagtttcaataaaaataaaacaggaacatcttcaacatacaatggaggagctatttggataattaaaaatgatataagcggtgcatctaatgtaaatatattaaatacttcatttagtaataattctgcttctcaagatggcggtgcaatttatttaaatggaacttgtgtgcttaaaatttcaaactcttcattcaataataatactgcaactagatatggaggaagcataagaaattatcaaggaacagctaccgcatatctatgtggatttttaaaaagctcagatgcaacttatggaaccataacaaagaatggatgttatgggccttaa

SEQ ID NO: 2188 - DNA, 717 bp, Methanobrevibacter ruminantium
  source 1..717: mol_type = genomic DNA
atgatcggtgtaatattagcagcaggaatgggcacaagacttatgccccttactaaagacatcccaaaggcattgcttaaaatcaatgaaactaccttgcttgaacgtatgattaaaaactgcataaatgcagacataagcaagtttatagtggtcgttggctataacaaggataaggtaatcgacttatgccccgaaatagctgaaaaatatgatatagaaatcaagaccattgaaaacgaaaaatacgatgttacaaatacctctgtatcaacctatcttgcaagcaaattcattgaagaaaacgaccttgacgactttattctagtaaacggagacaatgtagtagaccctgaaatcattacaaggctcgcagtttcacaaaatacaggcatgataatagataacttcaaggagcttaacgaggaatcattcaagcttatcattgatgatgaatcctttaatgaagacaagacaatagctaacggcaaaataaactccataggaaaaggattagacattccatcctctacaggagagttcattggagtttctaaagtcgtatcagatgacgtagcccaattcaataggattttagaaaaattaattgaagaggaccctcaaaactattatgactttgcttataaggacttaagtcttatcaagaccattgactttgtattgacaaacggattaaaaatggaccgaaatagatga

SEQ ID NO: 2189 - DNA, 1221 bp, Methanobrevibacter ruminantium
  source 1..1221: mol_type = genomic DNA
atggcagaagagaaaagaagctttaaaaaactaatcaaagacatattatacatctcagcaaagcgcagcgctagagcactatattatattggctcatacattatccctgcaaatgaaaaaataattctatttgaatcaagcaatgggcgaaactacacaggaaatccaaaatatatctatgaagaaatcgtcagccaaggccttgacaaggagtacaaatgcgtctggtccttcatgcatccggataagaaaatcccaggaaatgccatacaggctaaaagatccttttttaaattcctatattacacattgcgtagcggaacatggatatttgactccagacatttatattacttaaagaagaacaagaaaaccaaatacatccaaacatggcatggaactccccttaaaaagcttgcattagacatggattacattgacatgagtggaaatcaggatattgaagcataccacgaggagtttagaaaaaacacatccgcttggcaatatctcatatcacaaaacgaatactcatcaaatatattcagaagggcttttgactttaaaggagagatgcttgagataggatatcctagaaatgacattcttgtaaacaaagacaacgaaaaagacattgatgagataaaaaccaggcttaatattccaaaggacaagaaaatcattctatatgctccaacttggagagacaatcagttctataccaaaggccaatataagtttgcaacagaaatggacttcgataggctatatgaagaattttccgatgattatgccttaattataaaattccattatttggtcaaggagaatatggattggtccaagtacaatgatttcattatagaatgcgatgcagattgggacattcaagagctttatctaatttcagacatgatgataactgattattcctctgtaatgtttgattattccatattaaaaagacctatgatcttctttgcatatgatctagatgattataaaaacaatcttagggacttttattttgacatggtggaagatgttccaggccctatatgccaaactaatgaagaattggttgattttattaaaaattacagcgaaaatgcttataaaaacacgtttggagaaaaatacgaaaagtggaatgataagttcaatcaatttgatgatggaaaggcgtctcaaaagattataaatctgataaaagaaagataa

SEQ ID NO: 2190 - DNA, 1053 bp, Methanobrevibacter ruminantium
  source 1..1053: mol_type = genomic DNA
atgaaggaatctagcttttacatcaaactatatgaagagaacaattccaccgaccatatctctaactcaaataagtcagtacaatgcaatctatgtgctagagaatgtaaaataaaaaataataatacagggttctgtaaaagtcaaaaaaacatagatggcaaactatttgcacttaactaccaaagaattgcctcataccatatagatccaattgaaaagaagcctctataccacttccttccaggctcatccacttactccataggcggttttggctgtaatttctcatgtttgaactgtcagaactatatgctttcaatgaattcttataatgaaaacaactcaattaagatactgccagaaaggattgttaaaaatgcacttgacaatgattgcctatcaatatcttggacctataatgaacctacactatactttgaatttgctgaggaaacttctagacttgcacatagtcaaggccttaagaatgtcttcatcagcaatggttatatgggtgaagaagtcttgaaagaaacagtaagttttattgacggattcaacatagacttgaagttttttgacgatgagctctatagaaagatttgcggtggcagactagacattgtccttgacaatctaaggactatttatgagtctaagaaaaagtacaataatcatttggagataactactcttctaattaatgatttgaatacggagaaggagcatattagagcaattagcagatttgttttagatgagttaggtcctgaagttcctcttcacttttcaaggttctttccgatgtataaaatgactgataaggctccaactgatattgattatcttattagggcaagagaaatagctatctctgaaggattggagtatgtatatttaggaaatatgcctgctgataacaatacttattgcccggagtgtggtgagctattgatagagagaaataggtattgcaatagggataaaaatagaataaaggatggatgttgtgttaattgtggacatgaattgaattttgtctttgattag

SEQ ID NO: 2191 - DNA, 1242 bp, Methanobrevibacter ruminantium
  source 1..1242: mol_type = genomic DNA
atgaaaagcactcttaaagtctctgatattggtgaaaaacaactaatagaaagaatcatagaaaaatcaaaattatgttccctaaaaaatccatttgatttagatgatttcaattctaattacccgagttctaattttaaaacatcaattggagacgattctgcactcttaaaccaaaatctaaatactaatcactatttagtggcatcatctgatatgcttatccaatcaagccattttccaagagaaatgacttattaccagatgggatataagtcagtcatagtcaatgtaagcgacttggcaagcatgggggctaaaaatataggattccttttaaacatagctatccctaaagacacatcacttgacaattttgacgatctcatttgcggcattattcgtgcatgcgacaattataatattccgcttgtcggcggagatacaaatgaagcgagtgagataatcttatctggaacagcaatcggacaggtagaaaaaggcaaggcccttatgaagcacggatttaaggaaggagacttggtctcgataagtgaccatcttggctatgccgctttaggctttgagcttttaaaaatcaaggaagagaatattgacaaatacaatgatataattttccaaattaataaaattgacccaacagttaaggatttggctctttttaaggcattaaagccagaagccaaatatgaagaaggccgtattttagcaagccataatagtcaagaaaacagaatatctgcaacagacattacagacggccttgcaagtgaattctatgagattttaaatgccgataaaaagtattatctattcaataaagatactgaatcccataatccgaatgattcgaatgattcgaatgatctgaataatcagcagaataatcagaataacacaaataatcaagatgtgattgatgaatatgatgatagcaattattcaaaaggcataagaatttatgaagacaagcttccagtggacgatgaatttaagcaaatagcagatgttttaggtattgattaccttgatttatttttacatataggggaagactttgaactcctatttacaatcaataaagaactaaagagccaattagaaaatgatatgaatttttatgtaatcggtgaaattacaaacaataatacagttgaaatagtactctctaatggagatataaaaaatataagttcaaaaggatacgagcatcttaaataa

SEQ ID NO: 2192 - DNA, 684 bp, Methanobrevibacter ruminantium
  source 1..684: mol_type = genomic DNA
atgaatttaattaagggattagataagaataatggccttgatttaatattacatgctcccggaggagatgtaggggctacagaatctataatagattatttgtatgaggtttttaatggagatattagagttattatacctcaaattgccatgtctggagggactatgattgcatgctcatcaaaagaaataattatgggtaaacaatctagtttgggccctattgatcctcaatttaatggcattcctgctgagatagttattaaagagttttatagggctaaaaatgaaatttctgaaaagccagaaaccattcccttttggcagactaatatttcaaaatatcctcctgcatttattattctttgtgaaaatgcaagaaaatggtctgatgaaattttagataaatctttaagatatgctatgtttgatgggtcggatgaggaaaaaattaataaaataagattagaattaggctctcatgaaaatacgaaaagtcatggcagacatttatcagctaaagattgtcaagaattaggcctaaaaatttcatatttggaagatgatgacgagttccaagacactgttttgtccattcatcatgcctgtatgaatttttttagtattaataaggattgttgcaaaatagttgctaataatgactcaaaatttttcatacaataa

SEQ ID NO: 2193 - DNA, 168 bp, Methanobrevibacter ruminantium
  source 1..168: mol_type = genomic DNA
atggctgtagaatttaatgaggtgataaaaatgaacgaatcttatgtaaagagattatatagagatcttggaatcccttattatcgtccaaaaaaagataaaggagatgaggagttcgatttttttccaaagtatgacctaatgcattggatacctttgaaagtatag

SEQ ID NO: 2194 - DNA, 321 bp, Methanobrevibacter ruminantium
  source 1..321: mol_type = genomic DNA
atgtttaagataagaaaattatccaataaaattatagttttgcttatatgcgggctattgatctgtagcatacaggcctgctcggcctcatgcactgcagtctatgtagggcctgatgtcagtgcagacggttcaacaatcattgcaagatgcaacgaccatcagggagtttggggaaaccatatcacagtgaccccaagggtagagaacaagtcaagccgtcttatggctgtatgcgaagatggaagcgtaaaaacagagcttccggcaacaacttacaaatacacagccacaccatatatgaacagcacaaaagcatga

SEQ ID NO: 2195 - DNA, 1452 bp, Methanobrevibacter ruminantium
  source 1..1452: mol_type = genomic DNA
atggataatcaaaatcaatggaattcaagaattgcttttttattatcaatgattggagctgctgttggattaggcaatatctggcgttatagctatgttgtttactcaaacggtggaggaactttttttataccttatttagttgcaattctaatcatgggaattccatttcttgtattggaatatggaattggattccgccataaagactctttttccaatatcttaaagagcatcaatcctaaattggaatacatttcatgggcattggttttaattatctattttgttctaatctattatctggttatagtaagctgggatttggtctatttaggctcaagcataaatttcagctggggagctgattctgctctttatttcgtgcagaatgtcggaggaagctcaaacctctccaatatggcaagctttataattccaacaaccatttccatggtcttagtgtggatttgtgtctggtacatctcccacaaggatttaaatgagggaataggaaaggcttcaaagattctaatccctctgctttttggcataatggctttcataattgtatttgcattgacccttccaggtgcaggcataggcataagcgcattgctgaatcctgattggcaaatgcttttgaatgtaaacatttggcttgcggccttttcacagattattttctcattaagcatgggagagtcaatttcactgacatatgccagctatttgcctgaaggatctaaattgaccgacaatgtattgattgtggtttttgcaaattgcgcatttgaagtctgcacagcttttggaatattttccattcttggttatatgtcctacacttccggaacaccgattgtagaattggtaagcgaaggcacaggacttgtatttgttgttttcccaatgattttcaatattatgggtgctataggtcatataatcgctccattgctatttatagcaatattgttcgctggaattacttcagctgttgcagtatttgaaccgatgataaattcaacagtccataagctgaactggtcccgtaaaaaggctgtaactgtatggtcaatagtaggctgcatagtttcattattattcacaacaggaatcagcagctatcttgtaggaattgtagacagcttcattacagaattctgcatccttcttttaattgcaattcaatccataatattcacatggttctatgacatagaaggagtcattcctatattgaatgaaaatgacagggtaaaagtaggaaagacatgggtatttgttctaaaatacatattgcctatcttattgttcttcatgtgggctagtggagtatatcatttgcttttaaatgcaaatacctttgaattgattgtttatggtctaattacagtttttattataattttgacttatgtttttacaaatattcctgaaaagtcatag

SEQ ID NO: 2196 - DNA, 462 bp, Methanobrevibacter ruminantium
  source 1..462: mol_type = genomic DNA
atggaaacaatattaaccaacgaaaaagacgaaagattcatagagctttctaatgaattgaacaatgaatattactctaatattggagaagactctctaaagtatctcgattacaacaccttagaagatcctcatgttgtattgcttgtattaaattggggaaatcctatagcctgtgccagctatcgtatatttgatgagcagtcagttgaaatcagacgagtctatgtaaagaagagatatagaaataaaaaaatagcttataagcttgtcaaggccttggagaagttggctatggaaaacaatttcaaatactcaattattgaaactggaagtgaaaatatggctgccatcaacttatataagaagctaggctatgaaaagatagataattttggcttttttaaggacgatgatgcttgcatttgcatgagaaaggagtttaagactcttattttttaa

SEQ ID NO: 2197 - DNA, 468 bp, Methanobrevibacter ruminantium
  source 1..468: mol_type = genomic DNA
atgcatcaaaaatttatggaagaggccatcaaagaggccgaaatctcatcaaaagagggaggattgcctataggagcagtccttgtaaaggaaaaccaaataatctctagaggccataacagacttattcaaaaggattcatccatcctacatgctgaaatggatgctatcgaaaatgcagggcgattaaatcacgaagactaccaaaaatgcaccttatacacaacattatctccttgtccaatgtgctcaggtgcagtgattctatacaatatcccaagagtcgttatcggagataatcaaacccttatgggagcagaaaagctattaaaagataatggtgttgaaataattgtcttaaacgatgataaatgcaaagagctctttgaagactttgtaaacaataatccaggaatatgggaaaatgagcttgctaaggtgggaaacactacagagctaaaggaataa

SEQ ID NO: 2198 - DNA, 969 bp, Methanobrevibacter ruminantium
  source 1..969: mol_type = genomic DNA
gtgattattatgagtgaagatactgctgttttattattaagtcatggaagtagtctcccttatgcagaagaagtttttaaggacatatgcgctaaatttaaggaacagactgaatttgacgctgaagtaggctatatgaaagtggctaagccaagcctccctgaggcaataaatatcttaaaggaaagaaacccaggtctaaaaagaatcatagcaactcccgtatttttagcccctggaattcatacaaacatcgacattcctataatattaggccttgagcctaaggaaaccgacccaagacagcctgacggcaattacccagaaggccactatctctatggccttgaagaggttgatttcgatggagaattaaaacttatcgatgcaataggccctaatccaagacttattgaaatcataaacaacagaatagacacagctcttgaagattccaagctagatgatgatgcaaagacagcagtcttacttgtatcccatggaagcagattaaactacaataaagagttcatttcatgcgtattccaacagtttgaagaacaaaccgattatgtatgtgactttgcattcatggaacttgtagatcctaacattccaactacaattaacaagcttgtaagcgaaaatgaagttgacagattaattgtagtccctgtattcattgctccgggcgttcatacaacaagggacattccgacaatattaggccttattgaggatgatggtagcggacatcatcaccatcaccatcatgatcacgaccatgaccacagtcacgaccacggacatgaccatgatcacggacactctcacggacatcatcaccatcatcatgcccatggggatgaaaagatggagttcgatggagaaatcttatatccagaaccaatctgtgatgatgacatattgattgaaatattagaaaccatggttaaagaagctctttag

SEQ ID NO: 2199 - DNA, 399 bp, Methanobrevibacter ruminantium
  source 1..399: mol_type = genomic DNA
atgtctgatactgtaagaacatggcgtcatatccaacaaagatacaatcttattggatctaaatgtactacctgcggtcaagttttcttcccgcaaagagttatctgtcctgaatgcagaagaaaaggaaatatagaagatatacaattttccggaaaaggaaaaattcacacctattccgtgattagaacacctacttctgactttaaaaagatagctccttatgctgtagctatcattgagcttgaagagggcgcaaaggtcactgcacagattgttgacgctgatgttgatgatattcaaattggcgaccctgtagagatggtctttagaaagattcgtgaagatggccctgatggcgttatctcatatggattcaagtttaaaatcgtaaaataa

SEQ ID NO: 2200 - DNA, 1158 bp, Methanobrevibacter ruminantium
  source 1..1158: mol_type = genomic DNA
atgacaattaaaaaatatttcaaaacaagaaaaggaactaaaaaatcagtccaagaaagagattatgatagtgattactcaaataaagggctccataaagaatcaagaattaaaaacttgcttaatgacaataaaggaaactattcaatcgtcattagtgcaattctactaatatcctttttgattctctctattattgtgctgaacacagttttagaggaaagggaagaacatacagacacaatagcttcaaaccaataccaatacatcatagaagattataagcgaaatttacctaatattgagcgtgaggcattggaagagctgagcttatatgtcattgagaataaaagaccctgctttaactctcgtgatgacttaaaggagataatagatgaaaaactggctcaaaagaatcaggaatattatcaaaactataatattgaaataaactcctcaatcatagggattgaaaacactagcgatccattttcctataagtttaaaacatatatttcaagtgtaaagggagacttttcctatgaggagatagatgaatcgtatgtgaactgctataatctaaaagatccagtacctgttctcttttgcggtgatgattcaagctttagaatagaggactatagtcttttaggtgactctgattttggaactcatgactccaattttgaaaatgatgattcctcttccaatcaaaaggtattttatggccattctttggctaaattcctcagaaggcatcatgttgaaaactattcattctatgagaatgcaagctctccatttataataaaaagatgcccttacgacccttataagcatcatggagatgacaatggaagaatcatgaaaaactgcagagacaatggatactatcacgaaagcgcagatggagcttgctacttatgcaggctagaaggaaagtcaggatgtgaccattatggctttgaaacatttataaatcctcaaaagaccaatgaaaccggaggtgtcagtgcctgcggctctgaccatgtaatattcagtgatgacatctatccaggggttgaggttatttataatagtgaaaatggattgaatgaaatattatatcttgaccctcatggacataaggtgaagtatggaatgagtgagtattaa

SEQ ID NO: 2201 - DNA, 1017 bp, Methanobrevibacter ruminantium
  source 1..1017: mol_type = genomic DNA
atgtactcctcagaattgattctgtccctcatattgattatattcatcataggaatcatggccaatataacagacagcgtcaatgaaaaggtccttagccaagaggagctttcctccctagaggccataagcatagaaagtgtagattatctattgaacaatcctggaagtccaatgaattgggaggaagatgaaggattgaataatggaattgtatcaagacgaatcataccaggacttgccataaataaaaaatctgtggaaaatggctttttttatgaagaaagcagtagtgatgaagagataatacctaactccatatcatatatcaagctcttaaagcttcaatctaactatgatgacttgatcaatcggaatctatttaattcgactcttaaaagttcaataactatttatccccactctgatattgatataatagctatgggagatgatttagaatcatctagtgatgttgtggctataaatagaacagttagatgtgactatcttagcaattttgtgatatataggttcaatgactttgagctttatggtgagaattataaaaaaaccgaactctgcaatcatgacagcaatgttaatctatctaatcatagcaatgatcgaaggtatttttggctttgcaagaactttagaatctatagaagttctctaaataactataattattacttgatttctgattcgtcaataaggcatgcaaatagttattatatactggaaagccttaacagaacaagggatgatatggaaagattaaatgatgaggtgattgaattaaatccgttctttgctgaagatatggtaaatagctctaatgagatttattcaattcattttaaggttccacatgatgatattgatgattttaaaacggttatggtagctatccataagaatatgactgatgagattgtatccaataatcagttgagatatgattattttaatagcggggaggtggattttgttttaaaaacggcttatagatag

SEQ ID NO: 2202 - DNA, 435 bp, Methanobrevibacter ruminantium
  source 1..435: mol_type = genomic DNA
atgagcactacaatcagaattaacaaagacgtgaaagaattattaaaattaaaaagtgttgaaacaggtgtaagtcagatagatttagcaaatagatacattctatatggaatcaaatacgatgatacccctagtaaacctataaaatcaatcgaagaaatagaaaaactattaaattacgatgaaataagagaatctgtcgaagaaatagatcttaaagattacgaatacgaaatacctcaaggaatttcattagttaaagaaggagaagaaaataaaccaatcaatactgaagaagaaattaaaaagatattaaaatatgataaaccagaaggagacgatgtttcaagaagcatcgccggaataataaagacagaagaagtcacagatgcggtaaaactaaagaaagaaagattaaaagagaggtataaatga

SEQ ID NO: 2203 - DNA, 393 bp, Methanobrevibacter ruminantium
  source 1..393: mol_type = genomic DNA
atgatttttttagatactacctatataattgcattaataaatgaaaatgataaatatcataagaaagctttaaaattgatggaagatgtggattatgaaaagaagatgacaaacagtgttgttttcgttgaatcattaaatatgttggataaaagaagcacacaaaaggatatagataacattgttaataaattatatcaattagacaaaatacattgtgtaaattctgcaaatatcaaaaactcactaaatatatttaaattttacaatggttctataaattttgcagattgcactataattgatagtatgatcacatatcggataaatgaaataatatcttttgattctgattttgataaggtgaaagggataaaaagaatttatatttaa

SEQ ID NO: 2204 - DNA, 2289 bp, Methanobrevibacter ruminantium
  source 1..2289: mol_type = genomic DNA
atgctagttaaaaagatgcttagagacttatctgaccataagattcaatttgtatccatcttccttatggcctttttaggcgtattcgcctttacaggaataaatggagaagtggttggaatcacagatgtgtcaacacactactatgaagacacaaatcttgcagatggttggatatatggcgagaactttgataaggatactctaaaagatataaagaacatggaagaggtcaagaatgcccatagggagatggtagttgatacggtagccaactactcttcggacccagacataactctccatatactggaaggaaagcaagagatatccaaattccatctgtttaagggaaaagactttaatcctaacgacaaggaaggaatatggattgacaagcgctttgcagatgcaagagacctagatattggagataagatatcccttaaatttgatggaaagacagtgtctaagaccatccgaggaattatatactctccagaatatgtctactacatccaggaaggaagcatgatacctgacttcagccaagtgggctatgcattcatgccaagtaagggagctgattttgacatagagtacaatagaattacaatagacggcaagaaggaacttgacgctaaggagttcagcagtgaggtatcagagcttttaggccaatacacctatgcccaattcgttccaagggaagacaatgtaggggtaagcacattgcaggatgagatagaccagcataatatgttttcaggaattttcccaattatctttgttatggtggcccttttaacccttttaaccacaatgagcagggtgatttcttcacagagaacacagattggaacactgaaggctatgggatatgacaatactacaatcattctccattatctctcatatggattcttcctatcctttgcaggctctcttttaggccttataataggtcctctcacccttccatatctcttctatccaagcatgtcagcaatgtattcacttccatattggggtcctgcatggaatctcagttttttccttgtggcagctcttatggtaatcatttccgttcttgtaacattcatatctgtcaagacaatcaatgatgaaaatccggctgactcaatcaagcctaaggttccaaaggcagtaagctctggaataatggagagaacaaagatatggaaaaagatgggattcaatggaagatggaactatagggacgcaaaaagaaataaggtaagggcaataatgagcatctttggcgtatttgcctgtgctcttcttataatgtctgcatttggaatgtatgactctatgaatgacgttcaggactggcaatacaaccagatttataattacaactcaaaattatatcttgatgaaaacattacagatgctcaattatcaaccgtagttaaggacacaaacggcgaagagatgatggagcaggccattgaggtcaagtataggggaaataagcataccgcttcgatgacggtctataatgattcagaactctttagaccaaccgacatcaatagaaactatatagagatagatccagatggcgttgccatttcagacaggcttgctgaagtattaggacttaaagtgggggataaggtaaggtggcatcttgttggaaatcctaaatggattgattcagagataactcagacctattcaactcctttcggacagggaataatcatgtctgaaaagacctatgaaaagtatggcggagatgactataattattcaactaatgtggttttaacagaggataaggacattaagaactatacaggagtcaccagtgtctctacaagggaagatattgtaaagggctgggaagacatgactgaagccatgaatcttatggtttatgttcttataatatttgctgtcattttggctgttgtggttttatataatcttggccttctctcatttacagagattcaaagggaaattgcaactcttaaggttcttggatttaatacaaagagcttgagacgacttttactcactcaaaacctatggttttcaacaattgggttcatattggcaattccaggtgcatatattctaatggaggccatgatgggctcaacaggagctgactattatttcccaataaatatctatccgttgaactttataatcagccttataatgacattcggactttccatacttgttaatctgctcttttcaagaaagattaagaaggttaatatggtcgaatccttaaagagcaatgaatag

SEQ ID NO: 2205 - DNA, 705 bp, Methanobrevibacter ruminantium
  source 1..705: mol_type = genomic DNA
atgacaacaatgatagaatttcaaaatgtttcaagagaatatcaaagtggagatcacatattaaaggcattagacaatttaagcctaaagattgaaaaaggagaatttgttgttattttaggaccatcaggtgcaggaaaatccacatttttaaaccttttaggaggattggataccgcaactagcggaaaaataatcgtaaatggggaaaacatagcagattatgatgataatcaattaacaaaatacagggcaaaggaagttggattcatattccaattctataacctgattcctaatctaacagcaaaggaaaacattgagcttatgagtgatataaccaatctaaaggtagatggaaataagatattggattctgtaggtctcttagaccatgcaaaccaattccctgctcaactctctggtggagagcagcaaagggtctcaatagctagagccattgcaaaacaaccggctatgctattatgtgacgagcctacaggtgcattagactctaatactggagtactgattctttccttgctccagacaatgtgtcacgagaagaatacgacagttgtgatagtgactcacaatgccaaattggcagatgcagctgataagcttatcagaatcaagaatggacagatagaggaagttaaaatcaatgaaaatccattagatattaatgaaattgagtggtaa

SEQ ID NO: 2206 - DNA, 1332 bp, Methanobrevibacter ruminantium
  source 1..1332: mol_type = genomic DNA
atgaagatgatacgtcaattcggggaatcctccatcgctcttgtcgtcaatctaatactgtttttatttaatggaattaaatacatatttacccttcctaatcgtatttatgtctatataaagctatttttagaagatactgatgcagtattaaaggaaagcctgattgctctttctatctgtgctgtaggggatttatgtgcaggtatcattttaggaaatatggaattcttcctaaagacctatcccggccttatggtaatcattccaggtgcaataggaatgaggggaaacatctttggctcttttggctcaaggcttagcacacaccttcacattggtactttgtctcctgaatttaaaagatcagagatacttagcgaaaacattacagcatcccttattttgactatggtactatccatattgcttgctgtaatcgctaaaggagtctgcatagcctttggatttaaaagcataagcatttatgactttgttcttatttcatttattgcagggcttatttcaactatcattatgctgcctattacaatgtttatctcacttaagagctttgaaggaggctgggacccagacaatattacaactccattcattgcagctgttggagactttttcacccttccagcaatcatattaagcgtaatcatagtgggattcatttccataatccctatagtcaagatgattgtctttgtagcggtaatatttgttacaatagcagcattgattgcaggatacacagcaaaaagcgatgtaaggcatattgtaaggcaatccactcctgtactattcatttgctcactccttggaacatttgcaggtggaatattgaatgattctcttacaaccttgcttaagaatcagactttactcactcttgttccactcttctcaggtgaaagcggaggattggtaagcatattaggagcaaggctatcatctggccttcactcaggtcttattgacccagtgctcagacctaagaagcatacagtagagaattttgtagctatattgaccctttcagttgtaatgtatccggttataggatttttggctgagtcatcaacaatcgcatttggcaatattggtgtaggaatacttgaatcaatgtcaataagcttcttggcaggtatgattttgattcttctaatgttgcttgtagtgttctacatctctacaatttcttatagaagaggattggaccctgataatattgttatacctttatccactagcctaacagactctatatcaacattaattttaattgttgtgtctttaggtctattgaattatgttttttaa

SEQ ID NO: 2207 - DNA, 609 bp, Methanobrevibacter ruminantium
  source 1..609: mol_type = genomic DNA
atgcctagcgtaaaagatattttaattgaaatgaaagatatgtcggaattaatggtcgatttagcttattcagctgtattgtttaacaacagagcagctgctgaagaggtaatcaccttggaaaacaagttaaacagcatgaattatgagattaaaaaacaatctcttgttgctgcaagatctcttgaggatgcagaaaagctaacaaccttgcttgagattgcagaagctgcagaatccatcggaaatgcagctaaagacttagccgacttgacattgaaaggattcgaacctcacccagtatttaaaatggttatggaagaaagtgaaaagaccattatccgtttgaatgttgatgaaagttcagttcttgtaaacaattcattaggtgacttattattattaaaccgtactggtatgagaatcatttccatcagacgtggagattcttggatttacggacctgataaaaacacagttatcattgcaggagatgtattgatagctaaaggttctgaagctggtacagagattattgaaaaattagcagaaggagaaatggatttagaagatttagtcaatatggaagactttattgatgataattag

SEQ ID NO: 2208 - DNA, 1365 bp, Methanobrevibacter ruminantium
  source 1..1365: mol_type = genomic DNA
atgatgattcatcttattggtattgggaatgataaaggaaatataactttaaatgcttttaaggctattaaagaagcagatgttattattaattacaatgatattgatttaagtttctttgattctgaaattaaagacaaagagattatttcagctattgatttgattaatgacatagatttagaagatgatcttgatttaaatgatgatgtagctgaaaatattgattctgatgaggatttagattctgaaattaattcagatgacttagaatctaatattatttcagatgacttagaatctaatattatttcagatgatttagaatctaatattatttcagatgacttagaatctaatgtgggttcagatgatttagaatccgatattgattcagatgactcatctgacatcgatttagaagatgatctaaaatcaaacccattattagaaagaatacttcaagaaaacttcttaattgaactagccatctctaaatcattggaatccaagcaagttgctttaatagtctcagatgacccaaatatcctaggcctatccaatcgcttccttcaaattaagtccaagtatagcgatgtaaaatataaaatatatcctggggtttcttcaataagccaatcagcatctatagttggtgctcctttaggtgattttgctcttatagacctatcaaacccaattacatctttatctgaaatagaagacaaggtaaaacacattttagatgccaatttagtcttggcaatcaaaaatcctatcgacgataaaagagaagatggaagagaggcttataatttaattaaatcaatcataaacgaatacaatgatgaattattgactgcaatagtctatagtgatggctattactctatagatgagtttaaaaatatttatgatgaagatattgatgaaaattcaatctttttcattggaaataagttatcctatattttagaggaatcaatggttacttcctctgattatattgtagagactaaacttatctcatggtctattgagttctttgaaaggtatttgaatggagaggttccaagaggccttgattatgattgcgatttccttccatgccatgtgaatctggaagcttgtgacttttgctattgtccattctatccctgtgcagatggagttacaggaggagaatggattaaggacagggatgtttggagctgtcagcactgtgattggatacatctggaagagccttgtgtagctattagagaaggcttggatgatatcttaaaggaaattgatgatttgaaggataaacatattgagctacttaaattaagacgtaagagtcttttaaagaccttaaaatag

SEQ ID NO: 2209 - DNA, 786 bp, Methanobrevibacter ruminantium
  source 1..786: mol_type = genomic DNA
atgaaaatatcaagaattatacttatattattgctttttgttgtattttttgaaataggactgttcagctcatataccatagtaaatgctgaagttccaaaccctcaggaattatgggatatgcaggtaaacactgttagttcattcttcagccctgaaaatgtaggcggattgcttattaaggatccagataacattaacgttacaaataaatatgatctggccacagaactggctgaagtggcagaggtggatggagtcaatgtggaaaatatgacaatcactacaagtgcagatactgatgaagagccattcaatgcaactgtaactgcattcggttattccactcctaaaggaaattccggttcaatcgttattagcggacagcctgattataagattgtagcttcagttcaaattaagcataccataaatggctatgaagcggatttggacactatcaatattgaatccatattaaaggtatatgactcaaatgacgctaagaacgtaagctattccggttatgattcaggacctagcggcgcttctcaaagctatagctattcatctgactcttccagttcaaatgataatgcttatatctcttcagattcatccagtggcagttcaagctatgacagcggagcatcttcttcatctggttcctatagtggaggttccagttatgatagcggtgcttcttcaggttctggttcttcttctggttctggaagtggagatgtagtgattaatctattaagtcctatattttcatttatttaa

SEQ ID NO: 2210 - DNA, 1974 bp, Methanobrevibacter ruminantium
  source 1..1974: mol_type = genomic DNA
atgacagctgaaacacttcttaaatttgcaagaaaaggaataatattaacaccaggggcgtatgatttaattctaggctcagataatcctttagatttaagttcatcaattattttaaaattaaaaagcggaaagtattctaatgaagatctggttccggtagatgagaagcagataaaagaaatgatgaaagcgcttggaataagtgttaaagagaacaagggattagatcatggctctttagatgactttggtagtagaactagtggagaaggtcttgaaagaaagattgaaacaagacctgaaaaaactgtggaaaaagcagtagagccacaacaagcagtggaaactagagaacaaaaaccacaacaaaccttcaaaccaacacaagaaaaaactgtggagaaacctatagaaaaaccacaacaaacattcgaaccaaaccaacaaagaaccgtggagaaacctatagaaaaaccacaacaaacattcgaaacacctgcaaaacaaacccgtgcagaaaaaccaataaaaccacaaataaaaccaattagtgcagaaaaaccaacagaagcaccacaaaggcaagaaactaaagaaatagaaaaaaccatagaaaaacctaaatctgataagcctaaagtaaatgcaggctatcctagtgatcatattgtaaaaatagacaatgtagaagtgtctgaagagactaaaaagaaatacagaagaaacttaacagaatctaaagtcaattttgacggtttcaaggtcctaaaggacacaagcaacaagtcatacacaagcggtgagataggaaaccttatcgaatatttccaaaacaggtataagaaattatctgacatattatctaaaaggccagaactacgtacatggcagaaaatcaatgaaatcaccgagactcagactgatttaaatcttattgtaatgattacagacataaaaagcactaaaaacggccattacttcatagaagtggaggacgataccggctctatgcctatccttgtaagcaaggataacgaccagctgatacgagctgccaagaatcttatgaaagatgaggtcattggtattgtcgctcaaaaaaggccgggaaatgagcttgcaatctgtcaaaacatcatagatccgggagttccaagaatagctaaaaaggaagtgaactttggaacagtatttacctcagacattcacattggaagctcaaccttccttgaagacgcctttacaagattcatcaaatggattaatggcgatttcggaagcgaagagcagatggaaatggctaataacgttaaatacatgattattggtggagatatcgtagacggaattggtgtctatccaaatcaggataaggaattggcaataaaagacattacagcccaatatgatgaggctgcacgtcttgtaggcgacataagaagcgatgtaaagatcatcattactcctggaaaccacgacgcttcaagagtggctgagccacagcctgctgtacctgaaaagtatgctaaatcattatatgaattgaataatgtggaattcctctccaatccaagtatggtaagtctagatgggcttgaagtgctcatttaccacggaaggggaatagatgatatggttatgggttcaaatgacttttcacacgagcgaaatgaccttgtaatgaaagaattcttaaataaaagacatttggctcctttatatggtgagagaaccccacttgcttcagagcttgaagatcaccttgtaatcgatagggtcccagatgtactgcacacagggcatgttcacataaatacctatacaaactataagggaattcattgcattaattcaggaactttccagactcaaacagagttccagaagatttataacattgttccaacccctgcagaggttcctatcattgatgttgggggcaattataagcaattgaagtttatagactaa

SEQ ID NO: 2211 - DNA, 588 bp, Methanobrevibacter ruminantium
  source 1..588: mol_type = genomic DNA
atggaaaaggaaatagtaaaatcagttgtagagatgtcagcttatgtatttgaaagaggccttgtatcagggaaagctggcaatgtaagcgcaagattcaagacagaccatggtgacatagtcgccataactccaacacttaaatcccttgctgatttggaagataaggacataattcttgttgattcagagggcaataatctaactaaaggcaagccatcctctgaacttggaatgcatctggcaatctatcgtgaaaagccagatgtctatggaatcgtacacacccattcaccttatgcaacaggattcgccttttccaataaaagaataaagcgtttggaaggattcggacaaataaaatcagaatacattaaagatatagactactataagcctggaagtgaagaacttgctaaaaatgctgctgaagcattgaaggaagaggatgttattgtcctaaggaatcatggagtcatcgccactggatctactgttaaagaggctgccacacttgttgaattcgttgaagaaagtgctaaaacccaatttgtgacactagtcttgaattccttagatgaaaaatag

SEQ ID NO: 2212 - DNA, 492 bp, Methanobrevibacter ruminantium
  source 1..492: mol_type = genomic DNA
atgaaaattgaatttgacaccataggaacaatacactctccttttaaagagctagagggaatgcctattcaaccaaccggtgcgaaaggcattaaaggagaaatacatattaaagatgaatataagcctggattaaaggatattactggtttttcacatcttatacttatctatcacttacataaaaccaatggaaatgcattggaagtgaagcctttcatggataataagacacatggagtctttgcaacaagatctcctaaaagaccaaataacataggaatgactgtagttgcattggatagcgttgatgatgactgtgtcttgcacatatccaatgtagatattcttgatggcactccacttcttgatatcaagccatatgttcctcaattgcatgaggacaccattgtagacttaagaattggatggtttgaaaccaatcataaaaaagcgaaaacacaaaaagcggatgatagatttattaactaa

SEQ ID NO: 2213 - DNA, 249 bp, Methanobrevibacter ruminantium
  source 1..249: mol_type = genomic DNA
atgacaaatgaaacttttgaggaagtatcacaaatattaaagcatattatggaaaatcctagtgtaccacgtaatatcagaagagctgcagatgaatccttcaacactttaaacaatgaagaagaagatgaaactgttagagcaagcgctgtaatcattaaattagatgaaattagtaatgatcctaacattcctgttcatgctagaaccttaatttgggaaatcttatctaaattagaagctatttaa

SEQ ID NO: 2214 - DNA, 357 bp, Methanobrevibacter ruminantium
  source 1..357: mol_type = genomic DNA
atggtaaaaaatgaaaaattcataactgtaatttgttttaataaatttcatggaaagaagatttttaaaatcggatctattttaaagcttgttaaagagcctgacaatgcctatgacgctgaagctatccgaattgagatgagatatgcaggtaaggttggatatttggcaaacagcgttaaaacggtagtgcgaggcacaatgagtgcaggaagagtctatgataaaataaatgatgaggctgcttatgctcaagtgaaattcatttcaaatgaaaatgtgattgcacgtattcttgaagaggaagaaataaaagaccttaaaagagatccggaaagtgatttaaactttatttaa

SEQ ID NO: 2215 - DNA, 1008 bp, Methanobrevibacter ruminantium
  source 1..1008: mol_type = genomic DNA
atgtcaaatacagaaaaaataaatgtaaatgtagaatccaataaagataagggatttagtgatgatatcaacacaatcttcataaacttcaatggtctaaacattagccttgaacttatggaaaaacaatcctataaaaatatggacattattcctataaaaactgacagctttgcaaaaaaagatttcatcacacttaaaaaaggctttgaaatgggccttgttgaaataaaggagcttgaaaatgaggaagtaaatacagtaatctgcaaaaacgatgcagttgttccgcttatcctaatcgatggtgatgaaataataggagccaagcaaaacagaataatgaatgaaagccttctaattccagcaaagtctcaagtgaaaatcccagtcagttgtacagaacatggccgctggagattcaagtcaaacgagagagaattccaacattctgattattcccttaacttcgaaagcagaagaatcaagtcaattgcaagaaacgaatgcagagactatcaatctgatgtatggagtcatataagcgatcttgaagacagacattcctttagatcaaggacaagctcaatgaacgacaattacgagcattctaaaaccgctcaagatgactatataaagaatttaatgattgcagatggagctaatggtctcatttgctttataaacggtgaatttaagggattagagttattctataatcatagcatctataaggaatattatgaaaagacattaagaagctatattattgaagccatttcttatggaggaaataatacagttggcgaagaattatttagagtgattaatggtgaaatgaatgatttatcttcatctgaatttatagaatatgaaaccgttggccttggaaagaatataagattcgcaactaaaggaggatcaggttctggccttatatttgaagatgaattagttcatatgacttacttcaaagaggattccaataaaaactatgaaattttatag

SEQ ID NO: 2216 - DNA, 1026 bp, Methanobrevibacter ruminantium
  source 1..1026: mol_type = genomic DNA
atgataactgaactttactccaattcaatttatatgttacttacaatcttgctattttcacttgcagtagatcttcttctaggtgagtttccaatgcagatacatcctgtagtatggattggaaaaataataagcttttttaagaatatcctaatcaaatacgacaataagatagctggattgattctctcaattgctgtaataattgtttcatcacttattgttctaattccaatggctatagcaaggtatctattgccatataatgatatgatgatttatctattcaagctgatagcgattttgcttcttacttcaacattttcagtcaagctgttgttggattctgcccgtgatgttgaaaaggacttaaggaacaataacttaaataaggcacgtcaggccgttagctatctggttagccgtgacactaatgaattgaataaggagcatgtcatatccgctgtaatagagactctaagtgaaaacatacctgactcctatgtttcaactgtattctactattcaattgttggaataatagctagcctatgtggaattggagactttgatgtcataatacttgctgttcttgctgcatttatccatagggttgttgatacaatggattccatggtaggatacaagactaaggaactctacaatatcggttttattccagcgcatttggatgatgctttaaattacatacctgcaaggttttctggagctttgattgttgtatctgctatgtttctacgtttaaattggaaaaatgcattgtttattatgagaagggatgcaaacaattgtgacagtcctaattcaggatatacgatggcaacagtagctggagcattaaacattcagctagaaaaggaaggagtttataccttaggggataatataaatccaataaatgttgattgcattgaaaaggcagtggatctagcaagactgaccatatttttagttacaatattcttcatgtttgtatttatggatttaattcttttaatgctttaa

SEQ ID NO: 2217 - DNA, 465 bp, Methanobrevibacter ruminantium
  source 1..465: mol_type = genomic DNA
atggctgtaatagatgaagaacaagtaagagaatggttaatggaagaagacatgattagagaaaagatttatgatgaaaatgctaatttccattatattatcaatttcccaaataacaatgcaatggatgtaattcagcctagaacaaaagaagacgttctccttataggctgtgcaacagaagtctcacaagtagagcaagacatgataaaaaacactgataaggcaataaatcaggagtttatatggaacgtaagatttgccttaaacgaaatgcttctagactttgagttggaacatccggatgatcaattgaaacgttttatcataactgaagacatattttctgatgggcttacaaaacatgtccttgttaaatcaattaaaaaggtatttaaagcaaaattacaatgtatttggttgttaggtaaaacatatggaacagtccagatgaaaaaagaataa

SEQ ID NO: 2218 - DNA, 1167 bp, synthetic construct
  source 1..1167: mol_type = other DNA
atgacaaatattttcgaggatctgcaggaagagagcgtgggcgtgagtatctttaaagacaaaaagcccttggatcaccggtttctgcctgagaatctcccccatcgaaagaaacagatcacggaaatagcgaaacactggattgaagccctgaatggcaacacccctagcaacatcacaatctacgggaagacaggaactgggaagactgccgctgccaaattcgcgaaagagcagctgattgaggcatctagagataaaaacgtcttcattaaggtagagtacatcagatgcacagacttcactacagagtaccaggtcctgacctatctgtgccagaggctaggccgtgatgttcccaaccggggatggaccaagggggagatcgtaaacaccttccgggacattctgaggagaaatgcctttggccgcaatctgattttgatcgtcattttagatgagatcgacatcctgctggagaaggacggcgacggcatcctctacacccttacacgcacggataatattgccatcctgtcaataagtaattatctagactttaagcaattcatcaagccaagggttgcaagcagcctgcgcgataaggagatagtgttcccgccctatgatgcagagcagctcgccgacatcttgcacgaacgaagcgaactggcctttgaagagaacacgcttgaagaaagcgtgattccactctgttccgccatggctgctaaggaagagggtgatgcacgctacgctctggacctattggagaacgctggggacatcgccgtggaggagggtagtgaaatcgttaagggaaaatatgtgcggcaagcaaaggacgtcattgagtataacaaggtgaaagacgtgattattacacttccaacccagcagcaaagggtgctcgccgcgataatgaaactgactcaggacaacgaggaaatcacttcaggtaagctcttcgaagtctacaaggatatctctaaaggagactccgtgacctaccgccggatctttgacttcatcaacgaactggagatgctcggaatcatctcgaccaacaccatatcccgaggcagagggaaaggcaggaccaatattatcaagctgcagacggattctaagctcatacaggacaacttatccgctgtgctttactga

SEQ ID NO: 2219 - DNA, 705 bp, synthetic construct
  source 1..705: mol_type = other DNA
atgacgagactcattgagttcaagaatgtgaacaaggagtataaatctggagactacattctgaaagctatggataacgtgaactttacaatcgatgagggcgagtttgtagtgattctgggacccagcggggcaggcaagtccacccttctcaacctgctgggtggcctcgattcagttagcagcggggagataatcgtcaatggcagtcacattgaatcgttcgacgacgaccagcttactaactacagggcccggaatgtaggctttgttttccagttctacaacctgatccccaacctgaccgccctggaaaacatagaactgatgaaggacgtggttgacttcgacatcaacggactggctgtcttggatgctgtggggctcaaagatcacgccgaccattttccagcacagttatccggtggggagcaacaaagggtgtccattgcccgggcaatcgcgaagcgccctagtatgctcctgtgtgacgagccgacaggagcactggattcaaaaaccggggctttgatcttggccctgctacaggacatgtgcgagaagctcaatacaaccgtggtcatcgtgactcacaatgccattctaagcgaagcggccaataaggtgatccgaataaagaacggccagatcgaaagcgtcatcgtgaatgagatgccaaaaaaggtctctgaattagagctttga

SEQ ID NO: 2220 - DNA, 2268 bp, synthetic construct
  source 1..2268: mol_type = other DNA
atgctcaaaagaaagatgctccgggatatctggaattataaagtgcaatttatatccatcttcataattgcattcatcggcgtatttgtctttgccggactgactgccgaggcagacgggtttgaagcctccatcgactcattctaccagcggagcaacctggctgacggatggatctactcaaactaccttgttgacgacttcctcaagcaggtctacctgcttggcgccaccactagtatggagcgccagctggttgtcgattcccaggcggaattagacggcaagcccgatattacgctgcacttcgttgaaaacaacaccatctctaaatattatcctctggaaggcaacgaactgaacattagcgattctgagggtgtatggctcgataaaacgttcgccgatgcccgaaacctgaagatcggggacaccatcgcatttgaaagcaatgggattaaaatagagaagaagattaggggtctgggctattctccagagaacgtctacagcttggtgcccactcagacagttcccaattatacggcaaggggctttgcttatatgtcctataaggcattcccaagcgacaacatcacttataatgtgctaaacgtgaagtttgatggacgccctgaaatcttcagtgagctactgtcctaccgtctcgatggatactatgaattgtacctgccccaaagcaaccaatacagcgtaaatgcggtgtcagactcgatcgcgcaccagagttcattgaacgccgtgttcccaattctgttcacactcatttccatgctgatgcttagtgtgaccatgaaaagaatcatctcgaaccagcgcacccagatcggggtgctcaaggccaatggatttagcaacaggagcatcgctatccattacatgtccttcggcttcttgctggtcacatcagggagtatcctgggtgccattctcgggccgatcgtattccacttcgtggttcatgaatcccgcatttactattttaagttcccggtatgggcttacgtgggtcttgagcggttcattttcgtaatcgtgataatcagtttgatctcactgattgtgagttacctcagcattaaaagcattgtcaatgagcctccaagccagatcataaagccaaagccgcccaaaatggtcagttcggggttcattgagaagctagcaatctggaaaaggctgtcattcaacatccgctggaactacagagatatcaaaagaaaccgattcaaatccctcatgacaatcgtcggcgtgatgggatgtaccatacttctcatctcaggctttgcagtgtatgagcagatggagattagcaaggactggtacttcaatgacgttaaccattttgaatccaagctggtgatcgacgacaatacagacctttcgcaaatcgacagtatcgcccacaaggttaacggggatgagataatggagtcctccattgaaatattgaagggggatgccaattttgcttccctcctggtgctgaacgacaccgatcttatcacaatgaccaacgacaaccgtgagaagatagatattccaaaaaacgaggtgagcatcagcaagaagatggctgatattctggacctgaaggtgggagacaccatcgactgccacctacttgattccaacaagctggtgaagatcaggatcgatcggatacacagcacccccttcacgcagggccttgtcatgtctgccgacaaatatgaagagctgggcttcaattttactcccacaagcattatcactagcgagcatgtcaataagtcctacgatggagtcaaatccacaatctactcagaagacatggtgcgaggctgggaccagatgcagaaaaccagcatgatgataatcaccagtatattgtttttagccattgtgttagctgtggtgattctgtataatatgaacctcctgtcgttcatcgagatggagaatgatatcgccaccctgaaagtgttaggctttaagagcaagtacctcacgaaactgctagctacccagggctttttctttattattgtcggttttatcttggggctgcccgtcgcgtactacattctgacactgttgatgcctgccttcggaaataagatctatctgatccctaacatttctgtgctcaatatggcctttagctttctgataattgtctctgtgttcattgttatgaatctctacttcagccggaagatcagaaaactcgacatggtggacgctctgaagactttcgagtga

SEQ ID NO: 2221 - DNA, 2238 bp, synthetic construct
  source 1..2238: mol_type = other DNA
atgaagaatcgcatgattttgattatttccctgttccttatttcactgctcgccatcggggcggcatcggcatctgaagacataactgataccattgaggcaccggcggctgatgaggtggtgacggttgatagtgagatccaggagattgagacggtggacaataacctggaagaaatagagaccgatacaaataatattgaggaggtggaggcggccgacgatgaggtcatcaatgaaaccgccgaaactgagataaaagacgagaccgagattacagatgaaactatcatatctgaggaaaaggtgcaaatcgctaatgatgaaaaaatcgtccaggacgggttgctgggctttagcatcaatttaacggacctgctgggaggagagtcgtcatctctgaatttgagcaaactcctgagtggcgacaacttgaacctgaatttgagcaagctcctgagtggagacaatttaaacctgaactggagcgagctcctgagtggagatagcttcacccttaactggacagacctactggggggtgacagcctgacggtgaactggacggacctactcggcggcgagtcgacaaccctcaactggacagacctactgggtcgggacagcctgacagtgaactggacagaccttctcggcgaggactttacccttaatttgaccgacctactggggcgggacagcctcaccgtcaattggacggacctgctgggcggggacagcctaacagtcaactggacagacctgcttaacggagacagcttgaccttcaactggacggacctgttaggggacaacttgacactcaatatgtcaagtctgctggggggcgagtccacgaccatcaactggacagaactgctgggtgacaatttaacgttcaatatgtcaagccttctgggcgaagactttaacctgaatatgacatccctgctgggtgaagatttcaagcttaacctgacaaacatctttggggataatctgacagcaatctttggagaaaacctgaccaacaagctagaggagctcttcggagacgatttcacaattaacatgacagatctctttggcgaagacttagctcttaatatgtcagacatcttcggcgacgattccatcttcaatctttccaatattctgggcgagagcacaaccatcaattggaccgatctccttggagaagggtctacgcttaacatatcaaaaatcctcggcgagagcctgacactgaatttgactgacctctttggagagtcctccaccctcaattggacagaactattgggtggcgagagcctgacactgaactggacggagctcctgggcggagacagcttcaccatcaactggaccgatctgctgggaaactcgacaaccatcaactggacagacctcctcggccgcgacagcttgaccgtgaactggacagacctcctcgggggagacagcttcaccatcaactggaccgacctcctgggaggggaaaccctcactatcaactggaccaaaatcctgggaaacgatacttcattgattgataacatcacttccttaattgatgatatcagtcccttcgttgataaccttaccactgccgtgaaagatctgattaacaagttcctgaaagaggaaaagactgtgagtgtgatcaactatgaagatatgaccaccactgccttcgactctaaaattgatggcagaatcgggaagtacttcgtagtaaagctgaccgatgacaagggcaaggccctgtccgacaagtttgtgcagatcggcttcaatgggaggatctacaaccgaaccagtgatgagaacggtacggtcaaattgcagataaacctgggctataagggggattacacctttgctatttgcttcctcggtgatgagaaaaccaacggatcatttgcagttgccaaaattactgtcaagaagcagaaggcgaagctgaccggtactgccgctagctacaaagcctccgctaagaacaaatacatctccgctacctttaagacgactgcaggctccccaatcgccggtaagaagataacctttaccatcaataagaaaacttacactgctaagaccgatgcaaagggggttgccaaagtgaaggtaagcattaccaataagggcacttatgctttcactgccaaatacgccggcgacgatacttatgccactattacctccgccagtaaaaagcttactataaaatga

SEQ ID NO: 2222 - DNA, 960 bp, synthetic construct
  source 1..960: mol_type = other DNA
ctgtacttcaagtgcaaactgaaggagtgtaatattatttttggccataataatgtgatttcaataaaagactttgaaaaggaggacatcaagttcatcctagatgaggctgagaagcttgaggacatcgctcaatcgaaagagaaatccgaagagctctctggaaagatcctcgggctcctgttctacgaacctagcacgcggacccgcttgtcctttgagaccgccatgaaacgcctgggcggggactgcatctcccttggagaaacttcaaacagcagtgtagccaagggagagagcattgcggacactgctaagatgtttgagagctactgcgatgccatcgttatacggcacgacctggaaggtgtgagccgattcttatctgatgtgatcgacgtgccaatcatcaatgcaggggacggtgcaggccagcatcccacccagaccctcttggacctgtacacgatccggaagcacttcggcaagatcgatggcctgaacatagccctgctgggagacttaaaatacggccgtaccgtccacagtcttagttatgctttggggatgtatgatgttaaaatgacattcgtgtcccccgaggagctaaagatgcctaaggaaaacctcctcgaccttgaaaagaacaacataaaatataaggaaacaagcaacctgaaagacatcatcgatgagattgatgtgctgtatgtcactaggattcagaaggaaagatttccggatattgaagagtatgaaaagatcaaaggggcgtatctgatcaacaaagacctgctcgagggcaaggagctgattgtcatgcacccattgccccgcgtagatgagatagactacgatgtggacaatacaaaatacaacaagtacttcgaacaggccgccaacgcaattccagtcagaatggccatcctgaagaatctcattaggcacaggtacgagtga

SEQ ID NO: 2223 - DNA, 504 bp, synthetic construct
  source 1..504: mol_type = other DNA
atgaagaccgccattatttatgcaagcaagaccggaacgactaagaagattgcaaaggccctggtggacaagatcgacggggaagtcctaaccataccaatcgcgcgagccaaaagcgcctgtctgctcaaatacgacttcgttatcatcgcaggctcgatccactacggccgcattcaaggggagataaaatccttcgtaaataaaaactataaaacattgcagggaatcaattacggcctttatatcacgtgcacaaaccagggcaaggctgaggaatacctgaacaagagcttctcagaggagatcgtgaaaagcgcctttgtgactgcctgcttcggggctgaaattaaccccaataagggtgacatgattaccaaacggatcataaactccaacctgaagaggtttaaaaaggagaacaaggagccgcctagtattgattgggagctcgtcgatgaatttgcggataaaatcaataaaagaacaatcaagaagaagtga

SEQ ID NO: 2224 - DNA, 807 bp, synthetic construct
  source 1..807: mol_type = other DNA
atgaagtttctgcgcttcaaaaagaagatcaatgagttgggcaaggacaattcaatcaaaataggattctacgatggggaaaagatcatcgagctcaaaggagacatactcgactattttaactctaatcttgatgagatcaaggaaaatatgattgagagctattcgctcgaagacatcgaaatagaggcccccgtgaatccctccaaaatcatctgcattggcctaaactacaaagaccacgccaaagagctgaatttagagcttccaaagaagcctgtgattttcatcaagcccaatagcgccctgaacagtacagagaagaacatcatcttcccgaacattagcaagcaagtggattatgaaggggaattggcggttgtcattggaaaggccacgaaaaaggtatctaaagaagaggctgatgattacattttcggctacaccatcataaacgatgtcaccgcacgggacttcaccctgggggacggccagtggaccaggggaaaaagctgtgacgggtttgcccccatcgggccttttattgagacagacctggacccactgaaccagagaatcgtgacaaaggttaacggcgagattaagcagaatagtaacacttccatgatgatcttctccccgcaggagataattgagtttatctcacagacgactaccctcaaccccggcgatatcattgcaaccggcacacctccaggagtgggtccaatggacgctggttccactgtggaagtcagcattgaggagataggcatcctgaagaactacctgatcaaagaagaatga

SEQ ID NO: 2225 - DNA, 1452 bp, synthetic construct
  source 1..1452: mol_type = other DNA
atgaaccaaaatgcccagtggaacagtatcataacttttatactggctatgattggcctgaccataggcatagggaacatttggcggttcagctacgtactctacagcaatggtggaggatcattcttcatcccctatttcattgcaattatggtgatgggcatcccgttcctgattctggagtacggactgggctttagcctcaagaagtcgtttagcaagctgatgcatgacatacgcccggaatttgaggtaattgcttggatgctcgtcatcttcgtcttcatcgttgtcatttactacatggtgatcataggctgggattttgtgtacttcctaaacagctttagcttcggttggggaagcgaccccaactcgttcttcatgacgtacgtggggggcactcgggagatctcccagatcggccgacttctgctgcctacactgatctgcaccacagtcctgtggatcatcttttggttcgtttccaacagggatgtggatgaaggaatcggcaagatctccaccattctcatgcccctgctattcattataatgatctttatcttcctgtactcattcaccctgccaggctttgacattggaatcaagacattgctgaagccaaattggtctctgcttttagacattcacatctggcttgcagccttcggacaaacaatcttcaccttaagcatcggccaggcgatggtctacacctatgcaagctatttgcctaggaatagtaaattggtcgatgaagtccttcttgtggttatcacaaacaccctctatgaggtgttcatcgccatcggggtcttctccatccttggatatatgtccctcaagtcatcgatccccatcgaaaaactaatcagtgaaggaacgggcctgatctttgttgtattcccaaagatatttagtgagatggggtttgtagggcagatcatcgggccactcctctttctgtcaattctatttgcgggttttacgtccgccttggccttgtttgagcctttcctcagctccctgtgtgataagtttaacctcagtagacgcaaaggggttacaatccttgtaattgtggctgtgatttgctccatccctttctcaaccggtattagcagctatttggtggggatcgttgacaagtttgtcaacgacttcggaatactgattttgattggtgtgcaggccattatattcggctggttctacggggtggagaaggtcatgcccgtgctcaatgagctgtctactttcaaggtgggcaaatcctgggtgtttaccattaaatatctcctgcccgtgctgattatcatcatttgggtcaatggggtggtgggcctgttcagtaataccaacagctttgaactgatcgtcgacctgattatcacttttgtggtggtgggcttctctgtgctcttcactaaattaggtgtgaaagagtga

SEQ ID NO: 2226 - DNA, 750 bp, synthetic construct
  source 1..750: mol_type = other DNA
atgatcttctactatacaggcactggaaacagcaagtacgtcgcagagacgattgctaagagtaacgaagaagagattatctcaatccccgactgcatcagggaaaacaaattcaccttcgacgtgaaggaggatgagatcatcgggtttgtgtgcccaatctattccctaggcatacccgattccgttcgaatattcctgaagaaactccgccttaactataataagaagccatacatcttcctggtagccacctatggaagtactgttgggaacattaagagcattgtgtcgaagtactttaaaaagatcgatggcttcttcaatgtcaagatggtcgacaactgggtgccgaaatttgatttgacagaccaaaactacatcaaacaggcggaggaatatggagagaaaagattagaggaggtgaacaacctgatactcctgagaaagaccgggaaatacctggaaaatgaaaataaaatattcagcggtttcatttacaaggtgggttatgacttcatccggaatacaagcaattttaagctggatgacaactgtattggctgcgggatttgccggaacaattgtcccaccaatacgatcaaaatcgagaacaagcggcctgtctggaagcgtaaaaagtgcgacatgtgctttgcctgtctccaccgctgtccacagtttgccattcactacggaaagaggtccatcgagcatggccagtaccttaatcctaacgtgaaactgtga

SEQ ID NO: 2227 - DNA, 864 bp, synthetic construct
  source 1..864: mol_type = other DNA
atgaaaatcaaaatcgccgtcccttccaaagggaggataagtgagccctccataaagatactagaaaaggctggcctcggcctgaaggacagtacgaaccggaaactgttctcatcgacttacaatgagaatatcgacgtgatgttcgcccgggcggcagacattccagagtttgtagacgaaggaatttgcgatatggggatcagtggctatgacctgattgaagaggcaggggccgacgttaaaatcctgaccgacctccagttcggtgctacaaagctggtgctggccagccccgaaaactccgagataaacacaaaagatgatttgaaggatggaatgaccatcgctacggagtttccaaacttaacgcgaaaataccttgaggagaacaatctgaacatcaagatcgtaaagctcacaggctctactgaaatcgccccattcattggcatagcagacgccatcacagaccttaccagcaccggaactacactcaatatgaatcacctaaagatcgtggatgtcatccttgaaagcagcattaagttgatcgctaacaaaaattcatacaccgagaaaaataacctcgtcgaagcggtgagcaccagcattcagggtgtgctggaggcggagcgcaagaagctggtgatgatgaacgtcgcaaaggaaaacctgtgtgaggtgcagaaggtcatgccggccatgagcggacccactatctctcaggtgttgtccgaagaggagaccatggccgtacaagccgtggtgggggaggatgaagtctttgacctcgttaacaagctgagaaatgctggcgcccgcgatatcctggtggttcctattgagaggattattcagtga

SEQ ID NO: 2228 - DNA, 204 bp, synthetic construct
  source 1..204: mol_type = other DNA
atgagcattcccgtagccccaattggccggatcatcaaagacgctggggccgaacgcgtgagcgaggacgctaaaaaggaactgaacgcatacgtgacagcccaggccgaggccgtggcgaagaaggcaatcgagttcgccgctatggcgaagaggaaaaccgtcaaagccgaagatatagagctcgcaatcaagaatctgtga

SEQ ID NO: 2229 - DNA, 1020 bp, synthetic construct
  source 1..1020: mol_type = other DNA
atgggacgaagaaaaaaacaggattcgacactggatagttattttccagactctgatttgatcgaggagaaaaagaagaaggatgaagcatgcaagatctgtgggaatcctatagaggacgccacctttcagcggtgtcgcaagtgccttaacaagctggcactgatagacgacctgagggaactactggaatacgtgtctccaggtgagagcttcagggaaattgacctaatcaataaaggctttaaaagcttgaagctcaacatcctcatctctaaattcttaaaagagcagctcatcctgattaacctcgacggtttatttactctgaacaatatcgactttctgaacgccttcatcaaaaaatatggcgagaaggaaaagcccctgaaggagacagattacctcatagtgcgcgatgacaagtctgccttttacatcgatgtcaacaactattcagattacataaagatccggttcaatccccggatcaacaagtggcaggtggacttcttcaatgagaacggcctcgccaataccaagtccttcattgactccaacgatgcaaataaggaagccatctattacattaagcagctgggtgtgatcggatcatcagctgacgataagaaagaggaaaagtccgacaaacggctttacagttcccatgagggcatctactacagcccgagccgtgggatgtggggagctaaagtcaagggatataagggatttaagttcattgggcacttcagtagcgaagaggaggcctatgaggcgagatgcaagtatctggaaaataaggaacgaacgcgccaaaagtacatctccgagaagagagggttgaaatccggcctgaggaaccagagctcgggggagctgatttacttcagcaaacagaagggcaaatggattgtgaggcttaaaaacaaggaaggccaaattgttaacgtaggccagtttgacaccgaagaggaggcgaataaagctaaagaggagttcattaaggacaacagttga

SEQ ID NO: 2230 - DNA, 321 bp, synthetic construct
  source 1..321: mol_type = other DNA
atgagtgaactcaagctggatctggtgttcgatgactaccagatcaaacgcgccaagcccgcaagggggtcatctgttatccatgtgaacaagagatggataggaaaggaagtgagcatcattccgctgccatttgacgtggatgaaaagttcattgacgaaaccaaaggggaggacggtctctaccaccttgagttggctgtcaaggagatcttttccaaaacagtcagcgatcggaaagacgtaggcttcttttacctaaaggagtccctgctgggcttattcttcctcattatagaggcccctgacatcgtgtattga

SEQ ID NO: 2231 - DNA, 1464 bp, synthetic construct
  source 1..1464: mol_type = other DNA
atgtacgagaaggaagacatcctgatcgactacatcaataatgagattaacactgtgcccttcagcctcaatgataaacttaaaattagaaacgagaagtttcggtgtcgggaggagttctatgagataaaaaactacgtggacgatttcctcgagggaaactataccaatcgctacatagtgcttcctggactaagggggctcggcaaaacaaccatcatctaccagctgtatcagtacctgttgcgcgagaaggaaatcaaccacaatcagatcctttatatctcctgcgacgacctgaatgactatatggacatcaatattttagacgtcgtgaactgcttcctgaagcttcaccacaattctaacttaagaacgctggataagaagatcttcattttcattgacgagtcacagtatgactcgaattgggccggggctggtaagagaatttacgacaagacgaataacgtgtttctcatattcacggggtcaagtgccctgaatctggaatataacgctgactccgcacggcgcctgctgaaaaaaagcatcacaccattgaactacgggcactttctgaaactcaagtacggcttccactatgacgaatttagcgatgcactcagtgacctgatcttcttgggcgatgagaagaaagccattcagtgcgaaagggaagtttactcgaaactgtataatttggagggctacaacgataatgtctgggacgatttcttaagaaatggaggattccccatctccttctacgagaagaacgatgacaacgtgtctcaacgcctgcgagaggtagtgaagaaagtcttgataagcgatatcgctaacatctccaccatttcaagtgaaaagtacattaacagcatcaggctactgaatttcctcgcggtgcaaaagccaggggacattagccagaacaagctggcaaactttctgaacgtctctccgaccaccgtgaagggtataatagaccttctggagaagacacatctcatctttcatacagagccctatggctctgccgccaaacgatctaaaaagtcatggaagtacttttttgcgagttcatccctcaaacatgccctggttaaggatctcgggagttccatgcgggatgtaaaaagctacgaaggcatcctgctggagaatcttgtcgcatccactttctttaactggacaaaccggaaaaacatttccttcaacctattttacgatgccaacgacgatgagaaaaacaagactaccgtggactttatcattaaggaaggcttcaacaagccaatccctatagaagtcggtattggaaaaaaaggcgataagcagatctccaagtcgattagtgactacagggctgattacggcattgttatcagcaataagaccaagttcatcgaacgacagggaaacgtgatctatctgcctccccgtagcttcagctttttgtga

SEQ ID NO: 2232 - DNA, 3846 bp, synthetic construct
  source 1..3846: mol_type = other DNA
atgaaactctacaaaaatagcatcatcatcttgttgttaattttgattctgtcgattggagcggcggcagctgtcgagaacgattactcgaatgccgatctggatatttctaacgattttgtgttgagtgataactccaacgaaattttaatcgacagctcgggctctttagatgactcctcgagtgccctggtgtcagaggggtcgtctaacggattggactcatattactccaatgatctggttctgaatgattccctgtcttccagaagttctgtgattgaggactcttgttctattgacagcacgacaattgaagataaggccttggaaaaaagcctgtcttcaaatgagctggctgaaggcacaaagacatatacagacctgctcaaggacatcaagagtgcgaagaatgtgctcaacctgaaatacgactacatctacgacagcactattgacaaaagtcttaaaaaaggtatcgtgttaaccttcgacgaggactatgagctgaccatcaacggcaacggccatatcatagatggcaatgggatcgctggtggattcaacttcgaaaacggggaatttgtcataaataacctgagctttcagaactgtaagatctcctctctcatcctcacgagctgtgatttcactaccaattatgtcactttctcaaacaactacgacaagagctctggggcctgcgtttatctggacaactcttacttctacagcagtcatgataattttattgacaactatgcgccatcaggcagcgccatctacggcgagtgcagtgtgatagacgtgtacgatggcctgtttgagtctcaaaaaccgattgactggtcctttatctatggctgggatgagacggagatctacatcgaggactgtctcttccgaaacaccgtatccaactactcaacggcagtctacggcgattatatcattgaaatctccaacagtcactttactaatctcttctccaaattcaccggaggcgccatcggagtaaggaatgctagcctgaccgttgagaaatccgagtttaacaacgtctcctcgcttagaaacggcggagtcatttacgcagacatgaatgtggatgaggaaaaatccagcgaggagacaatcattaaggactctagcttcgtaaattccaagtccgacttcgggggggctgttttgcagctgggcgggaaactcaagatatacagatcaaattttaccgagaatactgccaactactatggtggtgccatttatacttccaacgtcagcttttacaccagtaaaagcaaattcagtaataatgtagccaacgagatgaaaggctccgcaatctattttgacaatggagacctgaaaatcgaaaactctaacgtcctgagcaacccctcctgcgagggggccatttatatttacgatagcttttataatataagtggcagtacgttctcaaacaacgatgtggcaatacattcattcttcgaccgcacacggacggtaaaaaactccaaaacaggtaaaagcaccaccgtgaagtcctcgctaaataacaatacgtggggcggcgatcgcaataagttaaacaacgtggaatatccctattttgtgtccaaccttgggcaggacattatcctcaatccagtgaaaattaatgccaccatcaaggacaaatactttaatctggttgacctgggattggtgacccccgtgaaggaccagggggacagcggcgcctgctgggctttcgggggggcagcggcccttgagtcagccatcctgaaggcaactggagtgagcctggacatctccgaaaacaacatccagtcggccgggctgcggtatagcctgtacggtaagccctccctcaccgagggaggctatgactacaccgccctggcctactacctcagctggctcggtcctaataacagctctatcgatgagtatgaccagttcggtaagatctccccccagctgttctcggaagacaattatcacatcttggatgtgattttcctcgaccccgcaaataccagctcaatcaaggatggactcatcaaatacggggccttgtctgcctcagccaacggtgcagactcagattccaacgactttttcaacgaaaagacctatgcccagtactgcaatgacgatgaggcgtccgccaaccacatcatcagcatcgtgggctgggatgacaactactccaaaaacaacttcctcatcaccccaaagggaaatggggcatggattgtgaagaacagctgggggtctgactgggggaaaaatggctactactatatctcctactatgacgagagtctaaggtcctgctacgctgtggcctacctactgaacaacacgctgcgctacaataagctttatcaatacgacctgactaattacgatgactttgatgacggcgattatgatggggtgatctattccaacaagttcacctcaaatggggatgacctgattgccgctgttgggacctactttgaatatgaggacgacgactatgtcatcagtgtgtatgtaaacggcaaaaaggcctaccagcagaagggcacatctgcatttgtcggatacaacaccattaaactgaacaagtatatcgccgtaaataagggcgaaacatttacagtggccatcagcagttctgccatgccttacgttgatgatacgaggatacacctgcctaagggaagctcattcttaaccgttgacggcgaacagattgacctgagccaacggggccagatagcttgcatcaaggtgtacacctttaacgacacaaagataactcgggaccaaagcacttattacggtagtgataagaagctagcgattgaatctgagcttgaagggaccacaatcagcctcacagattcaaactgtaagagccttggctcggctaaggtcgtcgacggagtggctcagttcgatttggtgctgggcccgggaacgtatttctacacaagttcatacgctggagagaaaataataaatagcttcaaagtcttcagcacaatcggcggagtgtctaacaagaacattggatacaaggctacagccagctttagcctatcctttaaagatgagaatggagagattctcaacaatagtcaattcacttacacactggatggaaagtcaaagacgctgaccaccttggatgacgggacttacaatatctcctttaagaatctcgccatcgggacacacaagctgtctgtcaagaaccttataagcggccaggtgtccaatgccaccatcaaggttgtcagtcgattcagcggcgctaaagacattagcatgttctatttcgatggcacatgctacaaggtgcgtataatgggtaacgatgctaaagctgtgggtaagggccagacagttactgtagttctcaacaaaaagacctacaagctaaagaccgacgcaaacggatatatcagcctgaagatacctaacacactgactccaaatggcgcaaaggccaaggtgtacagtattaaaatgacgtatgctggtcagagcctgtccaagaagataacggtgaaacaggtcctgaagaccaacagtctcactgtcaagaaaaaagcaaagagcttttcaattaaagtcacacttaagggaaaaacagttctgaagtataaggtgctgaccatcaagttcaaaggcaagacctacaaggtcaagaccaacgcgaaagggattgcaactctcacccttaagaaagcggtgatcaatgggcttaaaaagggaggtaagtacaccttcactgtgacctaccttaaggacactattaaggctactgtgagtgtgaaatga

SEQ ID NO: 2233 - DNA, 507 bp, synthetic construct
  source 1..507: mol_type = other DNA
atgaacaagaagctgatcgagtacctaattattgcaacagtaattatcctgatcctgtacgggtgctactcgctcattgattatcaatccaacggctatcagttccggatggtgaatgctacggactccatgaacatatcttgtcccagcagtagcgcctacagcgtcagtggcgacacagtggagttccgcaacggacttaactcattctacaatatggacgtgagcaagctcaactcttcagacggtaaagtcaaaaacatactgaatcagtattctaagttccacaagtccgggactttagatcttaaaaatgagacctgctatgtgctgaccgtggaattggaggacgataaaggattcaattatcattccatgatcatcagcgtcgattcatttgacaaggacagcctgtcctttaacaaggaagccaccgtttacctctttgatgggaacaatagggaatttgttgtggacactgtctacggcagtcaggtggtaatctga

SEQ ID NO: 2234 - DNA, 939 bp, synthetic construct
  source 1..939: mol_type = other DNA
atgagtccctacgagctgattaaggatgatggtgaagtggttaatctgggcgggtctcccgacgagagtcaggatttcgacgtgtctttagagcgcctaaacgataaatctttagcggattcagacggcgatggaaagcatgacgtattcatcagctatagtaccaaaaacagcgacatcgcaaacgagatatgttaccttcttgaaaagaacgggttggaatgctggattgccccacgaaacatctcaagcggcaaaaactacgtggatgagatcgccgatggcatcaagtcaacgaaaatagtcgtgctggtcttttccaaatattcgcaggaatccaagtacgtgaacaatgaagtgatgatggctttcagctacaacaagcctatcatttcctttaatatcgaccaaacagagcccaatgacattatggggtactatctgaaggtggcccagtggctgccggcataccctaaccccaagagtcagtacgagaccctggtcactgacgctttgaaactctgcaatgagaggccacggacggtcattacaagcctggacggcttcattccagaagacatatccaagcaaaagaaaaattggatatcgctcatcctcctgtttactcctatctactgggcctcctttatctatatgggccttgtgtctaagaaaaagagctggaccctactcgggttcctgtacgcgattcccacagtcatcggactgctgctgtatttccaggtattcacccgcctgttccttatctacccgatattcaggctcttcaatctaatctttatcctgtgctggatcttggccattattcacggattggttatcagaaacgagtttctcacccggtatagcgtgctcggactgatgtcctttgacaaggacctcttcgagtatctgtacggtatgtactataaaatgtga

SEQ ID NO: 2235 - DNA, 876 bp, synthetic construct
  source 1..876: mol_type = other DNA
atgagtcacgacgtgtttatttgctacgatgaggaggacaaagattgcgcagaggccatttgccgtatctttgaagagaataatattaagacgtggatacgcagcagagacgtgagctccaaggacgccgcccgcaacctaacagaggctatacgaaattccaaatgtttcgtactggtctattcaaagaacggaaagaacaccaattatatcattaacgaaacagacatcgccttcagcaaagaaatccccatcatcctctttaagctggatgagaccagcatcccgaaggacttggagttcattttgataagcaaaaagaagatagtggcctacccccatagcaagcggcagctgaagactctggtaaaagagactagcgatatactggacagacccacagatgacatcaagcttgattcgaactcagtcaagaccattgagaggtcgaacccaaaacggaaggaaaacaacatcaagaaagctattggagcagcggctctaatcgcagcggtgttaattctgatctacctgttcgtcatcgtgcctacaggccagaacatcaccgatagcggtgttttctccatggacgtcacccacgttgaagtggacgaactcgccaaaggcaacaagtacacgatctacggcgaatcctataatctcccaagtgacagcgacaggtacttcatgaacctgcaattctttgatgataaggataatgtggtgtacgaggtgaatagcaccgccgacgagtttaaatcaggcattatttggagtggagacattaacaaaggggatatcaagcacatcgggttcaaactcactgacatggacaacaagatcctctcccaggaggattataatcttgggctgtga

SEQ ID NO: 2236 - DNA, 1221 bp, synthetic construct
  source 1..1221: mol_type = other DNA
atggtgaaaatgaagtttaagcggagtctgatactcgccgtgattctgataatcctattttccctagggactgtggctgcgagtgaaaacatcgtgattgatgagtcgagcgactccaacctggtcatagaccatgccaaggacaactacctgttcaatggaccgatcaaagataattacctgagtagcagttctatcagtgataactatctgagcaaaggtgtccttgatgacagctacctgtcccgcagcgatctggacgatagctacctctccatggatgatggcaaaggctcgatcgacctgacgaatcacaaccagctctctaacagcgacgataaacagcttaagacgagcaacctggaggacgaaaaacagcttgaaagtgtaaataaaggagacaagctgttgaaggattcaaacgacaatgtcgacctgtttattaacatggacgtcaagacatcactcaccaacaagcaatataaccgggcaggaagcgaagttccatggatcataactgtctcctcgctcaacgggaccagctacaatacccaagtccgggacgtactgagcgaaaatttgcagtacctgagccataacgccaccatgggcaccttcgatcccgagaatggaatctggactgtgggtgacctcgagtcgtctaaaaatgctagcctgacaatattgacacgcctgaagagagatgggacatacatcaacaaggcttacgcgactaccgactccaacgacgttaatctattgaacaacttcctcatcatttccatcaggaccggttcatcaaagatcacgtcaaacattaccgagacaagtgatgaaagggagggcatccagcacaacgttcactacgctagtatggtggatacggacttcatttacagatacgaggaggactcctcagaggacgatggcggcaatgaggaaggccagagcgagggcaattcccacaccaagactcgttctttaggaaacaaactgaaacttttcaacgcccagaatatcgactatcactctctgtccaagaacatcgggggtgcattggggtttgggtataactcaaatggagggttcctcaattccaaggacatttatgaggcccttttcgtgtatgactacacacgaatccctattatcgtatttgccgccttcctcgtggtgttagcaagcattgtgggctatgataaggtgaaaagctccaagtga

SEQ ID NO: 2237 - DNA, 6015 bp, synthetic construct
  source 1..6015: mol_type = other DNA
atgaggattatgatcaataaaaaactgtttttcgtgttcctcctgatggtgctcgtgattgggaccatttctgcagtgagtgccaatgaatgcgccaacgacctgacgatggagatcagtgacgacaatatagctattgatagtagtagcgcgctcgaaggggacgatttagccattgacagttcgagctcagatctgagtaacgaaaataatataaactcgatgaatgatagtgtgattaattctaactcgatcaactctgattctatcaactctgattctattaacagcgatagcatcaaccccaatcctaacattgatgatgagatcaataaccacaaagatagctttttaaaggctgtacaggcctctaaaaccggaacatttacagagttgcaaacgaagataaacaaggcaagcaaaggcagtacaatctatctggacaagaattacctctacaatgatgactttaaaggcaaatacggaattgtgataaacaagtctatcacaatcgacgggaaaggccacgtcatcgacggtctgaagaaaagcaacctgattttcatcaacgacgcttcaaacgttgtcttcaagaacatcatctttcggaagggcgacggggacgagaacggagcgataaacctgattggctctgaccatatcgagttcaacaactgcagcttcaattacaactatggtgaccgcggggcggtcttcctgtccggcagcgactactcctcctttgtaaattgcaagtttaacgagaacattggggagaacggcggcgctctgattctggctgatagtgattatagccgcctggtcaactgtatcttctttgggaacgaggcatcggacggaggggccgtatttatcacctacagtgactacagctactttttcaactgcactagcgagggcaacagcgtcgactataccggaggggccttctatctggattattccgataactcctctttcatcgattgcgtatttgacacttccagcgcgaaggatggcggggccttttacctgggcgattgccataactcctctttcattaactgtagctactggaacaaccaagtggactattatggtgcggtgtgttacttggacaattgctatgactcctccttcatttcgtgtaatttcacgggaaattctgggagcaaccctgaactggatgagacaccctccatcggcggtggcgtattttacatcagcgagagccacggcctgtattttacccattgtaacttttccgagaatgaggcaaaaaacgatggcggtgccatatacgctagcgattccgatgtgcacattgactcctcggtattcgaggagaactgcgctctgtgcgggggtgccctttatgcgatgaactctgacattttcatcgactcatcccttttcgagagtagcgtgggagatagggggggttcaatattcgccaataagagcaacgtgtattcgaaaaactcctcgtttatccagtactatgaaatcgaagatgaatatgtctacatcccggcttctggggcctaccaccttatggaaggaaacatcggcggagcaatttactctcttcagtcggtcctgaacatttcgtctaataaattcaacaacaactttggcctcacctccgggggagatatctactcccagtacagcatgatctacatagatgactgcagcttttccaactcattctccaatgggtttggaggctcactgagcttcaacaacgactacgtccagatcacagactccagctttgagaactgcagctcacgagataacggcggaggggggatctactccatcaattccattttgaattgctccgatagtgacttcaccaattgctattcatacttcggcggttcaatctgttccttaaacaccgacctatccattaataacaacaacttctacaaaagcagcgctgaatattacggcggatcaatttatttcctgtacggaacgcttgacattaacggcagcctcttctccaattcatacggtcagtatggaggctccatttatataagaagtccccagacaataaagaacattacaaacaatcagtttctcttttctcaaggcatcagaggccccaggatttacatcgaccagtattacggggaaatctccaacagcggcaacgtgtacaccgatgagtacgaggagaaaggattgtttagcgattacggaatgggaattagctttgaaagcaatgaagggttggtcccactgattcactactaccctagcaacgagtcattgccatccttctacgacccccgaggggggggagactcagaagatgactacgaagacgaggacgacgattccgatatcgccgtgaaagaccagggcatcggaggcaactgttgggcattctcaggaatcgcaaccctcgaggcctgccttgagaaggtgaccggtgaggagtttggcttcagtgagggcaacgctaaaaaccttatggccatcagctccatttacggcctcaacatcgacaccaacaatggagggtatgacacaatgttccttgcctacctcgcaagctggctcggtcccatctatgaggaatacgatacatataacccactctcctccctctccatcgatctccctagtgtcttccacatcctcgacattgacttcctcgcgccccgtaaaaacagcctggacaacgacgagtacaaacgggcgataatgaacaacggagccgtttcagtgaccttcgattgggtggaaaacaaggtgtccaacggcttccacagcgtgtccatcatagggtgggatgatgactacgatgacatcgactccctgggaaactatgcaaagggcgcctggatttttaaaaacagctggggctatgaatggggagatggcgggttcggttacctgtcctataagcagaagctttccgaggagatagcgccctatatgcatgcatacacattctcattcaaggaaaatgacattggatataccgacatttatcaatatgacttttccggactgagcgacttcctgattttaaattccacaaatgcctattataagaacaagttcatagcagaggacaatgaatttctatacgccttttccacatattttgataaggagaccgacttcacctattcagtttccattaatggcaacgtcattacaaaaaccgaggacggcaaagacatactcacttctatccatcactcgccggcgggataccataccattccattaggctataacctgaccttgaaggagggggacgagtttgagataatcatcaaattgctgaatgacaaccagaaccgcatcccggtgtgccaggctgacgaattgtaccggacctcactgccttcaaatgcaagcttcatgagtctgaacggcaaggattggattgacctgagcaatctggcttcctccaatgagttctctagcctcggcatcaaggcaaacacttcacaagtggcttgcataaaggcattcacgtccaactggagaatgaatagtgattccagcatcgtgaactctaagaaccacagcatcatcacctcagaaggaacagagctgagccagtacgaaatctgccagctcaaggtcggctcatttaccagggcctcagccaatgaaactatcattatagccatgagcattccagagtggcgaaattaccaggatgaatatgaaaattacatcgaggtgcacatcaacgacgaattttactatgtcagggtcaacgagggagttgcctatctggatatcagctttgataagattggccactacgacttcaaggcccagttcaagtccaatatctactcatctgatatcgtcgagtttgatttcgaagtagtgaaagactcaatcttcgatgtggacgatctcgatgcctcaaacccaggaactttcaaggagctgcaggacataatcagaaacgctaagaacggttccatcatcagtttggataaggactacgctttctctagtggggacgagtctgtggttgacgattatattgagatcaacaaatctctaattatcgacgggaaaggccatataattgatgggtcttcggactcaggcattttccgactaagttccggtgacaacctgacgctgcggaacattaagtttatgaatgcagacaatggggccatcgtttcgaatgggaacctgacagttagcaattgttacttcatcagtaattgcgctagcggttctagttcgacctctacttccagttctgatagcagttctaccgcttgtggcggtgcaatttactgcgagggcacttgttttatcgtgaatagtctatttgagtctaattctgccgacgccggtggtgctgtttactgtgaaggcacgtgctttatcgtgaacagttactttgactccaattatgccgacctgggtggggctgtgtgttgtgacggcagctgttacatcgtgaatagtctcttcgactccaatttcgcagtttacggaggtgcagcttccatcgttggaaatgagagctgtgagattatcgacagcaactttatcgaaaatgaggccatctatggcggtgccatatacctggaaagctactgttaccttctggactcaagtttcaattacaattacgccaacaatggaggcgccatctactctattgctgaccttgacattcacaccactggcttcaattacaatgaagcctataaggatgggggtgcaatctacctggtgaacagcacctcctatatcaatgagggaaatttcactgaaaacagtgcgaaagagcgcggcggtgccatatgcgccctggaatttagcaatctaacgatcagatgggcttatttcatggataactctgcttcaaaatatgggagtgccatctttagcgtcaatgccctgaacattacagattcggaagtgactgtaagttctggtaaggtggaacttatctgctttgcttacgattacgcgtcaaatggccaggcctacggggatctgtactttgacgaaaacagcttctacatcagtggggcgcctgagatttactacttccgggaaaagatagcccataaattagccttggatcttgagttcaacaacatagagctcatcagagggggaggcgtggagatctcccgcgacttgaatgacgatggctgggaggataaaatcaacaacaatatgcttgagatatgccgtctcgtggacgacgacgattacatgacggtcctccggatgaaggagatcgaagtgattctaataaacaagaacaatcggtctgacattcaaaagtttaagatcccctttaacgtcaagctgaacggctacttcctgaacacgtcatcactaaagtacggctcttatatcctcactggaaatctttcgaaggatctggccagcaattgtattgtcaagaatggaactctgaaagtgctgaggaaaacaaccctctctagcctgtctacgttcactaaagtgtatgggaatagtaagaatctggtagtgaccctgaaggacagtagtgggaaagctatcgttggtgttaatattgctgtgaaattgaacggaaaaacaattaaagcaaagaccaatagtaagggtcagatctccatcgccatcagtctgaagccaaagacatacactgcatacatcagcttcgccggcaatgactattatgcaagcgccagcaagaaggtcaaggtcgtggttaaaaaggccaaccctaaattgaccgcctcgaaaaagacctttaagttacgcaatgctaaaaagtatacagtcacgcttaagaacaacctggggaaggcattgaaaaatgccaaggtcactattaaggtggctggaaagacttataccgctaagaccaatgccaaagggcaggtgacattcaatctgaaactggccaaaatcggcaagttcaaggcagtggttagcttcgccgggaataagctctataacggcctcaagaaggcggtggttttaactgtgaaaaagtga

SEQ ID NO: 2238 - DNA, 558 bp, synthetic construct
  source 1..558: mol_type = other DNA
atggaatatgagaatatcctggacttgaagagctcagaggagttcagggagtggatgatcaaaaaccactcctcgcaacgcgaatgctgggtgaactgcaaacggggaaaggccgataaggacgagctgtcctatgtcgatgcggcctacgtggcattgagtttcggttggatcgactccacctacgggctgatcgacggaaagagaatgcagcggttcagtccgcggcgcaaaaacagcaactggagccagctcaataaggaaagatgtcgatggctaatcagaaatggcctcatgaccgacagcggctacgaaagccttcccgacctggaggaagatttcattatcgactcagacattttagatgaactgaagaaggataatgagacgtggaataactttaagaactttccagacctgtacaaacgaatacgcatcgcaaatattcagaaagagaaagatagggaggccttcgataaaaagctcgctaactttattaaggacacaaaggacaacaagatgaaagggaactggaacgacgatggcaggctgatatga

SEQ ID NO: 2239 - DNA, 255 bp, synthetic construct
  source 1..255: mol_type = other DNA
atggcaaatgagatcattctgaatatagacggcaatgagcatcagattaaatacgacaacatggaagtggaccacgtcagtatcatcgaccttgagaaactggggcggtccctcattctcgaactggagatagatggaaaggtggacaggaacagcctggatgatgctatcaacagctttttggataccatctacgatgacattaagtatttcgccgtagagtacgccgacgacaacgaaatcgaactaatctga

SEQ ID NO: 2240 - DNA, 468 bp, synthetic construct
  source 1..468: mol_type = other DNA
atgagaaaccccaaagactacattatgaaaaccgattatctcattatccttatggccttactgctgatctctatcgtctcaccaatagccgctgcagacagcttcgactttgatatcccagaaggctatcatatcgagaacgcgagcgatgacttcgtactcctcgagaacgaggactactacagcatttccatctccattatggacaattccacagaccggaagacgctgatggacatgctggaaaggcaccgatgctacgactttcgcaacggtgtcaactataccaaaggggatttctatatagaggaaaagccgtactatcaggagttccagatgggaatcttgtacttttgtgaaaatggacgggacctggtggtgattgattacaaggggcccctgggcatggacctaaacaatagtcctatagatggcatcttggattcgttcaagtgggtgagttactga

SEQ ID NO: 2241 - DNA, 759 bp, synthetic construct
  source 1..759: mol_type = other DNA
atgggccaggacggtttcaagaacgaagatttaatgctggaagctctgaacaacaaaaaattcatggatttgaacgataacctcaagcagatgattctggacatgtacggggaggaaattagccaggacttcatcataaaggcctataagaaaggaggcgtaaacaaaactgacttgaccatcgacatcaatagccaaaattttaacgtcagtataaagaagggaaccggaaacagtgtccaccaggaaaaactagaggagttcgtttcctttctcaaggaggaatatgggatcagcaatgtgctctcagatgacataaggttctttatctggggggatggcaccctcgatgggacgggtgaggtttcagatcggcttagcgcctccgagtttcgcaagcagttcccggagaaaatcagaaatattcgtgagttcttctacactgtgaagcgggacctgatagagcggtttgtcatcaaaggacccaaaagcaagtctaggcctgactttatctattacggcacaccagataagggtatcatcgtggaatcccagtccgtgatcgactggctgtcggatgacaaaaacgaaaagagcagctccccaattcccatcggcagactgacattccaagcatggaaccgaaatattaatggcggagacaaatctgagaataagcgcggggtgattcagcttaaatggagttcagtgggcaaggacctggtgaagatttacaaggagaagaaggacgacaaatga

SEQ ID NO: 2242 - DNA, 582 bp, synthetic construct
  source 1..582: mol_type = other DNA
atgacaaaccgaggaaccgcagaggggacagaagaggagatttccttcgttaagctcctgaacaagaaggaggacctgagctactgggatgtactgaacctggaccataattgtcacttcgctatccacgtgttatatcagaaattcagtaaaataagtaataagaaagtttaccccaaggccgatgtgtacattgccaagggtaacgtgccgtacagctatttggaagataatgacttctacctaagcgaggataataccgaagacttcgacctggaaccaatcaagtacactggcatttcagtcaagcttcagaacagctcccggtaccaaatcaccaagatgggccctaataccttcaaggacatttttgggtgctatgaattgggggccggagcgtctatctactgccgcgacgtggatgacctcgagaaaaacccccaggtcctgactggctggaacacgaactttgaggacttcataaagtattttaaatcttttgatgtcgtgtccagctcagatctcgacatctcgtcctataagaaacttaaagtgtttctcatcaagagactgaggaaatga

SEQ ID NO: 2243 - DNA, 1020 bp, synthetic construct
  source 1..1020: mol_type = other DNA
atggtgagtaagaagagggcaatgcagtacaccctcgaagattttaaagagaaaaaccttgacgagaccgaagaaaacgataaggatttcacattcatcgatctgttctcaggtatcggggggttcagattggccttcgagagcgtagggggcaaatgtgtcttttcctccgacatcgacaaatgggccaatgaaacttattacatgaactttggcgaatacccccacggagacatcagcgagatccctgcaaatcagattcctgaccatgacattctatgcgccggatttccatgccagccattcagcataggaggctatcgcaaggggttttgcgatacccgggggactctcttcttcgaaatcgaacggattcttaaagccaaaaagccccagatgttcctactggaaaacgtgaaaggcctgacaaaccacgacaagggaaagacctttaaagtcatcaaggagtccttatggaatctgggatactcgatcttttaccaggtgctgaactccaaggactacggcgtcccccaaaaccgagagcgcatattcatagttgggtttaaagacaatgtgaacaccttcaagttccctctcccttttgagaacaaggccaatattaatgacctgttggagaaaaatgtgaaggatcatgagctgagtggaatcgcttcagaccacctcaagaagcactacgaggagtttctgaagaataaaaaggtgaacaagaattaccccatcttcgctacagagattcggccgagcagatgttctattaggaacgatggcaattctccctgtctgacggcgaaaatgggtaccggtggcaacaacgtcccggtcctggtaaacgagaacaggaagctcacggttcgtgagtgcctccgccttcaaggcttcccagagaattacaaaattaaagataactattctcagagctataagcagatcggcaacagtgtgacagtgccagtggttactttgatagcgaaggaaatgatcaagtatctgaattga

SEQ ID NO: 2244 - DNA, 1029 bp, synthetic construct
  source 1..1029: mol_type = other DNA
atggagaagccaacagtgatcgacctattctgcggcatcggcggattcagtaaagggtttgagatggccgggttcgatgtgctcttcggcattgacatttgggacatcgcaatagaaaccttccagcataaccataagaacaccgagggcatactggcagacctgacagaactcgacgacgacttttttaaacagtacacaaacaaagttgatgtaatcatagctgggcccccgtgccagggattctcaatgtgtggaaagcgagaggtcggcgataaaaggaatgaactgttccaggaggtggtgagagccgtgaagattattaatcctaaaattgtgatcatcgaaaatgtcgtaggcctgctgtcgatggagaacgtggatggggaggacgtgaagggccttatcgtctctgaatttgaaaaactgggctacgagactaactataagatcctcgatgcctccgagcacggagtcccccagaaacgcaagagggtcattttcattgggagccgtatcggtgatgtggaatttcccaagccaaaggacaaaaaggtctccgtgatggaagcattaggcaacattcctgacaccaattttgagtattacgatgagcccacgaatagctttcaggagctcatggccgatggtgagaagaagatctacaaccatgacgctatgaagcacaatgagaaggtgctgaaacggatcgagaacgttcctcaaggagggaattggcaggacatccccccagaaatctatgacgtggggggaacccacagcaacaactacaggcggttggacccaaataaaccgagcataactatcaaacacgccatcaagtcaatgataattcacccaaccttcaatcgcgtaattacggcgagagaagccgcgcggttgcagtccatccccgatagtttcataatcaaaggtaacaagactgcccagcaccagcaactcgctaacgctgttcctcctctgcttggttacgagattggcaagcaaatcatcaagaagctgaactga

SEQ ID NO: 2245 - DNA, 174 bp, synthetic construct
  source 1..174: mol_type = other DNA
atgaagcggatacaagtcaacttcaccaaggaacagtacgagctcctgcagaagcttaaaggggagctcggcaactccgactcagaggtgattaagaatatcacgatggcctggctaagcgagaaaagtctgatcagcacaaccctgaaggaaaaaatctttaacaattattga

SEQ ID NO: 2246 - DNA, 753 bp, synthetic construct
  source 1..753: mol_type = other DNA
ctgaacgagatcatcaagaccacactgatcctacttctcaagcaggagatccgaaaagaacagaggcggggcattaagaacatccttttatacttccgtgatgtggatacgctggatacaaactccatcaattggaaaatccgctatgacaggaacaatcagaactatcagatgattgtcggcatctgctacctgacgctgaaaggactcctccagtcggacagtaagggtgaaaagaagctgatgagctttttggacaatcaaaggatgaaccgcctctacgagaaattcattctgaactattataagcgggagcatcccgacatcaaggcgtcctcccctaagatagaatggcaattggacgatgattttggcgagatgctgccgcgcatgcagacagatatcactctggagcacaaaaataagatcctaatcattgacgccaagtattactcaagcaccactcagacctactacgacaaaaagaccatccactcacacaatctctaccagattttcacctatgtgaaaaacaaggaagttgaagtggctaatgaggcaaacggggtggaacttgacaacaaggtctctgggatgctgctctacgccagaacaagagagaaaatatacccagacaatgactacctgatgagtggaaatcggataagcgtgaaaaccctcgatctgaaccaggatttcactctgattaagaaacaattagacagcattatagaggtatatttgaaggcctga

SEQ ID NO: 2247 - DNA, 471 bp, synthetic construct
  source 1..471: mol_type = other DNA
atgaataataaaaagatctttgtggccggactggccatattggccattgtgctaatgggaagtgtcgcggccgtcgatatgggcatcctgtccgggtcgcccaccaaattcagcatcgacggcatcgacttcaatattccacagggatatgcagttactgacaactacacacgcgtgaacgacaccgacacggctggcagctccagctaccgggtgacccaggcgacctttgaaaacaacgtacatgatgccatctcagtcctcgtggctgattacgaccacgacatgagtgaggatatcatctctcagaggggcaataagacaactataaacggtgtggacggctatatgcaaacccagggggactacacgacattcaactatcttgtcgatgggaacctggtgacaatcactctcacgaacgcagatctgctggaggacattattgttggtaatcagaccgatgactga

SEQ ID NO: 2248 - DNA, 4416 bp, synthetic construct
  source 1..4416: mol_type = other DNA
atgtccgaagatatcggaatcaatgacaacaacggtgcgttgatagccgacgtgaactttgcggatgacaataataacgctctgaaggcggaatccaactctgctagtcagaatgacgcgtccatagacgaatctgctaaccccactcaggatcttgtagacaccgataacgggctgaaccagtccatcactaagagccccctaaagtccaacactggcctcaccgtgacaaaaaccattgataacagctctaaccatatgcctgtagacggattttacgacatcggagacacgatctactacaccatcaacataaccaacaatctcgaggaaagcataggcaatatcagtgtggttgaaaacttccccgacgggttgatttgggagtatatctggtttgctgacgacaatcccaactggaagaatgagagcaatgtgttcaactatacaaaagcacttgagccggagcacagcatcctgctcaagatacggatgaccggaaataaaacaggcacttacattaacaccatcaacgtgagctccaacctcaccagctctcaggagttcctgtccgaagaggtgactgtgtacgctccaaacttaacaatcacaaaggtggccaatgacccaatcgttaccattggcgagatcgcaaactttaccatcaacgtgaccaataacggcaacaggccgctgagtaatttgcggatctatgaagaccctgaagagtccttattcctcaacgagttcaccaacataagtggaaattgggactcttttgcaaatcggggtggagactacggttttagcttggaccagctggatattggtgaatctgcggctattattgtgtcgtttctgacaaccgaaatcggaaacttcaccaataacgtctatagcaactacccgaacccccaagtggaggcaaatgccactgtcacagttgttccccgcatcgaaaagacggtcaatgccaccgagattgatatgggggagtctgttgaatacaacgtttacatcgacatgacaggcgccaacaaactgggcattgacgactttaagatcaaggtcaccgacatcttaaacgaatacttcgatttggataaggacagcatctcctcaaattggaaatataacagagatgagaaggcctttgagtacatgctcagcgacattccagagtcattcgagtttaactttgctgtctatatcaccgaacgaggaaattacaccaacacagtttcccttaaaattggtgacctgcctgaggtctccgctgagtctgatgtcactcacgtccgcatcagtgatgccaacatcgcagaaacggccctagattcaacagtcaatctgcaggaacaggcggtgttcattgtgaacatcaccaacacgggggataagacatttaatccttatgagctcgttgtgaacgacgactacgacgaggatgctctcacgtacctcagtcacgaagatatcacaggcaaatggatagagaatatcgaaaccgattccctttcatttaccttgaatagcaccctggaggtgggcgagtcggcaagctttaagctttacttcaataccagcaaggtagggtcttattccaattatgtctacatcaacattaatgataaagaggacgattcaattgtcattgtacttgccctcatgaacaaatcagtcaattcaagggagattgatgcaggggactctgttgagtataatatcttcattaatctgagcggatatcagggcccggtgaaggttgaggacctgttcaatgatacatttgccttggataaggacacgatctccgagaattggcattacgacgaaacagagaacgctttcatcttcgatctgagcgacaatcctgacaccctgaacctgagcttcaatgtgacaatcaatgaaaaaggcaattacaccaaccttgccaagctgatcctgtcttcagattaccctgaaatcacagctgaagctcccgaggtctgtgtctacaagccggatatgacagtgacaaaaaccgtcaacgacactgaaatatatatcggcgacactgtaaagtacactgtcacgatagacaacactggagatagaactctgaccaacatcattgtcaaagacgaactggaccctgcatttatcctggacgaatccagcatcactgaaggctggacttacaacaaggacaactcttcattcacttacaacaacaacattagcgtgggggaaagcgccatcctggaatttatcgttgagattagcaaagagggcaagtacaccaacattgtgaatgtcagcagtcccggggttgctaacaaagaagctaggtcggaggagaccgtggccaaaaccattccgaccaatatctgcctcgaaaacgtgaccgccgatcccgacagttttgtgcgtataattatcaacatcacggccgacaaaggcctgattaatggcaccgtgaacattacgttccctgacgggacaaatgaagctgtggagatcacaaacggaatcggggagacagtctggtatgtgcccgataattatgcttcaggcaactacagtgtcttcgcctactatgagggcaatgggacctacctggagtctgagggccagggaaacatcgaggtgatcccttactacactgagataagcctatcgaacgtgacggcgtatccagacagtgatgtggagattgaaatcaacataacggcaggagatgccaagctgataaacgggacggtgacggtcagcttcccagacggcaccaacaaaaccgccgagatcatcaacggtaccgggaacgtgaactggactgtacccgatgattataagggcaactactccataagcgccagttatcccgggggtggcaactatctggactcaaatgccaccgccaatattgaagtcatagcaaagatcagtactcagatcaccgcagacattcccaatgcctatccgggggaggagattgacatctctgtgaatgtcacagcagacaacgacgtgccattcaatggcaacattaccgtgaaccttcctgatggctcgaaagagactgtggagattaaggacggcaagggaaacattgcctggactgtgccagacaacttggacgtaggagattataatctcaccctcacgttcgatggagataataattacctgccttcaaacgccaccagcaccctcacagttgagaagataaaactgctcatcatcattgataacattaccgcccacccaaaagaggatgtgaccatttcggttaacgtggccattgacgacggtagtgagtcggataactcaactaagggttcgttatctgataacaacctaaacaagggtgccctcagcgataacaatctcaacaagggtgtgctgtccaataatgataacaaggccctgctgaaggcctacatcagctcagcgaagggcatcctgtccagcaaccatcttaatgatggggacaatttcaacggctatgtcaatattaccttacccgacaattccaccgttgaagtgcaagtcaaggatggaaaagctgctctcaattggacggtgcccgaggggtacgaaggtgagtatccaataaaagtcactttcaacggcaacggcaaatacctatctgccagcgagacagggtacattacaatcgagaagatccctacgtccatcgacctggaaaacatcgggaccaagccaaaccgcgagatcataattcccatcacaatcaagacggacgatgacgttcctttcaatggaaaagtaagtgtggagctgcctgacggcaccattcaaacagcagagatcacagagggcattggcaacacaacctggactgttccagacgattacaatggggaatacaattataccgtgagatttgaaggggacgagacctacctcccaagcaacaataccgccatcattaaggtggattccaagatcccagtggaaatcattgtggggaacattacagcaaaaccaaaggataaggtgacaattcccatcgaagtgatcactgccgaagagtccctgtttaacggaaatgtaactgtgcgcttgccagacggaactgaggtcactgcccagatcacgaatggtgaaggcagtgtggagtggacagtccccgaggactacaatggcacgtattccgttagcgtgcgattcgacggagacgacacattcctggaggcggacgggactggattcatcaccgtgactcctgagactccggataatcccgtgcctcccatatcccctgtatcccccgataacccagtggcccccgcaaaacactccgcgaataagccgatgccaatggataagacagctcctggtaaccccataatggcattgctgatagtgctttcaagtctgattttcgtaagacggagtaggaaatga

SEQ ID NO: 2249 - DNA, 978 bp, synthetic construct
  source 1..978: mol_type = other DNA
atggactttaacaatttcaagtatcttgatgagttgattcatagtggtgcgaaggagattaatctagattcagacattatcctggaggacaaggaggagcaaaagtacagtgatgggattaagctgaacattgacaatctcgtgatcaatgggaatggccacatcattaacgccaaggaaaagaccagaatcttctactccacagcccagaacatcacaattaagaacattcggctgaaaaatggaaaaactaatacaatagggggagccatctacaacctcaagggcaaaataaaaatcatagaggccaccataaaggaaaaccagagcaagtatggcggcagcatatacaatgacgagggagaaatggaaattataaagtcgacattcacgaaaaacaatgccaaaagcaacgggggggctatccacaactataaaggcaagatgagcatagaggagtcaattattaatgaaaacaccgctaagcagggcggagctatccacaactacagggcgattctgagcatcgagaacaccacgctgcgcaagaacgatgctaaagactttggtggggccatctttaacgatggcaatgagcttaaaatcaccgaaagcactatagaagagaacacctcgagccagggaggggcaatttacaataatattggagagattatcatcaaaaactccactatcacaaaaaacatcgcaaagatcggtggagccatccacagctggaacaagttaagcatcatctcctccacactcaataaaaacaagtcatatgagtatggcggcgcaatccataacttcgatggggaaattttcatcaaggacagcatcatcaccgagaacatcagtaacaaaggtggcggcatcttctccaacaataagaagtacaaaattacgacttccaccatcgaaaacaatgaatctgacaatatccacgagattgacagttttctggacatggattga

SEQ ID NO: 2250 - DNA, 1098 bp, synthetic construct
  source 1..1098: mol_type = other DNA
atgagcaagagttttcgggacctggaactcctcattgagaactgcgacgatgagatcgtgctagactcagacattgtgttgggcgatggtgagggcccaatctacctggaaggcatcaatttggacagtgacgtaattatcgatgggaatggacattcaattgatgcctgtgggaaagtgagaatattctattcctcaggagaacttacaattaaaaacatcagcctgctgaacggctactccgatgaaagcggaggtgccatagtggtcgacgggggaaagatggacataatcgactccatcatctctggaaactactcggcggacgatggcggggctatacacattgaggaaggtgagttggccctaatcaactccaccgtgaaggagaacaaagccaaggagttcgggggagctatcaacaactgggacagcctgaagattgtgaactgtgaaataagctccaacgaggcccgctttggtggcgcaatcctgaataacgacggcaacttagagatcagcgattcgctttttaaagacaacaaggctgataagggaggcgtgatctataatcaggatggtgacttttccgttgaaaaaaccctcttcgagaaaaacaaggcaagtgctgatggcggcgtcttctacaatgaaaactgcgatataagcgtgattgaatccaaacttaatgacaaccaggccgacaaagggggagtcatctataacaacggggtcttcatcattaaggactgcgaactgatcaacaatcgggcaaatgacggcggatctatcgtcaattacgaggctgagctgaatgtaatgggctccagtctgagtggcaatctctctaattatggcggggccatttacacgtacgatggggagatgagcattgacgagtcacgatttgacgataacagggcagagtgtggtggagcgatctacagcgagaagtgcatctgggatgtttctaactcagagttcaatagcaataaggccaagaactcgggcggggccattctgctcaagaaatctaagtatgaagttgacaatgtgagtttccgcgacaatgagcccgatgatgtgtccaacttctga

SEQ ID NO: 2251 - DNA, 276 bp, synthetic construct
  source 1..276: mol_type = other DNA
atggatgacctgattaccacagccgggatgtatggggagccagtaagcagccggaagggaaactacatcgtggagggtctctttggcaagcctatttactatatagacggcgacatcgtgagagagaacaatccgttcggaaaacccgtctaccggatcgagggcaactatatcaaggaagggatgtacggaaagcccaaatactacattgatggtgacctgatcagggaaaacaatcagttcggcaaagtggtcggccgcaaacgaaagttctga

SEQ ID NO: 2252 - DNA, 273 bp, synthetic construct
  source 1..273: mol_type = other DNA
atgaagtactgttttaaatgcggagcgaagctgattgaggagaaccagaagttctgcatcgaatgcgggtccaatctggaaaagcgcaaagaagagcacaacaaggacctgaaggagagccataagaaatacaatccgaaaaagggcgaaagttacaatgattatctaaaccggatcgactcaccaataaaagacaagatagcaaccgaggatgagatcatcaaagaaagcattgcctataaagagtacaaccccctcaagaagagggtgtga

SEQ ID NO: 2253 - DNA, 1815 bp, synthetic construct
  source 1..1815: mol_type = other DNA
atggattttcgtgaggaattaaataaaatcctgaaatctgatgatgaggagaataataatctgaagtccactgagaacaaaattaaagacaagaaagaggacaacaacctgaaaccaatcgataacaaaatcaaggacaaaaaagaagacaacaacctgaaacccatcgataacaagatcccaaatgaaaacaaggaacctaaggagaagaagacgcctcagaagacggatgaagaacgaatgcagaacagacctaaagagaccattgaccacctaaaacgattcaaggagctaaacaccaccacggacagtatttttaacataagtccctaccaggtcctcatcatcctcaaagatggtaccaacatcaccgattggaaagagatcgaggacaagaaggacattctctacatcagtgaagacctgtctggcgagagctatatatcaaacaaatacagagacctggagggaatgcgccttatcatagcccaggggattacaagcaaagtccaattcatcgaatcgatgttcgcggactgcaagtccctgattgacgttatcggacttgagacatgggacacctccaatttgctgagcttggagaacatgtttggcggctgctccagcttgaccagctgcgacggtctcaggtacctggatgtgtctaacgtgaatgacatgaccgccctcttcaatgactgttaccgcctcaatgacattgatagccttaaggaatggaacacatccaatcttacaaagatgtggagcatgtttgcaggctgcaagtcactgaaggacctgcggcccataagcaattggaacacaagcaacgtgacaaacatgaccagtctctttacagagtgtgaatcattgaatgatattaacggcatcagatcatgggacagctctaatctaaaggatatgggaagtctcctttggggttgcaaatccttaactgatattagtgccctgagcaattggaacactagcaatgttcggaagatggggcgcatgttctggaactgtgagtccctcacggacatcagcccattaaaggattggaacgtctcgaacgtggaagacatggtgtacatgtttgttaactgcaagtcccttaaggacctcactccgctctctaactggaagccttccaaagtcattataatgcggagcatgttcgacggctgctcctctatcgaaagcctgaacgggctggaaaactggaatctggaaaatgtcacgactgtagagaggatgttcgatagatgcaagtccctgagtgacgtgtctgccctgaagtcgtggaacctctccaacgatgtaatcgccggtgggatcttcaacgagtgtccgaatgtgaaggagaatcccctgaagaaagagatcaaagataaaaacaagccattgcaccatattgacttgaatatcaagtttctagacatctatgggaccggatggtgtctggtcaagctgggggacatctacagcagggcttcatatatcactgatgtgccctatgattgcctgtcgtcaatcgtaaacgctattaagaatgatgaaaacttccacgtggacttcaatggcgagggctggaccttcgatgtggaggcagacaatgagcagtgttactttaacttccatggcggagagaagcacgcgtttgacaccatgaacaagtacgacctggcaattgtgatatatcgcaacatacgggacaacctgtcatcttggaagggatggacacacagggatctgagtcccttgcttaatgagctctgttccctgattaatgagaacgaagccgatgaaaattga

SEQ ID NO: 2254 - DNA, 1344 bp, synthetic construct
  source 1..1344: mol_type = other DNA
atggagctgctcgaccggcttatcccaaaatacaaagatatcaattggatgaaaaggattgacattatccgcaaaaccgatgaccaggccctgctggaggagatcgcccgaaaggaggaggagggtatcgtgcgaaagtacgccgttaagaagatcaacgaccagtccgtcctcatcgacattgcctacaacgatccccattgggaaagctccagtgaggctgtaaagaaaatcgacaatcaggacgtgttaatcgacatagcatacagcaagctgaaggccagcccccggtcgaaggcagcggaacgcatcaaggaccagaatgtcctaatcgacctcgctcaaaatgacaaggaatatcaggtgcgccgtgcggctgtgaagggaattgatgaccccttcgttctaaaagaactggccctgaacgacccggacagttctgtgcagatggaagctgcaaaaaagataaacgatggggaggccctggcggagatcgccctaaaggaccggagcgagttcaaacgattggaggccaccagacacattgatgatgagaagatcctctcccaaatcgtcctcaatgaccctgatttctacgtcagactggaggcatccaagaagatcacggatgagaaaaccctcgccgagatgggcaagaatgacttttattggcagattcgctcaaacgcccttaataagatcaccgatgagaaggtgttggcgtatatggcctgcaatgaccctaatccaagcacacgttacgaggcagtgaagaagattaatgacaaagctatcctggtagatatcgccctcaatgcattcgactggaaagtgaggctgtgcgcctgccgacggatagacgatgaggaggtgatgacaaagatagtgaaaaaggacacctgttggcgcatccggaggaacgccgtgggcaagataactaacgaaacatttctggaagaaattgcctttaacgaacctgcctggagagtccggctggaaagcataaagaacattgaggatgaatctgctttgatttatattgctcttaacgattcaaactggcacgtcaggaggcaggcgttgagcaaaataaaagataaatcgatcctggaagacattgctcaaaacgaccccatcttcgagcttcgcaaactggcagtaaggatgatcaatgatgagtcagtgctcagaaagattgctaagaacgacccagaatggaagatcagacgcctggcaattagaaacattgaaaacacggacatcctgaaagatatcgcaatgaacgattccaacattgacgttcggttagctgccagtgacaagatcactgataaaagcgattga

SEQ ID NO: 2255 - DNA, 1917 bp, synthetic construct
  source 1..1917: mol_type = other DNA
atgaccgctcccgatagtaattacgagaccatggcggagatgaccattagaaactccattatagagaataacagtgctaggaatggaggggcgatcctcaatgatggaaacctttttattgaaaagacgacgttcaagaataaccttgcctttaccgccggagccataagcaacgggggctacgtttccctgaaggacgtgagcatggaaaacaacatcgcagtgacaggggctgccttcatcaatggaggcgatgcgaagattgaagacagctttataattaagaacatcgccatcggtgaaaaacgtggcatgaacggcgagcatgacgtcggcggagccgtcggtaattcagataatcttttgctgaaaaacacttccttcatcaacaactcgagcccctttggaagtgcaatctacaacctgggcatcgatatcccaaaactgaaatacctgtgtaagataaaaatcgaagactgcaggtttgagaacaacagctcgcatattagcggtgagattcacaacgagataggtgaaatctcaattgatgactccaaattcaaaaacgaaactgcgaaacggggatcagtcatctacaacgacagttatctgacaatcacatcctgtgattttaaagacctgaagaagatagttcataatttcaacctcatgaccatccacagctctaacttcgagagcaaccagtccgacagtgctgtgatcgagaacgacggggagattgggatcttgagcatcgagaagggaaaaatcgccaataatatcagcgactacaccaccgtctacaaccacggcaaggactgcaacatcacaggaaccattttcgaaaacaatcactctaaaaaggaaaactgccacaatatttgtaatcgctccaatatggtactgaaagaaatcatcctaaaggataagactgtcagcatctttaacgagggaatcctaactgccgagaagaaatacaagaacttcattttctcggtaggcaaggtgttctatctgggtatggaaaacgagttcaattttagctatctggatgagctgattcactctaatatttccgacacaatttcttttgatgaggacattagcctgctgagcgacgagtttgacttttacgaggggggcatcgaactcgaccgcgacaatatggtgatcgacggaaagggcaagaccatcgatgccagtggccggtcacggatattcctggttacagggaacaatatcacgctgaagaacataatcttcaagaatggccacgctttcgacaactatttcatgagtaacaacgaagggggggccatcaaggtgtacaaaggccttgatctcaagatagagaactgcaagttcatcgacaatatctccgagagcaaggggggagccataaataacaaggggcatctcaccatcagcaacggcctgttcgagtccaacaagtcaaatgaggggggtgcaatctacaatcaccagaaattatccatcatagatacgtgcttcaagggcaatgaaggccatattggaggggcaatttataataaagaagatctcgagattgtgagtactaaatttttaaaaaacattgtgaaagagtcactattcaaggccaggtttattccgatcctccagttggaagacgagtcctttggtggggcaatctttaacaaaaagagaatggtgatcaagcaatcaagctttaagaagaacatgggcttggatgataccgacggcgcttggggcggtgctattcgaaccattggcgatgaagaggtgacaatcattcagacagagttcatcggcaactatctcaaggacagcaacttcggaggggcaatatcttcctataaaacgccaaatctgattgattgtactttctcggacaattaccctaatgacctcaattga

SEQ ID NO: 2256 - DNA, 1350 bp, synthetic construct
  source 1..1350: mol_type = other DNA
atgggcatggtgttgaagatcaatgtgaaaatcggggattccgtaaagaaaggtgacgtggtctgtattctggaggctatgaagatggagagtgagatcttcgcggataagtcgggtgtcgttgaaaacatccttgtgaaccctggagacattgtaaatcagaacgatttgataatgatcataggggattctatcgatcgcgacgagaataagtcaaacaaggaaaacaagcccaaaccaaacaaggaggaccctaaagacagaaaaaatgagttttccaaatccaagaatgacaaaaagatcaacagtccaaatgagatgcttgataagctcaaaaataacattaaagtggataagatccttttcgttgacggggccaacatctccatcagccccatcgccgaggctatctttaataaaaaggtcaaaggcatcaaagcttacagcgctggtctgagcgccatcagtgggaataaagccgtgccaaatgcaataaaagtgtgtgaaaatcacgacattgacctctcaagccactgcacagcaaacattgaggattatgacctggacgattctacactgattctgagtagcacgacctacatccggaatatcctgaagtattactatcacgtgtacaaggttgtaaccattaatgaatttgcaggattttcgaatctggatattcaggacccgttttggtctgacttggatgcctttgagacttgtttcagcaagatcaacgacgcaattgacgaaattttcggactcaatagtctagaaaaggacaatatggccttcaactgcgaaattgaggaaaataagaacattcaatccaacaaggaggaaaacaagaacacaaccatcacctcaaacaaagaagaaaacaagaacacaacgattacctccaacaaggaggagaacaagaacacaaccataaccgccaataaagaggagaagaacactcagtccaataaagagtacctcaacgaaaagtcgagcaaaattaatagcttcaagtacctggacgatttaatacacagcaacaagaagaacatcactctggattcagacattattcatatggagggagacagccccatcatcctagacgtggacgatactctcatcgatggcaggggccatgccatagacgcgaaaggcaagtgcggaatcttcaacatcacagggaaaaacatcaccatcaagaatatcgtgctgaagaacgggttcgtcgagtctgatggagtcatttgcaacaagggcaaggtgacgctggaaaacatatcagtgcagaacaaccgaggctctaaatatgagggcaatgcgatagtcaataagaaaatctcctga

SEQ ID NO: 2257 - DNA, 1236 bp, synthetic construct
  source 1..1236: mol_type = other DNA
atgcccagcaagataatcaagcgggaggcttacattcgtgacctgaaggactatgtcaacacggattttgtgaaagtatacataggaattagaaggtccggcaaaacgagtctgatgcataatatcatcgacgaacttaaacgggatggcgtgaatgatgagaacattatcttcatgtccttcgaatcacgagaatatatccacatcaacaacagcgagcagctggatgaactcgtctacaagaaagtggagaatcttgaaggcaaaatttatctttttttcgacgaaatccagcaggtaaaggggtgggagaagtccatcaatagctacagggtgtccatcgacagtgacatctacatcacagggtctaattcaaagctgttgtctggtgaactggcaaccctcctgaccggaagatacctcaccatccacgtgtacccattcagcttcaaggagtttctgcaatacaagaacgagattgagggtgttgaaatcactaagtactcaattgacgagctgtatgaggaatacttcaactttggaggcatgccggggattctctccctgggcagtgacgagtttaagcggttggccctgaaggacatctataatagcatcctctttgaagatgtggtgtcgcgatttaacattagcaatattgacctactacagcggttctctcgctacatgatcagtagcacgggagagatcttctcatctaagagcataaaaaactacttgaagagcaatgatatctacacctcagaggacacactcctcaaatataacgagtacctgaaacaatccttcttcatttcgaaatgcaagtgcttccacctgaagggaaaaaaggagatgaaaatccttgggaagtactatctgaccgatcacggcttccaccatgccctgatcgaggacaacatactcaaagtgactaagatactggaaaacattgtttatgtcgagctactcaggagagggtacaaggtgaacgttggccgcaatgaggataagaccgaagtcgacttcgtgtgcgagaagtctggcaaatataagtatattcaggtctcctatcgcctgaccagcgagcagactcttaacagagaaattaatcccctgttacgcatccctgataaatacgagtccatattgatcacaacagaaaaccatgactttagtaaagacggggtaaggcacctgaacattgtggattttttatgtggtgatgacgtctga

SEQ ID NO: 2258 - DNA, 3135 bp, synthetic construct
  source 1..3135: mol_type = other DNA
gtgtccgaaaagtacacagtggccgagctaaaatacattctgaaggaaaacggcttaaaggtttccggacgaaagcccgatctggttgagagggtgctgcctatcctcaatgctgaagccagtgaagaggccgtggaggaagtgaaagaggaagtgaaggaggaaaccgtggaagcagagatcgtagaagctgaagaaaaagcccccgtggatctgaccttccctgatactgaggaggcactgagctccatactggccctgtatgggctcagctacgacgacctgtcaatcaaagatatcgagtttgccgatgggaaaatctgcataaacggggaagcgttcattcagaacggtttaagcatgagtgattcgaccatgtccatcatcaatgctgacccaacccttaatctgacaatgaatattccagaagtcgcctatagtgacttcgaaagcactatctttagatttaaagaccttgatctgaatctgatccctaccgatgacagtctggagtttaaggcggcgctgaaaggcctcgacatcatgactgatctgaataacatcatcctcaagggccttgatttcgcattcaagagcttcccagaccggggtgtagaaattggtattgatattgacgatttcatctatcctaatttttacaacacaagctttaacttcgagaacctggacttcaatatggcaataggagtggatggacaaagcatcgccattagtgttaatctgccggcattggacctactaaacaaagactatcgcgtaaagctcagcgatttgagtctcaatctagtgctctctgatctgcagcttagcgaccttgacctctccatagctatatccgatttccactacaccaacttcgatgacgtggtcatctacatggaggacattggtgttagtcttgaacatattccagatacaaacagcttcaacgtccttatcggcttgagcgctatggacgcagtgggtctgaatagttttgatgccttgttccccatgatggagatcacgggggtgaactttaactccaaggattcagactcactaattaacttcacagggctgatatctccgatagatctgacgcagattgatctgttggagctcggcgcccttttgggttccggatttgacctggacgcctacacgcggaacatggcatactaccccgacattgcaagtgagggagcatcagatttaggtatccccggattggacctgggtgccatagtggccaactgtgactattcctgtctgggcgccatcgagctgaacctcaccgggctccttgatagcgcagacatcgatctgtccgatctgggcatcgacttgtccgattatgatatttcttcaatcaaactctctgaccttatcggtgcggtcggggattccgagtttgttatgtcggccattcccgctgtcttaaacattttctcacttgacctgacggacgtggacgtctccggactgatcgctgacttcgacgaagagaactttgatatctcgtccctgctggccagcctgaatttaagtagcacagacattgctgctatcctcgatatcctggataagtcagatatcgacttgggagccatatttgccggctgtgatatttcatgcctggatgccattacccttgacctgacgggattcattgattccctgggcattgatttgtctgcattcatcgatctgagcgaatttgacttgagcgctgtgagcttaactgacattatcgccattttaaacagttttgaatttgatatgtctaccattagcgctctcttaaagatattcggcctggacataggggatctcgacctggagggactgatagccagcttcgacactgagaacttcgatctctcgacactcctggcaagccttaacctgtctgacctggatatcgacgccattctcgcgatcttcaataatccagacttcgattgggccggcatctttgagaacagtgacctgtcatgcctcgacgcgattaccctggacctgaccgggctgctcgattccgcagagattgacctctctgccctgggcatcgacctctccgattacgacctaagctcaatcaaactgtctgagctgattggcgtttttgggaaccttgacttcgacatgtctgacatgatatccggcattgacttcgaaagcattgactttgagaatatcgacttggaggggttgatcgctgactttgacgcggagaactttgacatatccaccctgttggaaagccttaacctatccagtacagacctgtctgccattttcgacatgttcatcaactcagatgtcgacttgggcaaggtctttgaaggctgtgactacagttgccttgatgccattgtgctgaatctgagcggactccttgatagtatcggcattgacctggcggatctgggcatcgacctgtctgactatgacctgtcggccatcaaactctctgagctcatcggcatcctgaatggattcgatctcgatatgaacactttatctgctctcctcaagatcttcggaatcgacctggaagagctagacctctcggggctcatcgccatctttgacggcgacaactttgatatgactgcattgctgtccagtcttaatctgggaggggtggatatctccgcgattgtagagctatttgacaatctcggctttgacttcgatggcatgtttgaaaacctcgatatctcatgcttcgatgctatcaccctggacctcaccggactcatcgactcaacaggcattgacctggctgccttcggcatagatctgtctgcctacgacttatccgcaatcaagctgagcgatcttattggggtggtctgcagttccgagtttatcatgagcgccagcggtgctgtcatgaagctcttcaatatcaacgtggacgaccttgactttgatgggctgattgccagcttcgacgctgagaactttgacatctcgcctctgttggagagcatcgagctatccggattcgacatctcagagatgttggagatgttcgatatgaacgggttcgacctgtcgcagttcctgaatcagttcataagctccttcatggagaatgctctgttggagagcggggacgaatga

SEQ ID NO: 2259 - DNA, 294 bp, synthetic construct
  source 1..294: mol_type = other DNA
atgctaaaaatcgatgaatttcggatggaaatggaggagcccaagaggatctacacagaagagctgaagaaattcgcgaagaagtacgacttcctgggcgacttcaccatagtggaggagcgcgacattgatacggccgactatttcttttgtttcaacaatctcaacggaactagtgatgaaaccctgtattccacaagagacgagatatatgatcacatgattaaattctgcgaggataacgggatcgacgaatttagcaaaaatgcatacatcttttacaagagcgactga

SEQ ID NO: 2260 - DNA, 501 bp, synthetic construct
  source 1..501: mol_type = other DNA
atgagccaggaggagaacaaaatgatcgacgaagtggagatgagttcagttgaagaaatcgggcgggattctgtcgaggagattaaaattggctcccaagacgagatagggatgaactcggtcgaggaaatggatttagactccgcagacgagattgacatggacgacgtggaagaaatggagatgaagatcgagaactacgagaatcggatcaaattgcaagatatcctgattgaaagcctgggtgagcgatgcgagggcgaaaaggagagaaataagcagcttcacgaccgcatcatccagctcaacgaagagctaaagaagaaacaggaactggaaatggtaagcgacatcaactattggaggggaattgaaaaggcccatatagagctgcacgataagtactacaagcgcattatccagctcgaaaaacagaatttcctgcttgaggtggagaacgatgagctgaaggatgagctcgagaggataaaaaatgtgtga

SEQ ID NO: 2261 - DNA, 810 bp, synthetic construct
  source 1..810: mol_type = other DNA
atgggtttgttaagcctcaccatttcgtacttcaacaagagcgcaaacggggaatcactttgggcgcccttccttgaaatgttcagaatgcttagcgtcgtcttgattctcacatacatcgccaccaagtccaaaagtttcaaagtgatcatccggggccaacagtcccgcaagaccataatctggcagattatcattttctccattctcggaatcctggcatcatattgcacgatggatgtgaacggtatcccggccaacgcaagggggctgattgtaatgatctccgcgctgctgggaggaccatacgtcgggatacctgtaggaattattgccggtgtctggcgctacggcatgggcggcatcactgccttggcctgtggcgtggccacaataatggctgggatcgtggggagtctcgtttatcggtggaacgatggcgaatttctaaggccatacaaggcggcactgttgatgctgctctatagcggctttgacatgtttcttatcaccattctgaccccccagcctaagggagtgctgatcgctaacgccctgtatgctcccatgacatttggcgctgttctggggatcttactcttcaccctatttctgactgagaagaaagaggaagccgaaaaaagcgatgagcagactgtgtctgacaatcgaaatacggacacacagaatataaatgagatcagccaggagctgaatgaatacaaagataaggtgaaaaagctggagcagaagctcgaggagtacgacaaaaaattcaaccaactggagcagaagctgaaggacaagtga

SEQ ID NO: 2262 - DNA, 306 bp, synthetic construct
  source 1..306: mol_type = other DNA
atgacgaaaatggaatttgatctaacagacgaacaaattgaaaaagtgaaggagctcgagaagagcggaattagtctgggcgaagccatcgacctgctgtttgaaataaaggatgaggcattcaaccagatggacgaagtggacgagaacatcgagattgtctcccagatcaccaagtcaatgaatggcgagaaaaagatcgagatcatagaaaaggcgtatcggaattacgagaaaacccccgagatgaaaatccaggaggtaaagcgcaacctcagctgggggagggatttcttcaagtactga

SEQ ID NO: 2263 - DNA, 1545 bp, synthetic construct
  source 1..1545: mol_type = other DNA
atgaatgaaaccattaaggagcacagctggattcccctaatccttgtgtgctttgctaccttcatcatcgctttggatacaacattcatgaacgtcagcatttcctcagttgtggctgacttgaacacggatgtgagtaccattcagacaatctcatcgttctacacgctcatcactgcctcattcatgctcctgagtaccaagcttcaggacatagtggggaaaaagaagctctttcttatcggggctggaatttacggcgtcgggaccctgacggcagcattaagtgccaatacgctcatgctttttatcggatgggcgttgctggaagggataggcggggcattgatgaccccaactgcagtgtccatcatatccggaacctaccagggcgagaagctgacattcgccctggcaatcgagagtgccctggtggccatcgcggccgctatcggccccctcttcgggggggtcgtgactacctacttcacttggagactgggattcgccgtggaatttatcatcgtcctgatcgtgtttgccctgcagggcaaaattccttatttcgaagctacaggcagtaaaagcgaactcgacattaccggggctataatctcatttgtaggcctggtcctctttgtgatgggtattctgatgctaactgatgataccactttcagcatagctataatggctgcaggattaattgtgctagccctctttgccctctttgagatcaagcggaagcgcaagggcaacgtgcccctgcttgacgttgaactgttaaaggaccgcaatctccgagtgggtactctcctgaggctgctggtgaacctggccatgggcggtgccttgttcgcagtctccgtctacctgcaaagcgtgttggccctgtctgcgttcaacacaggcttgaccctgcttcccatgacccttgggctgcttctctttgccttgacagccccaaagctatctgccaaactgaaccacaagatcctcatgtcaatcggatgcataattagcatcataggatgtctcattctgagccagcagttcaccatggcgacatcgatgctggagctaatgcctggcctcttcgtactgggagcaggcctgggttttgtgatggctttaggggtggacattgccctgagcaatattcctcaggagggtcaaaacaatgcctccggaatcgttacaaccggccagactctgggtcagtctatggggaccgcaatcattggcgtgatccttatcctgggcatcatcggaggaatcagcaatgcagttgacacctatgtgccggaccagtccggtaacgcgactttcgagcatgatgtctacgagggcttccagagcatatccagcatcaacgatgttaaggccgagaacagcacgattcagaatatcgtaaacgtcattgttagggactccatggcgtttgtgatgtatgtaacgatggctctgatggccattatcttcgtcctgacattgcggctctcggataaggagattaaaaaaccagacaaactgaaaaaacaatga

SEQ ID NO: 2264 - DNA, 735 bp, synthetic construct
  source 1..735: mol_type = other DNA
atgactactacgaatgaccaagatgaaagtatatccgagcatataaaaaaagcgttctccttgaaggaggatacggcctctaatgaagagattcggtcccgcctcttagacggcggcaagatcacgggaacaaacatgcgcgttctggtgtgtgctatggtgattgcctccgtggggctgaacatgagctcgaccgcggtgatcatcggtgccatgctgatttcaccgctgatgggcagcattctcgcctcggcctatgccagcgtgaccaatgacaggcccctgctgggcaagcaccttaccgggtttgcaatgcagatcatcatcagcgtaactgcagccgccatcttctttttcctctctcccgtgaaggagccaaccgtcgagctactcgctcggacctccccttcattttatgacgtgttaatcgcattcttcggaggactggcgggaatcataggccagaccaggagtgataaggtcagcacagttatccccggggtcgctatcgccacagccctgatgccacctctatgcacctgcgggtactccattgcaaacggtcgatgggacatgctgcttggcgctgggtacttgtttctgattaactgctatttcatattcctcagctcaagccttattctgagtgctttgaagatcccaaaactgaaggagtacacagaaaaagaatggaaaatccacaagtggagaatgagttacggcattctcttttga

SEQ ID NO: 2265 - DNA, 3006 bp, synthetic construct
  source 1..3006: mol_type = other DNA
atgggattcatcgataaactgaaaaaaggaatcggcagaaaaaataaagagaaaagctccaaaagagacacccagaaggacactgggttgaagaggaagtctccacccattgacaaggcatcttttgacggtagtgacgaggagtacaaattattcgaaagcataatgtcctacagggacgagccagtcgtccacagtatcttacggaagatcagtgacgatcgcctcttgattgaaattgggaagtcccatccgtttctggagcttcgacgtgacgcaatcctaaagatcaaacatgcctcaagagaagacctgattgagctctttgacctgaacgaggaccgttggggcatcggattaagaaacgctatcgccagcaagttcaccaaggagcagttgatggaaataaatgatgagcgcaagttgcgggagatcatacgatactcaaatgaggagaatgcaaattgcatctatgacaagatcaatgacgaggagctgctcattgatatcgtatgtctgacaaggtatgaaagcatccgagacaagtttgtggaacgctttaaaaacgacccagaagtgatgcggcggtgcctggagtccagccgaagccccgagctcaagtctaaagtggcccaatacatcaacaacgacaaggaactcaagaagtacatcctatcccagaatgattggaacaacaccgttgaatatgccctgaacgagatgaaggatgagaaaattgctaatgaagccctctacgaatttgcccacaaaggcaagaatcagctcaacaagtcgatagagttcatgagtgatgacgagaccctattgaatattgccctggaatattacaatctggattacgaccggtactactttgagattgggatggccctcgataggatcaatgacgatagcctgttagtggacctgatgcacaatgagaccgatgagacgctgcgcaggctggctgccaagtacattaagagcgaggaggcgctcaaggagttcgtcaacgaccccaacgagaacgtgcgcaagatcgctatccgggccacctgcaagaacagcctggataaatttatggatctattcaacaacgacgaaatcatccttgacgatcacttcatcttggacggggacggcatctatgagacaatcaccattaatcgggacaatgtgacaattgacgggaaaaaccacaagcttgaatgcatcaaccccaaaatcgagctgaggattgaggcgaacaatttcagcatcaagaatatagagaccaatatgctgattcgccttaatgaaggctccctgaacatctccaactccatcatagacaagtccattgagattaacgaggggaacttgacgggtgaaaactccacttttgacagacggatcaagaacattaatgggagcctgaatctgacagattgtaacattgatcaaatcttcaatgaatcttccctcagcctgaagggctgtataataggctccattaagaacgatgattcctgcaacatagacaactgtacgatcaacgagtttctttacaacaatgggcggtgcaagattgagaactctaaggtggagtcggcaagccgcaattatagtaacccttacgatgggggaggagccatttcaaatgggcagaacgcttcgatggaactgacaaaatgtatcctggccaagaacagtaccgacaagaacggcggggtcattaggaatatcggctcaataaacttgtatgactgcatcttcgaagacaataaggccggactctccggcggagccatcttcaatgagggcaggctcacagctagcaggtgcaagtttaaaaacaacctggttgaatttccgcgatacggctcgttctcgcgcgcaactggccgctatcacttcattaagcatggcaactccattctgaacctggcctttatggatctcttcaactgtcagttcatcactgataagatcaacgacgctcctgaaatcattgcccagttcggtaaagacagctacctcaatattgagaactgtcagttttcaactaataaaaagacttctgttgacgcaatagagggaggactgaactttaataatgcgaagttcaaagtgtcctttgatgacgtggaagagatcaacctagctaacgagggtcctgaggagaccggttctataaataaaaacctcaaagaaaccagctctactaatgagggtcttaaagagcgtagatctacaaacaagggtcttaaggaaacaagctctattaacaaaggtgaggaaacgacggtcagctctaaaaatgaggatatagatgccgaaagcattctggaaaacttcaagggcttcgaatatcttgatgatttgattaacgacggctcaagtgaaatcaccctggactgcaatatccagatgcatgaactggagcaggcattctacgaagggggaattgaaatctacgaagacaacctgacaattgatgggcaataccacacaatcgatgcaaacaatctctctcggatattccatatcaccggcaatggcattgtcattaagaacatcaagtttaaaaacggatattactatcaggattatttcgacaattcaaaagatggggggggcgtattatgcatcacccacagtgcttcggcaaaaatcatcaactgtgagttttcaaataacgaatccagacaatctggaggggtcgtgaaaaacaactcagattccctggaaatcatagactccaacttccgcgacaataaggtgatctatcagaagggtggatgcatcatcaataatgccagtctgaccctcagaaactgcagctttaaaaataacttcagtaatgccggctcatgcgtatttaacagtgaggattcatccctgaagattttcgactgtgagttcaacaataacactagtaggaaggacttcgaggcgggcggagtgagattcagtctggaggtgcccagcagcggcggcgcgatcgctaacgagggaagcctttga

SEQ ID NO: 2266 - DNA, 1974 bp, synthetic construct
  source 1..1974: mol_type = other DNA
atgagagacatcgaagagctgaaaaagacaccaggactgtcactgaaacgctacctgatcctgtttattgcaaatcttatcggattgtacctaatcagctttggattggatttcaccgtcaccaatctcggccgggtgataatattcatattcttcataagcatcttcaatgcagcgatatggcctctggtgacgaggatctacatgcccctcatggtgtggacctttggcatcggtgctctcctcttaaacggaggggtcttcgccttcttcggcccttacttcggcctggacatatccggctggggaattgtgctggccccgttaacgatcgcccttatcactatcgtgttgtcaaccttgatggacgctgaggatgatggcacatattatcaggctgttctgcgggaagcccaaactaagagaaaaggagagattaaggactatcctgggctaatcattgttgaaatcgatgggcttgcctacgacgtgctcctggaggctgtggagaaaggggtcatgcccactgtcaagtcaatgattgacaacaaaacccatatcctgaaaaaatgggagactgacctctcctctcagaccggcgccagtcaagcaggtatcctacacggaaacaatgaaaacatcaccgccttccgctggattgaaaaggagaacaacaaccagatgatgcagtgctctggggttacaaaggtcaaggtgctcgaagagcgcatttccgacggtaacggcctgctggtggaaaacggggcgagcaggtcgaacctcttcagtggggacacagacaatgtcattttcacgttcagtaagatcacagaccttagaaagctctacaatggcgcttggttctcaatcttttcgaatcccagcgagtttgcccgtattgtgattctggtcatcgaagacatggtgcatgagatctattcccagctgaagcacagcattctaaatatccgtccaagaatctcaaggggcatcgcatatatcccaactagggccggaacaaatgtcttcatgagggaaatcaataccgaaaccctgattggggacatgctgatcggtgacattgacgttgcctactccacgtatctcggctacgacgagatcgcccaccactccggggtgcgagatgaggatgtgtggtttgccctcaagggaatggacaagcagatccgccgcctgatctacgggaacaaatactctccaagggaatatgagttcgtcatacagagtgaccatggccagaccaacggtgctacattcaagcaaagatatggccagagtttcgaggactttgtaaagtccttgcttcctcacgagaccaatatctacgcaaagatgtcctccaacgaggaccactttgcagaggtctacattccgtttaaagatcggatcgataaatttaagaaccgaaacaagcccgatgaggacaagctgatttccgagtctgaagttattgtgctggcctctggtaacttggcgatgatctaccttacgcgatggagccaccggctgacttacgaagagatcaacgagatgtttccagatatgataagtgaaatagtgaataacgaatatgtagggttcgttctggtccgctcatctgagaatggtgatatggcgatcggcaagaatgggatttactacctggatagcgatgagatagaaggggaaaatcctctcatcggatttggcgacaacgtgacccagcatttaaaacggaacagctcgttccagtacacaccggacatccttgtaaacagcttctacgatgtggaaaacgatgaggtgtgtgcctttgaagagctggtgggcagccacggaggcgtgggcggaagccagagtgagccctttattctgtatcccagcgattgggacattcccgacgaggagattgtaggtgctgagaatatttatcggattctcaaggataacttggctaagatgaaagagaaatga

SEQ ID NO: 2267 - DNA, 285 bp, synthetic construct
  source 1..285: mol_type = other DNA
atggacgtcatggatatgattaaggaaatcgaaacgggaaacgactattggcaggaaggcttggattaccatatggattgcaaagtaacagtgaacaatgtccgcaccagatgcgatcaagtgagcatagtgcagtgtgatatgagcaagtacggcaaggggatcgagctgctcctggagctacggcgaggtgacttcatctcctggatttacctggacgacgttgtgagttttgacgtgcagatgatggacaatgtcctcagggaggagaaaaagaaccactga

SEQ ID NO: 2268 - DNA, 258 bp, synthetic construct
  source 1..258: mol_type = other DNA
atgatcgatgaaatgatgaagatagagcagtttacaagccactgctgctttgtcgatgaggagggcatgaatagtgtggacggggacttcctgaccgccatcgcactatgtgtgaacttcatgtataatttcatcgacattcagaacattgagtccggaagcgaggatgaggacgacctgaacttccagctcatcatgaacaagatcgaatactaccaaaagatggaagaaatttgcaaaaaatacaaggaggaatga

SEQ ID NO: 2269 - DNA, 687 bp, synthetic construct
  source 1..687: mol_type = other DNA
atgaataaaatcaacatcctttcagtatctcgcctgcgtacatacacagatggggatggaatcacaagccttgtcgccactatgggatgtcccctgcgatgcgcatactgcctgaacccaagctcctgggatggtacggcctatccaaagagtctgactgtggatgagctgtacgaagagctcaaacgggacaatatctactttctcagtaccggtggggggattgcgttcggcggcggggagcctctcctgtaccacaaattcatcaggaagttcatcgagaagtacagctccaccaagtggaaattctatttggaaagctccctaagctataagaccgattccttgaaggatataatcgacctgatcgactacttctatattgactgcaaggacatggacaagaccagatatgagctatacacgaagggcgactacgatctcttcttcggcaatctcatctatctgaaggagcatgtggacaacaacaaaatcaagattagagttcccaggattaagggcctgcacaaatcggacgaggctgaatcaaaccttaaagtgctgcaggagatgggatttaccaatattgaaatatttgactacattgatgatgtcgagatccacaagccgataagcgacaaggccatccggaacaaaaaggactttttagaacgcattaaagaatga

SEQ ID NO: 2270 - DNA, 480 bp, synthetic construct
  source 1..480: mol_type = other DNA
atgaacggccgcgacaagtgcgaactgttgaacgaagtccggcagaggatcgccaaagccaacaacattgagtttgacttcgaggaatgcaccttcgaggggaactgctccgggacgtgccctaaatgtgaaagcgaggttgcatacctggaaagagagctggaaaaaaagcaggacaatggcgaaaagatcgacattgagggaatcttcacactgaaggaaaaagagccaaccaagctactctgtaaggatgtctttgtgcccttcggtaacttcgagccggtgcgacccaagatggagattctcgaaaagagcccctactgtgaaaccttcggcgatatagagtacaaagactacgcttttacataccttaaaatcttttatctcgggaatgatgaggagatagtgctgccatataatgagaaggagtatgatggagacatcactgtattcgagatcaaggaggacgagtacgaatga

SEQ ID NO: 2271 - DNA, 552 bp, synthetic construct
  source 1..552: mol_type = other DNA
ttgtatcagtggtgtaacctattcggaaagatccatcgggggcagaattacgaggacattaaggaggacaactgcaggatgctcctggacctggtgaggaagtatccagagcactcagatattatctacctcaagaaagtaaaagacatcggcacatcctccaaaatggataactcccttgacgagcggatcaaccagatggaggaagccctgaagccagtccacgacatggtggacgatgtctactcatgccagatcaacgacgacttaattaaccttgacgatttcgtgccgtttgaatttctgtcggaatacgcatacaaaaaacgattctggctgacgtacaatgaaaaacccgatatctttgagctcgaaacctcttaccgcgacaagatttatagttttgacagcgtgaccgaaagcgtgatattcgttatggatgagatgaaaaatttcatcgataagtaccctcaatatagcagactgatccccgattacagcagtttcattaagtataaggaaaagctgatagaggagttcgagggcgagtga

SEQ ID NO: 2272 - DNA, 177 bp, synthetic construct
  source 1..177: mol_type = other DNA
atgaaaagcgagcttgtcccagggtacgatttcgaatacacctacgacggcgtgctgctgatcgagtatgacacatatcattacaaaaactacgaaatcaatcgggtatatctcgaggatcacattgagaagctaataaagctccccgacgtgtacgtgatctgcctggaacagtga

SEQ ID NO: 2273 - DNA, 219 bp, synthetic construct
  source 1..219: mol_type = other DNA
atgaacgagaacaataagaaaatcaaagagaagagcgccgaggactacagcgatctggactccttcctcgaggaggtgtttggcccaacagatgacatagagtggacggaagagaagcgcaagaggttcgaggaaatcaataataagtgcccgttcagtcctacccggaacgaatggcccaacatcaaaattcacagagaggaactgaaagaagactga

SEQ ID NO: 2274 - DNA, 2058 bp, synthetic construct
  source 1..2058: mol_type = other DNA
atgaccgaagaaatcaacgagaagatcaacactcagctcgaggaggagatcaaagggttcggcacacgggtggtcgagatatttaaaaacaccaaatccacgaagaaagagaacgaagatccggaggatgataacactaaaaagtcacaggaatttatcaccgtcgcagaatttaatgagttcaaaatcgagaccctcgagtttgtcactgaaatgaacaataaggccaacaaccttattaaagcctctgagaagttcggcgaccccgaggacgactacgctgagatcgtcaacaaggtcgacaccctgctgcagggcttgcacaacgaactgctcggcaaggagatcacaatcgaggaccgactggacaagaggaacacactggttcgaatgtcactgaaggtgcatcagtccaaaaggattctaaagctgttagacaagcagtcacagatgcggtctgcagaagagaataatctcaagaaggacttgagcaagtggttccacaaactggaaagaagaatccagaacctcatagacatctactatgagaacgaactgttcttcctccacatcaacaaggtgaccactatcgtcgaggacatgaagccagaatacaataccatcctccttaagcatgggttgacagtcttctacaatgcccgggagacggccaccacattgtacaccattcaacagaagaaggtgtcctccaagacaggcctctacgaaccaaaaatcatgcgagagactgacgtcggactgttccgtaccaaccccgaaatcgaagacagcctaaggtacagcacctttcaggctagtaattccacattgattcgggtgagtaagaacatcaccaacaacctcgcagatagctaccacaagggcctggggatcgaggatgtggggcataagattacggaggagtttaccggtctgaaaggttggcaggcgaagcgcatcgcgcgcacggagatcaactccgccagcaatgttggaacattctcggtgtacgacgagcttggtgtagagtaccacatgtggtggacaggcaacgatgcccgtgtaagagacagccacaagcccttgcacagccacatagtggcagttgggaacacgttcagcaacggcctgctgcatcctggagacaagtcaggacccataaatgagtggattaattgtcggtgcacgtccgtgccctatattattccgctcgggatgatggcccccccaggagtaaaagagttcaccgaagatcaactgatccctatcccggactatgattctagtaaggatcgcggcaaaatcatcaactctagcagcaatagtttcaataatgtgctgaaggttcccaacaataagctgaagaaagagggacataattttaggaagaaagaactggaggagctcctggaacttaaaatccgggagaagagcctaaaacaacccatcatcaagtccgacaacactccactggtggagctggagcatccaatcctaaaacgcgagcttgacaatttcgacaaatttttagaggacaaggatattgaatatttccagatgtatacttttgatggcagggaagcttcaaaactgtatattggtaagatgcacgaggtggacgtgcctaatgaagaaataattgaagctgtgaggaagggagggaagatctccgtccacaaccaccctactaacttcgataacatgcactctatctcggacatttacacccagattgaaaccggcatagaacttaatatcgtgaagtcgtacactaagaagtatattgtcgttgccgaggatctgagcagcaaagagagaaaatacctgcttaatcagctggagaaaattgagaagaagtacaatgaatttatagagaaggaaaagaaaccttatctcagagggttggataaaatagatttaacagtggctgagcgcgagtacgccgaagagattatacatcaatatgtggtaattaacaactacgacaaatatgaaaaagtgatgagttatttctttaaagcgaatccaagtattgatctctacgtgtacgatatttga

SEQ ID NO: 2275 - DNA, 498 bp, synthetic construct
  source 1..498: mol_type = other DNA
atgctacccgtgttcatcccaaatctgccggattgtgagtaccaatacggggagaagcccctgaccgctgatcagataatccagttcgccagagactatgaggaatggctgattgtggacttggagcacgagtttctctacactgggcaggtaatcggcacagtcataaagagccatgtaaacacagaaccagtcaccgtgaagttcattgacagcacaccacgagaatatcctaccggcacctggttcgttactctgaaaattaccaaccaggatgtgattcagggaatccataacgaacactacaccggcggaagtgccaccactatcgaacgggaggacacggacaagctcaggaaaatcctgaatgttccgataacatccacgacaaagtcaaagatcaaacgcatccccatcagcgagattaaaaaccccgtggtgatcacgatctccattgtgcactcgccttgcgtgcctcttgcaaattttgtcgtctga

SEQ ID NO: 2276 - DNA, 1023 bp, synthetic construct
  source 1..1023: mol_type = other DNA
atggtggaatttgactcctttataaacgtagaaaaggtcatcgaggcaaaagacagtaattacgttactaaggagctgtcctttgacgataaaaccatactcaacacaccatacaagattttcaatgtgtcgaaagtaaagctgaacaaactggagctgccgcttaagggaaacattattgaaacgaccaagttcatcaacaataaaaagtcatatgacgccctgtataacctgcttgaaaattctcctaataaccaaaaaagtaagttgaatcagtttttcaaggtggataatacattcaagagctataaatcaatcataagcttgactttcagcaagaacccttttaagagcaataaatttacccacgggcacagtaagcccctgtcattctccaacttcgagtacttgctagattatatgtacgaatattcaacgttatttgtgctgattcccgacatcgacttcaagagcttcgatagcatggataactacatggagtatatcgagaaggccgtcaatgtggttagctctttcaacaataaaccgatctttgtgccactgtctatgaaactcgacaacagtaaccttgaaaaactcctgcacttctacaaggagaacaactacagcaatatttggttcaacttttattccaaccagataaacactaagatctccatcatcagatattcgctgagactcatcaaccgcctgttcaagggaaacgcggtcacatactttagcaacatgaaaaaggaaatcaataaacatctggacgacgtgtacacattaccctccgacttcctcgggcccttcttcggctgcgattttctaggttcgaatagggagtcaggcttccctggcaagaatattaaacggaccgctaaagagaagagggagttcgagcgcaaaaatctcattaacaagaaccggatctttgattccagcagctactactactttagtattctcgagtacccatccgacctgcgaatcaagttcaaggtcaatagcaccaactga

SEQ ID NO: 2277 - DNA, 570 bp, synthetic construct
  source 1..570: mol_type = other DNA
ctgttctttgcagatttcctccggtttctgtcgtacggcttcttggaggaactaaagcagagcaactgctataattttctggattactacaattttgccatcggtagcaaagtctttgaggaaatcaaccaacaccttgataataacctgattaataagctgcacttctgcccaaacaataactacaactatagcgccctcattgctcccctcctttccaacgaagagaagaacaaaaacaagggagaatacgaagtgataggactgtccttacactacctctctttgaatcaggtgaagtacataatcatcgacgataaacgcgctaggaaattcgcaaagagaaatttcgaggagctgcaggagtatattacgggcacaatcggcatcatcatcttctgtagtaaagacaacttcatttcaaaaattgacgccgccaacatcctcaaggacattgaatttgccatcgagaaccatgacgagacccaggggaatttcatctgcagtctggggaagcagaactataaaaagataatcgacgacgcgattaagatgctggatgtagagtga

SEQ ID NO: 2278 - DNA, 573 bp, synthetic construct
  source 1..573: mol_type = other DNA
atgacactcagcaatgcggagtataagcaaaaatacatcgaatatctgattttgctcctactgggggactttaaaaacaagctgtcagtcttgcacattcagaaggaaatatatttgctgtacaactttgacgtagagctgaaaaagctgttttccttcgtgaagcactataaaggaccctacctagacctgataaattcgtgctgcgaaacccctttctatctggacgggtgctgggagtacttcgaaccgaaggaaaagattagcggaggctttttaaagatcaccgataaaggctacaaagaatacctcaaattccttcagaagatcaaggatgagaaccaggaagaacttcttcatataaataccgccatcagtatgctcaatcggttatacggttccctggattgtgaggagctcctgctgctgatttacactgagttcccagagtacacggagaaatcagaagtgtatagcaacatcatctccaagaagacaaacatcgcaaaaaacctgttcgagaagaaggtgattagcgaggagaagtacaacgagctcagtggcatcctctga

SEQ ID NO: 2279 - DNA, 2769 bp, synthetic construct
  source 1..2769: mol_type = other DNA
gtggagcccacaatcagctcccgactgctaatttttatccggaacgacttgaaaaacgacatcaacgagctactcggcgagccaaaatgcggcaaaggtagcgcaggcatagggaacctggctcatatgccttggctggattttacactgcacaatattgatgagaacttgggggcgattaacgtggcgtacttattcaaaccagacatgtcgggattctacctgacattccgcgccttattttatcaggagattgagaagaagcacggcaagtatctgttgatttacctgaaaaataaatcaagacatatcagagagttcctggaggaatcgaacaaactgcgcgacgactttctctttaatatggacttctctgaagacaccgccgtcctaaagaagcacagtgcaggcaccattgttgcaaaatactatgatgcaagtaatgtgccttccgatgaggaactcataaacgacctcaactatttcctcgatctctatgcttttgtcatcgacaactatgagaacaaaacagacctgagtgtagacgaatgggtcaaggtgctggaaaacaaggagcttattgatgataagatgttcagcatcttagagatcatgaatgagatggacaactattccgcgaccaccagccagatctcgaaaaaaagggaagaactgggattcttggatgaaaagtcttataatagcatcataatcagtaactcccgtaagatcaaggaatttttaaacaagaaaccgatctacaacgacgacgggaccgaaaactactggaccaggttcttctacggaaagaatgtggatggcgcctttgaatttaagatgaaggatgaactcgttgaagctttcaaaaagactaatgtggaaaagcgaaaaaaaggtggggaagaggtgaccaaaaactataactctttctacgatttcctcctggacaacgggtatctgttcgacaaaggaactattgagaactatctgcttagcctgaaggtgaagccgttcgctatcctgaccggtaactccggcactgggaaaacgaaactgagccagctgttctcccagtacatcagcaacaataatcccatcctcgtgtctgagatgaacagattgtcaaaagacactgaagattttgtcgaggtgcaggtgacgaccaggcggtcctcgtggaacatttttgaaaaggggaaagaaatgaaccctgggtggactataagtaacgagtttttcagcaattatctgcctattgaccagttcagtggtgaataccagattgaagttgatggcattgaaggcaatgggattattagtcctgtaattcaggtctattacgacaagaatagccttaagctgaagaaagagtttgagaagttgtacctgtccgagctggaatcaatcgagaaggacaaagagaacaaagtgtcacacgaaattcagctggttgggttagagcttaatgtgaactctcttgagaacatggtgaatacgaatttcacaaaatttaagggagatataagtttcaaaaaagagattaccacaacttctattaagccaggagagtttattgtgccgtacgaaatcttcgattacataccttttaataagaaccaaatggattgcaaaataatctcctgtggaaggttctcgaacgctaatatccatatcaagtttaagctcagaaagctgagcaagaatatccgagagtacttggaagagaagggcgtaggggctgagattgatgtgaaaattaaaaacatcgacacgagcctggaacgcttcaacccagattggagcagcgccaaaaggtactcttcagagcaaatcgcacaacttaacgagaagaatatcgatctgatcgactttaattctcagaattacaagataatccccgtaggtgccaactggactgagaacagaaacatcgtcggctactacaatgtcatcaccaataaataccaatccactccagcctatgacctcatcacccaggcacagaagtctgacgagcctcacttcctcattctcgatgaaatgaacctgtcccacgtcgagcgctactttgccgactttctttcagccatcgagagtaaggaaaagatacccctctatggagaggaagccctggaaatcccggacaatctgttcatcatcggaaccgtcaatgtagacgaaaccacatacatgttcagccccaaggtgctcgatcgggccaatgtcctggaatttaagacatacagcgccgcctcctacatgaatggcgatatcaagctatctggtcccgacggaaacctctcatatctcgagaaccccttggacgggaacaatatccggagtaagggcatagacgagctgagagagcttttcgacggcgtgaaggtggagaataagcccttctggaacatcttgtcctcagagattgagaagttccagagcgtcctaaaggtcagcggctttgacttcggcttccgcgtgattaacgagatagtgcgtttcatggctgttgcctgggagtatgagaacaagcccgacgagtttagcaattgggagcgctactttgacgcccaaataaagcagaagatgctgccaaaactgcatggctccgaaaagatcatcggagatacaattgatgagcttcacaagatctgcttggacagttccatcgatgacgtggagatggcgaaatatccagagtcctacaagaaactgacggagatgcggaaggtgcttcggaagcagaggtacgtttcattcatcaactga

SEQ ID NO: 2280 - DNA, 1644 bp, synthetic construct
  source 1..1644: mol_type = other DNA
atggagcaatacattaaaataaacgcgatcgacaatgaatcgaatcagctgggaacattcaaaatctcaaaagaatatgacggatacatcccatctatcgagaactttaataaagagattattttagaaaacctgatcctctacaacgttcccatcgtcgaatactttgacaacaagactcccatccaatactacaagaacgatagctttaatgcaaatattctgctgctcgaggaatacgagtacaccattgaatttgagggcgatctgaatctcgatgtgtacgaaagtttaaagaacagcaaaaacagtccactgaagctgctgtcaaacaccaattctggctttcttaactttggaagctacgtaggcaagacctttatcgacatctacaaggacgaaggcctgcttttcaaatgccctatcgaggttcggtctcgcaagataaattacgcgaaagactacgccactatgattggggatctgtcgcgtttttcttcggggctaatctatgagctcaactcccccgtctaccagtcattggaagtaagtgacatcaacaagaccccatacgaggactttatgcttctggagtatctattcgaggacgagaatctgccatccactgtggagtatttgagccgcaacctgtacaccttgcttgaggagtcccgggaagaagtgcccagctccctggcaagcaacatcgggccgaatgagctggtggaggtcttctccaacagtgataatcttgaaaggtatgatggcctggacaacggtcacctggatagcgtgctgtctagaacgaaaggataccttcccttaaagatcaatgaaattaagtacgtggacaatatcgacacgcctgagaatcgattctataaaaacttcctactgtacatagacgacctgattgatgatttaatcaaaaggatagacgagggctactccctcgataagctgcatgaatacaaggaaacacttagctactatctcagcagtcgctatttcctcgacattagcccgatggattaccctcctctcaatagtcaggttctgcagaagaaagagggttatcgggacattctggaatattatctgctcttcgagttcggtttcaagctgaactggaatcaggtggtcgacgacttccggggctatgagaagaaggtgtatcggctctatgagtactggtgttacttcgagctcctcgatatagtgggagaactcacagatacggagataagatttgacgatctgttcattgaggagaacttgaacatctccctgagggaaggggctatcaaaagattcgacttgaacttgagcgacttgctggacaacgacctgccctcatctgatgatctcgacatccgaatagacttgatgtataacaagaccttcaacaaggatatggccttccattcctacagcgtggccctgaggccagactataccctttcaatcgagtttgggggcaacgcctatcgcatccacttcgatgcaaagtataaactcaacatcaatgacgaatccttcaagaatgacgacattgtcaagatgcactcctataaggatgctattggggatacaatcgccgcctacgtgctataccctggagatagaaaagagatttttctatga

SEQ ID NO: 2281 - DNA, 3537 bp, synthetic construct
  source 1..3537: mol_type = other DNA
atggagaaaactatgaaatctaagctgtttatccttctcatcattatctctattctaataagcattagctcggttagtgccagtgaactccaagctgatgcgtcaaatatcgataatgattatcaaacgaacatggaatttgatcccatctgcaatgatgaatcaaatcagaaccaggatctgaatctgaaaaacaacaatgaacacattctgaaagaagagaacacaaaccccccagaaatcgaggatgaaacgtgcttcaccactctgtatcaggagatcaaccaaagtgatgatgagctaaacctcacccatgactacatcttcaataaaagttatgacaatgcctccttataccagatgtattacggcccattaatttcggtgaataagaccaattttacaatcaacggaaatggccacatcatcgacggtaacgagatgggggcagaatttgattttgaaaacaacaagggagagattgtaattaatgacttgacctttaagaatttcaaccagacagttctgcagatttacggaaagctgaccctgaacaatgtcaactttactgagagctttgaaagccttgagagcattatatttgtgagcaagggcgtcttgaacgtaaataactgtagtttttacagcaaccgcgccaagaatatcatcagtgggtcacagtcgaatatcaccgtcaacaatagcatcttttctgggaatggcaactatgaacgggccatttcagccaacagatggcagctggtcatccacaactcccggtttgagaatttcactttcaagaacggtgcaatcattgatttcaagggatattacctcgacctggagaactcaagtttcaataatatccattccaatctaagtggcggagcgatcctgggaaagtacttccccgcctatatcaaggtggctaataaaacccagtacctgcccagcgaccctatgataatcaagaactgcagatttgaaaacatttcctgcctcaacgacgggggcgcgattcactttgacttcgactcaggaagccagcgcattgcccagagcctcaacattatcgattccaatttcaccaactgcagcagcaaatacggcggggctatctcgattctgggaggaggtttgaatctcgagaagagtaacctgctcaataactacgctagcttcgaggggggtgccatatactcctcatggaccaacattaacattaccgattccagcattaaaaacaataaggccgagaagaacgccggtgcgatatactttgacaagggcaacctgagcatcaaatcctccgatatcatcaataacagcgctctggaggagtccccaactaccgccaatgccatctatgcccacgacgttgcggcggatttcagtgactccacatttgacaatgggggaattgcagtctatgccgactttgcttcgcacagcaacttcaccaacgtcaataagaatgatgacatcttcctcatggacaatcataattacatcgttagtgttgagacccctggaataaaactcaatctgacgaataacgagataattgtggactccctcccatccaagttcaattcacaggattggggctggacaacacccgggaaagtccagggggacaacgacgactgctgggccttcgcaacaatcgcctccattgaaactggcctgggcaaatccacaggtgtgctctacaacctctcacagaactatgtgcagaagcttcagttgaaatactatgaagtgggggatttgcggaacagcctgacgggattcatcaccagcggcctgggctacgccctgagctggtacggggtcttgcctacagatgcagcttatgacgacagggggatgattgcagatagtgatatgaatgtgccgcgcatccacgttcaggatgcaatgttcatatatacaggcgagaacaacacgatcgatcaattgaaaaaagcgatcattaaatacggcgctgtcactgtgcaatactgggcctatcgagaaggtgaggaaatcctgagcgaaggagaggacatttccattatggaacacaacacccatttcatttcactggtgggatgggacgacaactttacgaatgattttggcggcgccccagggtgttggatcaccaaggattccctgttcgggtactcaaatacggagtacatcaacttcgcggacatcgactattttgccattgtgccgctgagggtggcagtggcctatatcttcgagaacgacattgactatcacgtgaactaccagacagaccttacctgcctggcagggtttgaccagaactatacaatctacagcaacgagttcacttcgaagtacgacgagctgataggggctgtgggcacctatttcaatgaatcaggaattaaatactccttcgacatcttcgtaaacgacaagaaggtccaaacccaaaacgggacaagcgaatatgccggatttaggaccatagtgttaaataattacatccccattaagtctggcgaccagttcaaggtggtcttcaagagtaattcggttccttatcaggcctggtctagggtgcactacctaaatggcacatccctggtaagcgctgacggaagcacttggaccgactttgctcccctgaacaagactgtctgtctgaaagtgtacacgctcaacgacactacgaaacttgccgacgccaacgacatgattattgaatacggcgaggattcctatttcagcgtgcgcgctgcaacggagaataacatctctgtaggtcccggggaggaagtcactttcaccatcaacaacaacacaacaacagtgaaaactaacgacgagggtgtggccaaaataaagattagtgaagctccaggtacctacaagatcacaagcagctacaataatcaaagctatgagaacaacatcacaataattagccgggagagaacgagcacaagaatcctgtatcagaacatgagcactgtggctgtcaactccaaggtggatggccgaatcggcaaatactttgaggtaaacctcaccgacgatgaggggcagccgcttaataacatgcccgttcagataggattcaacggggccgtctacaaccgtaccaccaacgctaccggcggtgtgaaacttcagatcaaccttgggtatgagggctcatacaccttcgccatagccttcttgggcgacaataagtacgcaggcagcttcgaggtggcaatcatcaaagtcagcaagcaggctcctaagataaccgctcctgcaaagacctacaaagccagtgcgaagaccaagaccatcactgccactttcctatccgataaaggtcatggggtgaagggcaagaagatcaactttgttataaacggcaagacctacactggcacaacaaacgataagggcgttgctagcgtgaaggtgtctttaaataaaaaaggaacgtacacctgtaccgccaaatttgcaggagatggaatgtacaaggcaacttccactaatttcaaggtgaagatcatctga

SEQ ID NO: 2282 - DNA, 1065 bp, synthetic construct
  source 1..1065: mol_type = other DNA
atgaaaggactcgcaagaatcgagcaagacgtgctgggctgggtggatgccgagctagacgagtgcggcccgtatgatgctatctgcaagccactggctatggccccatgtacctctgacgtccacatagtctgggggcatgcctacatgagcgatgccccgaaccgggtggtgggacacgaagcaacgggggaggtcattaaagtgggggataaggtgaaagacttcaagcctggcgaccgcgtgatcgttcccgcaatcacacccgattggctgactgtgcctgctgagcagggattctcccaacactgttacgggatggggacaggaatgagttttgtgacgtttaagcatggggtctttgcagagcagttccatgtcaatcaggccgacgcgaaccttgctcacttgcccgataatgtgagcctggaacaggcagtcatgatctcagacatgatgactaccggattctacgcggccgagctggccgacattcagtttggggacacagtcgcttgcttcggtataggccctgttggcctgatggcactggccggggcgcaggtgaagggtgcttctcacctcatcgccgttggcagcagaccagccgccatcaaggttgctaaagagtacggtgcacatgatatagttgactaccacaacggcagtacagtggaacagatcatggaattgaccgatggcaaaggcgtagataaggtggtgatcggcggcggcgggaaggataccctctcagaggccctgtccgtgcttaaggtcggtggtgtgatcggaaacgtcctgcactatgacggtattgaaaccatacccgtagacggcctaagctggggccagggacttgccgacaaaaccattcgtggaggcgtatgccctgggggacgcgcccgaatggaaaaactggccaatctcatcgagtatggacggttcgactcgtccaaattgatcactcacaagttcgataagtttgaagacattgaggaggctatgattctcatgagggacaagccaagggacatgatcaagcccgcggtgattttagatgaatga

SEQ ID NO: 2283 - DNA, 1872 bp, synthetic construct
  source 1..1872: mol_type = other DNA
atgatctcgaaactaaagaaaacgataatcagctttataattatgggggtggttagtttcgcggtcactctgctgcccatctctggcggaatgtcaatgttagcccccgatttaggacttatctatgtgctgggccttctcttcggcccgtatggtgctctgggtgtcgccttggctatcgtgacgctgaatctgattaacggcttcacacttatggagacactgccctttgaaattttcacctttggagtcagttatcttggatacaggctctggtactctgggtttaaaaccgataccattaccaagcccaaactagataacagctaccacatctccctctttcttgttagcatcatcatctgtgggtttatctactcgacagtccagggaatctcttttaacctcatattctgggtggacagattctatatcatgatcctcttttacttcatgagctttaccaccatggcctttctctacggcatcatcggcatttggatctgcaaccgatatgattgtttcgagacaccaaaaaagtcaaagcggcatgtggacaagcggatttaccaggcaattttctgcatgatcatcatcacatccattatcctagccacaagcttcattactactgatgacacgacggtgcgcatcatagagttgatagtgttgggtatcttcctatttgcctacctgaccaagccattcgagtatgatataaccccgaacgacaaggacactatcagcggcaggattatgcggaacttcattattatcacgtttatcctgggggtgttgggtatcgcaatttccatgatcagctacagtgcgtacagtcaaagcgataacgtctacttagtcctgatgtgggggccgataattaccgatacggtgctcctcctgttcctcattccctgcatttttatcctgcgttacattgaggacaaggttgtgcagcctatctcaagcttctccaagatcgaggggttcattaaggaaaacgagaagattgatgaagacggcctggttaagacctattccaagtacaccgacgagaagacagagattggaacccttgcccgctcgtacaccgaactgataaagcacaacaacaactatatcgaaaacattcgagaaatcgaaggggaaaaggagagaatcaatgcagaactggacattgccactaagattcaagagagctcccttccagagaatccaataaaaaccaatgactttacagtggagggctactccattcctgcgaaggaggtagggggcgacttctttgattactatatggtggatgatgagaatctggctatcgtcattggtgacgcttcaggaaagggcatccccgcagccatcctgtccatgatcactcagttcatgatcaaaaactttttgaaacagactctcaaccccagtgaggtgttgtactctctgaataaccagctgagtgaaaataaccctgagtgtatgttcatcaccctgtggcttggaatatataatacaaggactaagaaagtaagattcgctaatggcggccacaaccctcccctggtgaaagaagacaagaaattcaagtatttggacattgatacagggctggttctcgggatcactggagacttcgactacatcaacgaagagataatcctcaaggacgagctgatagtatataccgacggaatcacagatgccaccgacgaggactccaatatctacggcgaggaccgcctcctgaaattcttaaatgagtttaaaggcgatgaagtccctataaaaccactcatttcagacgtgaacactttctctaaaggtgtggaacagttcgatgacatgaccctgctgtgcctgaagctgaataaatga

SEQ ID NO: 2284 - DNA, 300 bp, synthetic construct
  source 1..300: mol_type = other DNA
atgaacgtgatcaaaaactacaatggaaaggaactgacaatggccgtagacggccgcatcgataccataagcgccaaggagctggaggaggaaattaatgctgagatgggtaacttcgactcactgatcatggatcttggcgacctcgaatatacgtccagtgccgggctacggattttgattgcaacccagaagaagctgaaaagcgaggacatacccttcgtcatcaggaacgtgaatgatgcggtgaaagagatcttcaagatgtctgggtttattaaaatcctcaacatcgaatga

SEQ ID NO: 2285 - DNA, 8064 bp, synthetic construct
  source 1..8064: mol_type = other DNA
atggacctttttaatctgtcttcggctcagaagatgctactgttctctgagatcaataaccctcagaatgattctttctatctgaaatttcgcaaagattatgatttgggcgattacgagtacgtgaaatcagctatcgaactgatcagccggaaatatttgaacctgcagattaaatatgatgagaatgctgacttcaaacaatattttgtggatgccgacgaagtgaatgtcgacagctttgatttctctggcagtgaccttgatggaatcgatggggatatcgggggcagcggtgtcggttcatttgacggtgatattggtggaagcgatgtctcttcattcgacggagacctggatgagtttataaagaactacctcgacaagccttttgacgatatattcgactctccattatacaaatgggctgtgttaaaaacaagcgattctaccgtactgataggggtggtgcagcatatcttgcttgatggcaccagtttatacagtatcgtccccagcgagattgagagatgcattgactctctgaaaagcaatgaggagtttattcccatcgactatagttacgagacctatgtcaacgacgaactggaatacctcaactcaagccagagccaggaggataagcaatattggctggatagtctaaagggctatagtcaggactggtactcctttgacgactctgagctgggcttctacgagattcttctcgagaaggtgccggacttcggctacagcccattcgtcactgcactggccctgagctttttatatttcagcaagagcaaggagggcaacgagagttttaaggacatggtgtttaacacgagcgtgcacggacggtacttctcccaaggggatgccttgggaatgtttgtgaacacaattcctttaaggctaagctacgatggggatatgacctttgacgagctcctggcctactcgaaatccgtccttaaggagggcctgggccatgccaagctccagttcagcgagtataccacggacctgagaaatgagggcattgaccctgactgcattagtatgtttagcatcgtatccaactccactgacatgaactctaagtttttaaccctgcaaaaggacattaagttcccattgcactttaggataaacaagaattactctgataagaagggactccagtcaatcttcatagagtatgataaggcctgcttccacaagagggaaatagcgtccattgcggaggggctgaaataccttatcagacagctgatcgacgactctgcgaaaagatgtgccgattacatcgtccacgaggccgaatttttcaagggagaaaactactacaacaacctgatcaacagttttgacaacccgacagcaatctcccccgatttaagtggcgacaaggtgcgttttgtcaacatatccaagcatatagacattgacaagctcaagaacttatctaaccggtatcatctctctaaggaaaagctgctcctggcgatcttcctttacgacctgagcaaattcagtttttcaaaggatatactcatagcctataaccgggttgcagctggatatcacttcaacacagatctgaccgtggaagagtacttgaatgacttcaagcagtccttcgaggaatacaataactatcctctgttaaataatagaaaactgaactttgaaagcgaaatactgttcttcatcaatgactacgacgcgaaagactataaacttgtgtttaattttgagagcggaaagatcaacataagctatgacgagagcttctattcaaaggagctgatggaagctttcctggacagtatggacgtgctattgggtagatttgactccagcgatgagcccctcaaggagatttcaatacgtcgggagctcgaactggacgaggggttcgagatcgagcttgcaaacgaaggtacagtgaaggaaatgttcgagaatatcgctagtgaaaatccggataagacaatcctgtactgtgaggacggccagctcacatacgacgaacttaaccgcaaagccaataggattgccaatggcctgctcaagcggggagtgaagattgaagacaaaataatgtttatgatgagacgcaacagtgacttgattgcagctgttctcggaatagttaaggcaggagccgccttcattccgattgaccccaattatcctaaaaaccgaatccagcagattttagatgatagtgattcgaagttcgtgattacctcctccgaaatagactatgatggggataatcgcattgacgtggacgaattgctgttggatggcgattactcaaacgaggacaacgtggattcgaatcccgatgtggatctcaccccagatgattcgaatccaaaacttgatgctgactctaatccaaaacttgatgcggattctaacccaaaactagacgccgatagcaatcccaaactcgacgccgactctaatccaaaagttgacctgaccccagataatctgtgcttcctgatttatactagcggaagtactggaaagcccaaaggagtgatgataacccaccgtgggatcactaactacatcgcaaatgttaaggagaacgttcctatctacgagttgaaccacaaatgcagcggctttgtgtccatcagtaccgtgagttttatcgttttcctaagggagatcttgggaacggtcctcaacggactgcctgtggtgtttgccaatgacgagcaggccgtggacccactggagtttgctgaacttttcaacaacagcgacgctgacgccttcggttcaacacctaccagactgcttgagtacctgcagctcgaagagattcaggacctggtgggaaaatgcaaagtcataatcgttggaggggaaggattcccgcctgtgctgtacgaccgacttcggaagcacacagacgccgacatctataattcatatggcccaactgaagtgaccatcgctagccactacaagctgatcgattccaatgaggtgacggcaggttgggagatgctcaatgtggtggataagatcatggatattgatgggaaccagctccccccctacgtcactggtgagatctatgtgggaggtgctgggattgccaggggatacctgaacaatcccgagcagacggaaaaggtcttcctgacactcaacgatattccctactacaacactggggacctcggtaaaaaggatgcaaatggcgaactgtacgtggccggccggaacgatacgcaaatcaagctgagagggctcaggatagagctgtctgaaatcgaaggggccattgcaaattacgagaatgtgtccctttccaaggtcctggtgaagaagcttaataatgtggagcatctatgcgcctatttcacggcctcctctgagatcggcctcggagacctgaagcagcacctgattgactcactccccgaatatatggtgccatcctatttcactcagcttgagagcttccccaagacacccaacggaaagacagacttcaagaacctgccggaccctgagatcgatgcggatgaatttatcagccctcgcaccgaccttgaaaaagagctctttgacattgtatctgatatccttgggatggatgagtttggggtgaacacggatctctttagcattgggctcactagcctgtcggtgattaagctgacctccgccatctacaataagctgaatgcacagatgaacgttactgagatattgaaatacaagacaattgaacgaatcgccagcgagatcaagattgaagatgacgagtctcgcgacattatggagctgtatccattgacgagtaatcagcttggagtctactttgactgcatcaaggatctggagaacactgcctacaaccttcccaagaaaatcgaatttactgaaggaattgatgtggaccgcctcaagagctcaatcataaaggctattgataaccacccatacttgaagacccgaattgtaatgaacaacggtgaagtctatcagcaacggcgcgacgagctgaaagttgatgatctgatcgagattagcgatgatgagaacctcgatgacttcgtaaaacccttcaagctggatgaggggccgcttttcagattcaagatcgttggcgactcaatactcctggccgacttccaccacatcattctggacggaacgtccctcaacatcctgtttgacgaaattgccaagatatatgacgggaaggattatgagctggaggagctggacggattcgaatactcattggacgaggtgaaggtggagcaatccagcctgtacaaagaagcggagctcttctttgcagataagattaaggaatttgataatgccagcctgatcccacaggacatcaacggcgacgagtcaaaaggcaaagcggcaatctgtgacgtattcctggaaaaggacagtatcgacgatttctgttcgaaaaagaacatcagccagaacaacctattcctggcagccacatcctttgtaatcaacaagttcgtattcaaccgggacacgctgattgcaacaatcaccaatggcaggttcaatccaaatcagcagaagactttggccatgatggtgaagaccctgcccttggcgctgaaactcaattccgactccaccctgaaggactacatcgaatatgtcaacctggagtggctgaatgtattgtcctattccagttatcccttaaccgaaatctcgaatgagttcgatatcacccctgagatattctatgcttatcacggtaagatcatagaggagattgagatcggcggaatgactgttgagaggcaatccatcgattatgagggcctgaaattcaaggtcaacatcaacgtcgtggaggaggacggccaataccgcattttctgccagtacaatgaccagctatacagcgaaaccttaatcgacaccttcctcgactgcatcaggatcgtcctggacaaattccagcgctttgatgagaataccctcatgaaggacatttcaatcattgaaaatgatgattggagcgtggacgacttggaatatgatgagattcccgaggacaggctaaacaaaatattcgaaagtcaggttgagttgcaccccgaccgggtgatcttatacgccaccgatggggaatttacgtatcgccaattgaatgaaaaggccaacaggattgcacatagcctcatcaaaaaaggcgtcggccctgaagatagggtgatgtttatcctgaatagaaacagcaatgtggtagcgtcaatattcggtatcctcaaagcagggggggccttcatccccgtggattccgaatacccctccgaaaggattgagcacgtcctgacagacagccagtcaaaattcatcattgtggatgatgtgattcggaagaagggcattgacctctcagactacagcgagaacctcttggatgtgaacgagctcctctctgaggaggacacctcgaatcctgaccccgatgtccatgggaataacatggcttacctgatctacacctccggttccacagggctgccaaaaggtgtgatccttgagcatggcaacatcgctaactttgtctaccctgatccacgtaatgtctgtacatatgaactggtgcacaacctggaaaaagaggactataaggtgctgagcacaacaactgtggcttttgacgtgttccagcaagagattatgggctccctgttaaacggggttcctatggtatttgccaatgacacagagtacaaagaccccatcgaaatgatggacctaatccaccgcaccggagctaacgtgtacattgcaaccccctcacgactgctccagtacctggaaatcgaggcgatgcaggagaccatgtatggctttaaggtgtatatccacgcaggagagccattctcggccagactctacgacctgctgtcccaaaactccaagggtaagttctttaacatgtacgggccgaccgaaacaacagtttactgtaacggacagctgcttgaaagcagtgacatccacattggaaaggagctcttcaacgtccatgagatggtgatggacttcgactccaatcctctgcctcccaatgtcatcggcgaactgtacattggcggcaagggcgtgagcagggaatatctaaaccgtccggagaaaaacgccgagtcctatgaggtgatcaacggcatccggttctatcattccggggactttgtccgcgtcactgaggaggggaactattacgtctttgggagaatggacaatcagatcaagctgagaggcttgcggatcgaaatcggcgagattgaagttggcctgtcaaaattccccggcatcaagtctgtggctgttgtggtccgcaagattaagggcaacgatcatctctgcgcctactttaccgtccacgacgagtataaggatgaaaagcggggggaaaacggatattccatcgacatcgacgatctgaaagcctcccttgctgaaaaactggtgtactacatggttccgaccgtctatatggagctcgaggagatgcctcagactgccaatggcaagacagacctgcgcaacctgcccgagcccgtcctaatcaccgaatacgtggctcctgaaaacgacattgaagctttctttgccaacttgttcggtgaaatcctggggctcgatgaggtcagcgccacggataacttctttgagattggtgggacatccctcttagttactaaaatcaccatggaagccttgaaccgaaactacaacctaagctacggggacgtgttcagtaatccgactccacgcgcactgtctgagctgatcctatcagatgagaccgcggagaaaaaaagcgagctctcttacgactactccgaaatcaatgcgctgcttaagaagaacaatctggaaaacatcataaacggcgagattcaggagagcttaggcaatacattgcttaccggggccaccggctttctcggcatacacgtccttcgagagctgatcgaaaatgacatcggagacatttactgtttcatacgagccaacaaggtcttgagcggcgaggagagattgaaaagcctgctattctactacttctctgatgaatactccgacatattctcggaacgactccacgtcatcgaaggggacatcaccagtttcgatgactttgagaagctggtgcatgagcggattgacactgtaatcaactgtgcagctaacgtgaagcacttctcctctggcaccgatattgaggacatcaaccttggaggggttatcaacggcctcaagttcgctaaaatgaaaaacgccaaatatgttcaggtatcgacatacagtattgccggtgaaagcataaacaattaccctccagtggatgttaagtttagcgagaatgacctcttcatcggtcaggcggtggacaatcagtaccttaactccaaattcctggcagaacgggccgtcctggaggctgccgtcaacgatgacttggatgttaaaatcatgagggtgggcaacctgatggcacggagtagtgacagcgagttccagatcaactttgagtcaaacggcttcatcaatcgtctgaaggcctttgtgactattggcaaaatgccatactcaatgcttatgaacaatgtggaatttagtccgattgacatgaccgccaaatccattgtagctctctcaaaaacgcctaaggaatgtactgtgttccatccatacgatcatcatagcgtgtgctttggtgacatcattgaaattatcaaacctctgggcttggacatcgaacccgctgaggaggaggattacgaaaaggccctggatgaggctctggctgataaggacaagcaagacggtgtttcgggactgatcacgtccatcgggtctgggaaggtgaagaaaatctgggtccccgttgaaaatgtatacactattcaggcattgtatagactgggcattaaatggcctttcgtgtcggaggagtacatatataattttgtaaaatacctgaatgacctcgacttctttagtgtttga

SEQ ID NO: 2286 - DNA, 1461 bp, synthetic construct
  source 1..1461: mol_type = other DNA
atgtacgaaaggaattataaactgttgcgggcaaaattctctgaatttttccttcccacattatttacctccatggcaggtaacatctgcctcttcgttgacggtttgattgtcagttttctgatcggcgccagtaaccttgctcccatccagattgtagctcccgtgatcacatttgtcaacctgatctattggatgatcggtctgggcggaagcgtcctctgtagcgtagcaaaggccgagtttgatgacgagaaaagcaatagctacttttccgtgagcatcatctccctcatctccatcggggtactgattacggttataggactcttgttttctggtagcattgcccagttcctctgctcgtcacagcctgagttggtgtcacaagtgtcccagtacttcattgccttggtgattggcatgccattcctctgttacatgatgagcctctcttatttcatacgagcggatggcatcccccagctgccattccgcgccatcctgatagcaaacattgtcaatatctgctttgacattatttacattaagtttttcaaccttggcctaaccggggcggcgctggccaccagcaccgggtatctggtgggttccatcctcatcagctactacttcttcaaaaaggaacgtaccctggaatttataaagctcaaagctaacgctttctttaaattcatcaaaaagatagttacttcaggattcagctcggcgagcactcagctctatctgactctgaagttacttgtcataaactttttagttggcctgtacgtgggcaagtcgggggttgtcgccttcggcatttgctacaacagtctgttcatcctatacatattcctgattggaactgcccagacaatgtctccgatcgtctctgtgtactttaaggaggaggactacagcggggtggactatattatcaagcggtccctaaagatcgtggtcgcttcaagtctggctctgtctgtgctgttcatcttctatcctcaggccctgcttttcttgtatagtgtgaaagacccggccgatgtgcctgtagtgctgaatgccctgcgcatttttgccattagttacgtgggcacagctattacattcctctataccttctacgcccaggcaatccaaaagaacagactgtccaccatcatttcactgctggagggctttctcctgccaatttcagccgcagtcatcttgagtttcgccatcgggggcaatggaatctggatttcctttgcaatagctgagctactgacgatacttttcatcttcgcttacagcagaaacatcaataagaagacaaatggggaatacacgggatttttcatcaacaagcacaacgacgatgagcgggtgtttgaatataccatcaatggaaacatcgaggaggccgtgaatctccttcagaggaagtcccaaaaattaccctatctggggtga

SEQ ID NO: 2287 - DNA, 237 bp, synthetic construct
  source 1..237: mol_type = other DNA
atgctggtaaacatcattaacatcaatgacgtcgtcgacacgattgatatcatcgtgaggaagaatgttgacaatatactcatttccgtgaaggacaccggggttgatttcaaccccgtggtggaaaacgaggagctgaaatttgacaatataagcgtgctcaacaaaatcgccgataagattgattacagccgggtcctaggcctgaacagtacagtgatcaccatcaagaactga

SEQ ID NO: 2288 - DNA, 1062 bp, synthetic construct
  source 1..1062: mol_type = other DNA
atgttcaacaactacaaagacaaactgaccggagatcggaagatcctcattctgtttgtaattttggccatctttaacatagccttgtacatcaacatattcaagtacatggtggacatcaaggacattaacatggcggtgatccatgactttgtgacgatcaactgcgccatcattatcctcggattcactagcaccaggctccccaacctgaaaaagcgggacagttccatttatgagatcagttaccttatcatcataggcctattaagcataaccatttcattcttcaacaagtccatcaatggggaaagcctgtgggctccctatttggaaatgttccggatcttatctgtcgtcctgattctgacattcctcgccactaaaaccaaaagcttcaaggccgtggtaaggggtgaccgctcccgaaagacaatcatctcgcagattatcctctgttcagtgctgggtatccttgcaagttatttcacaatggacatcaacggcctgccagccaatgcacgtgcactggttgtgatgatatccggactgctgggagggccatatattgggatacctgtgggcattatctctggcgtctggagatactcaatgggaggtcctacggctctggcttgcgccattgctacaattctggccggtatcactgggagcatcatccacagatggaatgggaatgaatttatttccccagtgaaggcggggcttctgatgtttttctacagcggctttgagatgtttctgctgaccattctgaccccccgccccacgggcctcatcgtggcgagcaatctttatggcccgatgacatttgccgcagtcctgggaatcctacttttcagcctcttcttggatgagaaaaaggagaaggctgagaccgatactgatgacggcgatgaagataagaagattgagctcatgtcggaggagttggaagaatacaagataaaggccaaccaaaccgagggggagctcaaagagtacaaagacaaggttgaaaagctagaacaggagctgaatgagatcaaaggcaaaatttga

SEQ ID NO: 2289 - DNA, 2919 bp, synthetic construct
  source 1..2919: mol_type = other DNA
atggataaaaagatctttatagtgagctttattctgctcgctattttcaccattggggctgtgggcgccagcgatgtgtcagagctgacagcaaatgatctggacgacaacgctctgagtctcaatgacggtgaagatttgctggctggggacgagtctggtgaatccggcaaagaatcttactttaataatgataataactacaacgatgaaaaccgggtaaatgcgaacaatttggattatggggctggggacaatgacgcctctaaagacaaagtcctctccgacaacgtgtccgattacatctacgccacgaccctcagcgtttctgtcgatgacactccccaaagccagtatcccaccgccactgtcagcctgaatgatttgagtggcaaccccgttgccgaggccagcgtgtccgtcagtgtcgacggtgacgattatatgacggttatcaccacaaccgatgggacatgcccgctctccctggacaactatctgtctgtaggcagtcacaaggttggggcagagtactccggcgacgggacttatggaccctcaagcgcttccaccacattcaatgttctggaggaatattcctcttacctaaacaccgacttgttcatatatacaggcacgggcagggaagggggctacacttctgtgacagggaagctgactcatatcaatcagcctatctccaatgccaccatttccctctacgtcgacgatgacttctactcgaacctgaccacggacaagcaaggcgagatcgaggggatgctgttcaacataagcgttggccgtcacgagcttcgcggagagtacgtgggtgatcgaggattcgaaccctcaaacgccaccaaatacttcaatgtcctgcctaaggactcagtgtccagcaatatccagatgacactgaatgcctctgatgctcaggtgggtacccaggcgaatgcatacgtcttactggagcggcagtacggtggcccgatggaggatgccaccatttccatcagcgtggacgacgtgttttatatgaacgtgaccacgaacgccctcgggtacgccttctttgatttgtcggacgacttgtctgtgggcagccacaagctttccggagagtatcccggcaacgagtacacaggcagttcaagcgctagtatcactttcaatatccttcccgtggacgattccagctacaacttcactgtgaccgaatatgcaaattacctcgacactaataccaccgtgcttgatatttcctcaaaatactacgtcaacggtagctttaacgtgtcagtggtctctccaaacggaacgctgtccactttcacccaggactgcagtcccgacggccataacaactggtcaatggccgactttgggatcgacggcattggaagctacatcatttccggatcgttaatctttaagaacgagacactgacccactttgacaatcagaccttccatgccatctgcatcaggccgatatacatggaaagcactgaagccaacaatccgttggatatcctggtggtgtacaactccagcgacgcaaccaaggtctcggtgaacggctccggcctatttgaaggacgaaaaatcacggatggtcccatcgtgtggaacctgacagacctcaacatcaccgagcttggtgactacaacatcagcgttatgtcctatgacagcaaaggcaacctcattgaccgcttcgactacaacctgaccatcggccccaatggggacgactataaactctatgccaagatagatccaaactcttacagtacggacgatgtggccgtagccctgtattgtccaaatgcatcatggggtaatgacatagaggtgcacatttacatgggcaaccctctggaagttctcaccttcttcccagatagcgtgagtcctacagaggccgcgtcattcaagaaatacacacttgccgatttgagaatcgagaacagcaacgattatagagtggagattaaggacttcgcgctcaaccagttcccagggatcagtttcaacatcaaagtctgttacagcaatatgattctcgtcagcggaaacggaagctttgagattgacttcgatggtgcgtcagtcaacgcaaccctaacagacagtaatggaaaccctatttcaaacgctagcgtttcagctcttgtgaatggggtagagtctaactgcactaccgatgataacgggaatctaataattccatttgaaggcaacacaactgtgaaactgacctatatcgataacaatggagtggaaattaaaggcaccgggaagtatgtcaaggaatcggtgattaagaatagaactgagaccaagattatctatcaaaacatgacaaccactacagtcaattccaacgtggacggacgcataggcaagtactttgaggtaagtctgcaggacgccgacgggaacccaattgcaaacaagacggtattcataggattcaacggaaaggtctacaaccggaccactaactctacagggggcgtgagcttacagatcaacctgggatacgcgggaaaatatacctttgccattgccttcctgggagatgatgattatatgggctcctttgaggtggctctgatcacggtaaacaagcagacgcctaagatcaccgccagttctaaggcatacaggcctaattccaaggctaagtctcttgttgctacactgaagtcggccaagggcaatgcaatcagcggcaagaagataagctttaccatcaatggaaagacctactcaacaactacaaatgcaaaagggctcgctacactgaatgtttcgttaagtaaaaaaggtacttactcctgtactgcgaaatatgccggcgacggtatgtataaggcaacaagtacgaagtttagtgtgaaaatcgcttga

SEQ ID NO: 2290 - DNA, 1464 bp, synthetic construct
  source 1..1464: mol_type = other DNA
atgacggtaaaagtcttcatcagcagtaatcaaaatgaatttttcgaagagaggaagctcatcaaaaaggagctcgaatctgactccatgttcaaaaactatgtggatgtgtttgtgtttgaagaaaatgaggcccgctccctgtcgccacaggaaaatttcatcgagggactgtacaattccgacgtctacatcggtcttatcggctcatcgtatggcgatataaaggacaatggactgtcctctacagagtacgaatatgagattttcagccgccttaagaacaagcagaacatctacttctttataaaggactccaacgagagagaggataaggctctggatttcattgagagaatcaagagcgatacaagcttcaaaattttccacaacactgtggagctcatcgaggagatcaaacggagcctcaaggcacatataaaccagagtctaagcaaccaggagtttgacttccaactgctggcagagagcagttgcgacgatgtaagcaaggaggctctggacctccttttcgactccattgattaccagcccatactggacttgctcggtaatcgggatatggagagcattctggagatcctgagcctgggaaagaaagatctgtcagggacattccggttaaacaatgccggtgccctctttctagccgagaacattgagaagtttaacattgagcacgaagtgaagctggtgcgattcaaagggaataccaagctcgaaatgattgacaaatgctacaccaccagtcctttctttatccttttaaaggagtttgaacacttctattggaaaaacatcaaggtgggctctgtcattaacggcctccggcgtgtaaacattccagaatatcccttcaatgccatcagggaggccatgatcaacgcgctggcccatcgggactacagcttcaagggcagtttcatccagttttacatctatgacgataggatcgagataattagtcctggaaaccttttgtacccattaaaggttagcaatctgaagaacattgaagtccccgtgcaccgaaataagaatatttgcaatttgttctccaagaccatttttatggagcacgttggctctggaatccagcgcatgtgtgacgagatgcgcaagtcaggcttgagggagcctgaatttataaacggcgaggggttctttaaggtcatcttttgggggcccaacggaaaactgatctacccggaagaggctgtggacaacaacgttctggacctaactaaagtggggttgaatgataggcagataagagcactgtcaagaatcgtgaatgaaaaagtcaaatattcctacgaaagatactctaacgagtttgacgtgtcgaagtcaacgtctaaacgagatctgaacgacctggcgaagaaagggctcgttatcgaaaacaaatccaatcgccggaactactatttcgtggaatga

SEQ ID NO: 2291 - DNA, 528 bp, synthetic construct
  source 1..528: mol_type = other DNA
atgattgacgagtccatcctcaatctctttaaagacgagaaaatcaggtccatttgggacgacaagacaggagattactactattcaatcgtagacctgatcagcatcattaccgaaagcaaaaacccggataaatactggtcagatctgaagagaaagatgaaaaaggatgaatacaacctactgaataagtatatcgtccagatggaaatgccctcctctaacggcaagatgcggttgactgacgccggggacattgagacggtgctgcgaataatacaagcagtcccatcgcccaacgcggagccttataaggagtggcttgcccaggtggccaacgagtgcctggaagagtacattaatccagaactggctatcgaaatggccataggggcttaccgcaaaaagggctatagcgaggagtggatcagtcgcaagctcttcagcatggagatcaggaacggacttaagaaggagggcttcaaagaaaagaccaatcgggagcacgtgttagatagtctggcatga

SEQ ID NO: 2292 - DNA, 1230 bp, synthetic construct
  source 1..1230: mol_type = other DNA
atggtgaaaagagaactgtatatgaataaaatcaacagcttcattgataaggatctgatcaaaataataaccggagtgcgcagaagcggcaagtcttactttttcaagctgatcatcaacgaactaaaggagcgcggagtggctgaggaaaacatccttttgatagattttgaacttccccagtaccggcacatcaagacaagtgaggagttagacgagattgtgctggatttcatcgatagccaccctgaaaaaacatacctcttttttgatgagatccagaacgtttccgagtgggagctgtccgtcaactcatactacaaactttccaaaagcgatatttacatcaccggttccaattttaagctgctgtccaaagagctggccagctttttgacggggcggtatgtgtcaatcaacatgtatcctttcagcttcaatgaatttatcgactataagaaggagatcgggtctctgcccatcaacagcaatgagttaaataccgagcttgagaattacttcgacgagtatttccgctacggcgggtttcccaccgcgatttcttcgaatgaccataaggagatcattctgaacgacttgtattcaagtattatcctgaatgacatcgtcacaagatatgagatcagaaacgtaggcctattcagtcgaatcatcaagttcctcattgaaaacgtagggaatctcatatcggccaactccctctacaactacctccgcggacaaggtatggagattaccaagccaactatctacaattacctcaattacctcgagagtgccaacatactatcaaaaatcacgagggaggacctggtcggcaagcgggaaattaacggttctgagaagtattatctgatcgaccagggattctaccgatcccagctggagatcaagcaagagaacactggccgcatcatcgaaaatattgtgtacttggagctgcttaggcgggggtacacaatcactattggctgtattggaaaactcgaagttgacttcgtctgcaaaaggaacaacgagcggatatacattcaggtggcatattatctgagcagtgatgaaaccattgaaagggaatttgaaccattgaggagaatatcagacaactacccgaaatatgtgctgtccatggataagacggaccagagccgtgaaggcattaagcacctcaacataattcagttcctgcgatctagcgaagacatctga

SEQ ID NO: 2293 - DNA, 6606 bp, synthetic construct
  source 1..6606: mol_type = other DNA
atgatgaaaatgacgaaaaagaacctgtttctgatcagtctgatcctactaatcatccttacaattggtgctgtcagcgcagccgacgacctgtctgcaagctccgatctgacagtggaagacagcggagaagccatagcgacggcccccgaagagtctgttctgatcaatgagaataatggagactcgatcgccgacaaggggttgagtgatcctatctcaaatgaaacagcgaacatcgcaatagatgagaagactacaaatgacaaagctatttcggaggaggataattccatctactctaaagacaaggctaatgtgctgcgggaaaatgagacacctgttattctgactataaatgccccaaatatctactacggggagaccgccaacgtgaccgtttctgcaaggtacggggctgggcctctcgccaacagtagcattaatcttgctctggatggcgcagccggggaaaacattttaattttcgacgacgggatcgcgcaaaagaattacacggggctggctgcaggcaaccatgctgtggtggcatccttcagcggatatgggccctatccttcggcaagtgcttcaaaaagctttgaagtgctcaccccgacagtcaatatagagatagaagcgaacgacatctattatggggaacgcgcctatgtcacgctgcatgtgacctatggcaaccagccctttgccaataatactatccaggtatctcttgacggccaaagcagtacaagttttatcgtagaggatgacggcaatattcaagtgacctactccaacttggccctcggcagtcacaccgttagcgcctacttcagcggatacgggccctatccatctgcaagcgcttcaaaagacttcaaggtgtcaaaaaaggagaccgctgtatcactcagcgtgtccaacccccagcttgataagggtgatgagctgcggttcacgcccagcgtcatctcaaacggattttacgtgatggctaactcctactccattatggtggacggcatgagcaattactcttattggacggagaacggcacctacttcctgtcaacttcctcgctgagtagtggcaatcacacgttgaccgtaagttatgcgggggacgcgagtttcttgccctcatctgcaaacgccaccttcacagtcaattcttacaaggccacgctctcactcatgatgatcgaaacagagctgtatccgggggatgattgttacattttcatcgacctctatgacagcaacactcatcagtccatcgccgctaacattacagtcagcgtgggcaacaactcttatctgtatcctattcgagtgaatagtagctttaaccttcctaccgataatctggctccgggagtgtacaatgtcactgccttctttgacgggaacgggctctacgaccctgagactgccgtgggaaccttgactgttctgtcgaagaaggagacgactctgtcactcagcatctccaatcccgttttgagtattggggatgagctgcggttcatccctagtttaacgggcgatgggtcgtacatttggggggcttcctatacaattaaggttgacggcatgggcaatcagacgtgtaggctggtgaacgacacgtacttccttagtacgtccgattttgcgattggaaaccatgccttgactgtcagttacgcgggcaacggggagtacatgccatcctcggcaaccgggtatttcgaggtgactccaaaaaaggccaacctctccctgaacatgctctcaacagagctgtaccccggtgacgactgctacctgtacatttatctcaccgacagcaatacgcaccagtcaattgccgcgaatattacaatcagcgtgggcaacaattcgtatccgtacccaattcgagagaatagcagctttaaccttcctactgacaatctggctcctggcgtgtacaatgtcaccgcattctatcccggaaacgatctatacggtccagaaacggccgtggaaaccctgacagttatggaggaaaacgccacaatcaaaacagaaacctatctaagcataattatggcttctggagataaatatctgggcgacaacataccattcagtgtgagccgcactccatctggcgtttcactctttggcgacaattacatctttagcatcgacggcgttgagtctcaggatatcttctatgagaatttctcctacttcatcgtcacggagaacctgtcccttggaaaccacaaccttacagcatattacccaggagacgagatgtacttgccttcctctgccagtcagaacttcacactgatctctaggcccaaatccgatgtcctcttaagcatagaggccaatgacacgttcattggagaggacgcgactattatcatcaatatgatcgacgagctcggcaatcccattgacggagccaacgtttacctgtacatggataataaggagtttgcgcttccgctggtaaacggggtcgctcagttctcctactccaatttatcactgggcacatacctcgtgagcgcactgtttaacggaacggaatactacaacccggcaaacgcttccgcaagctttgaggtcctcaacgccaacctaactgtgaccaaggataacttcttccagttcttcaataataacggagtactcaatacaaacgcaactgacttaaaattcgtgggggagtttaatgatctgggcattacaagcataaaaatcaacaagccagtgtccatcgtgggtgaaaatgccaatataatcaacattccagtgattgtctcctccgacgacgtctccctcgccaacattgcctttgcctacaacgggagcgagcccataatctatgcaaacaatgtggctaacctagagatcataaacaatgccttctcctataaatccccttcagacaagagctatgccgtgaacattacaaagtcggagaacgtgacaatcatcgacaattcctttaatgtagtgggtggaaacaacacctatggtatcaatatagacgccatcggctttgaaatcgattccaacgatatctacgtggaatccacagagtactatgccagcgcaatcaacatcaacggtccaagctcaggaaatgtgctgaacaacaccattaacgcatacgcgcctatgatggtctatgccatcaatacagacccatctagcggaaccctggaaacaagctacagagacaatgtgattgagggagaatcctacttcgccatcggtatttacgacgatagcgaaacaatcaccgggaacgagatcaaactgactgctaactatgcaatcggaattgtggccctctctgagtcgaacattgaagacaataaaatcaagttagatgccacaaacgtcggggacgaggacgtggaagatgatgaagtggacgtgcagacggccgggattgtcatcaagaacaacgtgcaggtcacaggcaacaatatcgatagcagcgacgcctccattgcagtggtctcaggaagctccaccatcaacaataacgcactgaacgggcacgtgaccgtgggcggcgacagcagcgacaataacatcgtcaacaacatcatcaacacagaatcagaatacgcagttgagttgaccacaacaaccggcaacactgtatacaacaacgagatccacgcagctgacaccgtcggtaacgatgctgtcaacgctgagaatatcggtgcaaacacggtggaggagaacaacgattgggtgaacatcaccaacctcatcttgacagtgaatgacgattcaaccgaagtcaccgccaacttgactgacatatggggcaatcccataagcggcatcatcaatgtgtcactaaacggggccgatccagccgaatgcacagtcaacgagaccggattgtatgtgatcccaatcacccagaactcaaccgtttacgcttcctatataaacgtagacggcagtctgtcctttgataagataaaagtaatcgtctttaacttccccgtggaggttctccccaatgctaccattgccttgaccgacctcgacggcaccgtcgtggcgaatgtgaccgacctggaggggaacgccatcgctaacaaattgctggcagtgaccgttaatgatattccggtgcttggggcccagaccgacgacgagggtatttattcgattgatgtagtaggcaatgccactgtggtggtcagttacatcgatgctaacggcattaccgttagcagttcaatccaaataattaacaatgtggagaccgaaaccggaaccataatcattcgacccaatgccactattgccctgactaatgtggatggcactgttgtggctaacgtgacggaccttgatggcaacgcgctggccaacaagctcctcacggtcactgttaatggtgcctctaagcttggagctaaaacagacgaaaatgggatttattctatcgatgttgacggcaatgccacggtggtggtgagttacactgatgccaacggcatcactgttaccagctccatcaatgtggttgtgaacacagtaacagagaccgagaccctgcggcccaatgccaccattggtctggaacgcgacggcaacgtggtcatcatcaccctggttgactctgatgacaacccgatctcgggtgccgatgtggtggtttacgtaaacgatatcgaaaccctggtcgatcccaccgacagtgagggtaaaaccaacgtgtccttcgaaggaaacgctaccattgaggttatctacctcgacgataatctgatagcggtgagcagctccatcgagattatcaacaataccgaggtcgagatcgagagtgaaacgttacgccctaacgtgaccattgggttggaacgcgacggaaacgtggtcatcattactttggttgatagcgacgataatcccatctctggggcggatgtggtggtttacgtgaacgacatcgagactctggtcgatcctaccgatagtgagggtaaaaccaacgtctccttcgaaggaaacgctaccattgaggtgatttatcttgatgataatctgatagccgtgtctagctccatcgagattattaacgacactgttgaaggcgagaccattattatcaaccccgacgctaccatcaagctgcatcacgtggataataaggtcatcgtgaatctgacggaccttgaaggtcaccctttagcggataaggtgatctacgtatacgtgaattacgaagagatagagggtgccaagactgacgagaatggtctatactctgttgatatcgaaggcaacacatctgtgattgtcacctatgtcgaccccgtgggcagaagggttaccagctccattgacgtggtggtgaataccgaaacggagaccgagactgtggtgatccggcccaatgcgaccattgcactgaccaatgtggacggcactgtggtggctaatgtgactgatcttgagggcaacgctatagctaataaactcctgactgtgactgtgaacggtgctcccaagctgggggcgcagacagacgagaacggcatttattctgttgacgtagatggcaatgccactgtggtggtcagttgcaccgatgacaacggcatcacggtcaccagttcgattatagtcgtcaacagcactgagatcgtggaagttgaaaagatagtgaaccaaacagtggaagtggaaaagatcgtctacgtaaaccagactgtcgaggtgcctgttgaggtagaaaagatcgtgtatgtaaaccagacaaacaataacactattgaggtcgagaagatcgtctatgtaaaccagaccgtcgaggtgccggttgaagtcgagaagattatctacatcaacaatactgtcgaggtgcctgtagaggttgagaagattgtctacgtgaatgaaaccgacaacagcaccattggaaccgaaaagattgtctatatcaaccagaccgtggaaaagatagtgtacgtgaatcaaacagtgcccatcattccaaatagaaccgccacgaatatcatatgtgacaacatgactaccgaggcagtggccacagttgacggaagaataggtaaatactttgaagtgactctggtggacgctgatggcaacccactggtcaacaagccagtcgccatcggattttcaggcaagatctataaccgtataacaaacgagacagggggcgtaaagctacagatcaacctcgggtacaaagggtcatacaccttcgccatagccttcctgggcgatgacgactacaacgggtcctttgccgtggcaaacgtgaaggtcacggaccagaatgccaaactgacagccagtggaaaggcctataaggctagcgctaagactaaagccgtatctgctaccttcaagtccgcaaatggcaatgcaatcagcggcaagaagatcagcttcactgtcaatggaaaaacctattccgcgaccacaaacgataagggcgtcgccaaggtcaatgtttcactcaacaaaaaaggaacttacacctgcacagccaaatttacaggaaacggaatgtataagacaacaagcaccagtttcaaagtcaaaatcttttga

SEQ ID NO: 2294 - DNA, 9162 bp, synthetic construct
  source 1..9162: mol_type = other DNA
atggtgatcatgaacaacaaaaagctttttatcgttagtctgatcatcctaacgatcctgacaataggcgccgtcagtgccgctgacgacggcctggccacctcagatgagataacagtggacgactcgtcagtcgccgtttccacggcctccgcagagtcagatatctatgagactaacggcgatatcgtggccgactatcaaagtgatagcatctccaacgtaactgtggatgatgacaacactaaagacgagatcattcgctcttctcccgctaaggacaaccttctgcttgacgacgacgacgatcccggtgccgtgaatgatgatgacgaaggggacgacgatgaagactaccttgatgacatctcagtgagcatcacaaatgagtacgacgtgaccgatcaggatgcggtgatagtttccatattcgttcccgacgtggaggagggagaggatggcattgaaggatacttcgtcgtttgtcttgacgacgacgacgagatattcctggggcctttcaaccacacaatcactcctgatgactacgggaccgatgtgacctttactgcttctgatttggagatcacagaagcggcgaattactgggtgcgggtgttctatgtgagcgatctggctgagcccctgatcgataatgatgaggaggacgggtacaatatgatcttcgatggggactgcattgcacgggactacactcagttttatgtgatcgtcccccccgacggcagaatcagcatcttcgacactagtgccatctacaccgtgtactgccccccaggcagtgaaggcacagtcaccttgactctaagggatgaggaggatgtggagacgtccttcacccaggagatcgaggatgcggatgatgagaaccagttatactgggatttagactatatgggactcaacaccatcgatgccgccggcaactacgaggtgacaatcaccctggaaaatggcactctcatctgtgaggacgatatacgcattatggaccccatcgagattcccgaagtctcttacatcaacagcacagactatgaccatgcaacgctggtcgccctcattaagatcccatccgagttggacgatgatctggaagaactcattgatggaacagtcattatccagattgacgatgagacagtcttcgaaaagacactcagcgagttcgtcgagggcgaaagccctgacgacccattttgggtttacccaaaaattcactggagtgacgaactcgacacttcagtgaaattatactacgtcctcaacaaccaactcgatatcgatttagagcccggaacatatgatgtgacagtcaagctggacctggacggatgggatgaggtctcaagtactgaagaggtgcgcttggtcgagagcaatgtagtcatcgacgaggacatcggcgcaagcattgaaatcttcgaccaggaggatatcctcaatgacaatgaggtgagaatcatcgctatcactgtaaccggcgataagagtggacgagttaatctcgccgtggaaggatgtcccgagtgggagtgtccactcgacgaactggagaacgagggcgacatctactacattaactccggctttgatattgaaagcggtgaacatgaggttgtcgtctcctatgtcctcaacgatgatcgatcggtttcaaacagcgctatcctgaactttatcgtctatccaaggattttcatttgcggaaatggcggggaagacatcgtgaactacttcgccgacgaggacagtgcaattcacatatatcctaagggagacgacgtctccaccataaggatcgtggtaacaattggcgacgaagttgtgctagattccaccatagatgatttgggcctcagccccaagatcaacgattggggagaaacctattacacagtagggcccgccaacttcaacaaaaagctggagtttggccattacgagccagtggtggcgtactactattccgatgcatatgagttgagcactgaggatggggaattgtcattcatcgacattatcggaatggtccacgtagccgacattgaagacgatgaaacgccagtactggccgtttgctcggaccgggacgggcagattggagtgtacatccgccaatacactgaagatggcgaccaggagttagagccaaaatactttgaggtggaaaaacacggcttcataatgccgaccattgaccaactgggcctggatgagggccaataccacatcgatgttgcatatgccgacgacgaatggatcttcggcaacgacctgatcgtggtcaacagttccgaatactttgtgctctacggctgtgactggctctacactgaagagagtgtagtctatgtatggtgcccggacgatgcggaaggaatcattagcctcactaacaacgatggcacaatcaacgtcgaccatgaaattacagatgaggataagggcaaatatgtcgagttcacccttgaggaactcggcataagcggccctggctggtatgagatcagcgtaagggtgaacggcaatgaaatcgatcacattggattcgatgtgccaagcccgatctacatgcctaattataatgtgtatctgccagaggagggatacgaacctgactattccatgatcattgccaaacttgagctcaactccgagctggaaggcaacattaccattaacctcgatgggaccatcgtcttcaacaaggacattgaggatatggaagctattaaagacggctccaaatggatctacaccatctacacgtctgatctcgatgaggcagaagaaggaatgcatgacgtgacggtcaccttcaacgatctgaacgaagaacggtccatagaatttctgaatcggaccaccgaaagcgatgggaacttaagcatcatcatgctggggggcacctactgcattaactggaatgacgtgattgccgaggtcatcgccccaaccaactacaacggcagactcgtcctacgacttcaaggtgagatcatgcagtcttgggacgaactgcactgggtcaactgggacaactacaatgacacgcacaatatctattacatttacgtagacaacttagataagatgtgcatcgagaatccaggagaatacactgtgtcgctcgagtactactcagacagggaggacgagaatccatccctgcagaacagcgaggaatatagatttgtgagagatgaggagccgtccggtgactttgaatgggaggtctatcactgggcagactatgaagacgaaaacagcctgctcgttacagtccgctacaacgataacatcgtggacggccgaatagaaatcaacattgaagatccaaacggcatcacgctgacagattcaagggacgtcggcgaaggatatgaggacacttggctggtgtcagacttgggcatccaggaatatggagtttacaccataagcgcaaagcacattctcggggacgacgaggagatcatattcgagaatgaacccgtgtatgtaacgaaaattcagattcgcggtgaggaggaagtttatgtagacgacccattgttcgtactggccatttatcatgccggcgatcgaacaacagtatatctcaatggcgcaggaattgagggcagacggctgcccaacggggggcctctggtgtggtacctctctgatttgtatatcaatgaacccggggagtatgactgcaccattcaactgtttgatgaggatgacaatctgtttgcacagaccgaatactacctgaatgtgatcgagggggacgacggctatcggctgattaaaaaccttgattgggactacttcacgtccagcacccctgttgctgcattgtactgccccgaggggtctgtgggagacatttcaattgacatctacgctccagacgacaacgacgatgattaccgcagccgtgatatagtaaatacaatactagactccattggctctgaggacgttgggggcttcaagatatggacgctcggcgacttgggaattaacgaaggtggctggaactatgggtttgtccttaatgacgctgatggggacaccattaccgacgagaatggggagaactgtgagtttggcttcggggcagtgctctaccatggaatcggcattgccatatgggatcagaatcccgtggccttggataacgagtggctggtggacatctactctcctctcgacaatgacggggacgtaattctgatgattggcgacgaggtctacttctccgacacgctgcagaacctggcgatgtatcagtatgacgaagacatagagcagggctgtgcccacttccactttggggcaaacagcttcaaccgcacaattgaaacaggccactacgaggaggtcatagtctactacgatggatttgacgggtatagtacagactccaccgctttcgattgtccaactgtcctcgactttggcaagcccatgaactttgactggtctgtcaaaggcgcttactacgagtattatgacaacaacgtgatcaacgtgtggtacaatgaggagataaatggcgggcaaataaaaatcattgcaagagccgaaaatggcactgagtacgagtctgtgaaagattataatgacaatcgcaacaacgagtggaccatcaccgactttggcataagcgagatcggaaaatacaacctgaccttgatatacattaatgagggcgatgaggagattgtccgtgacgataaggtgctgcaggtgctaaccttcgaccctcgcttcgccaactgggtaacggtggaccacccatatgacgtccttgcaatctaccaggcgacagaggagatcagggtctatgtgaacggcgaaggcccatatgagggtattaaaatgcctaacgatggtccgctgtcctgggatcttgaggcgctgggaatcagcgctgcaggtgagtacgagattcttgtggagtcctatgacggagaaggcaatctcctcagcagctttgaagacgtcctgtacgtcagtgacgagatgaatcctaacgaatacagggtggagtatgccaatgactgggacttctactctctggacagtcccgtattcggactgtactgtcccgaagggagcgaaggccccatcacaatcgaagtctatgggccggatgataacgacgccctgctgaacacaatcaatgacaatatcgagtctggagatattggcaccatcaagagctggaccgtcggggagttgatcacgaacttaaatggctgggactaccggtttgtgatctccgatgcaaatggcatcattaagaacggaaatgacgaggatatcggagaatttaacagaggaatcaacttccacgactcgatagactatataagtattaacgaatggtcttacctggacgacgaatggttcatcgacatctttgcatacacgggaaatgacggagatgtggccgtggagtttgacggtgcaacggtatataatggcagattgagcgatctgctgttcttccagtcagatgaagacatgcagaggggcattgcccattaccacatccccgtgtcatatctctctaatgaaggaaatccaattgaggccggcctgtacctgaacataatcgttaagtattatggtgacgacggctataacaccacaggctatacactgcagtcatacatcgacgagaatggtttcgattgggccaatgtgaggttaagcgtgggggacgatccgaatacaatcatcctcacactgaccaactcccattgggagcccctggcagataaggaggtatacatctcggtgaacggcggagaacgccaatggggattaacggacgagtacggtatcgccattttcacaatagacgggggaaactgcaccgttcgtggagagtatgagaatgccgagaatcagtggtccgcctatgagatgacgctatgcgtatttggggagcctatatatccaaacgcgacaattagactggaatttgttgacggggaggttattgtgaccctaactgacggcgatggggccccgctggctaataaggggctggggctagctatcgatgggatcgtcgttattggccccagcactgacgactatgggatttaccggatggggatagaaggcaatgccaccgtggaaatcagctaccaggatgaaaacggaattgtggtctcaagttccattacgatcgtcaacaacaccgagactgaaactgtgtacgtgggccccaacgccacaatccggcttgagatcgttgatgacaatgttatcgccagcctttccgatggagacggcgcccccatagctaacgagtttattgacgtctcggttaatggggtgcccgttaacggggcaatgaccaatgccagcggtctttattccatcagcgtggagggcaatgccactgtggaggtcagctacactgatgataatgggatcaccgtgtcaagctcaattaggatcatcaacaacattgagactgtgccggagccggtgaacgtgctgcccaacgccaccatcggtttgtcaaaagacggggatagtgtggtgattagtctgaaagatggttctggggctgccattgctggggcttccgtgaacgtgtcggtgaacggtggagatgtcacgctggtggggcccacggacgctgacggtaaggccagtgttgaaatcagtggtaatgctaccgtggtggcctcgtacgtggacaataacggtataacggtgtccagttctattgtgatcaactctgagactgtgcccgagcctgttaacgttctgcctaatgcgactatcagtctttcaaaagagggtaactccgttgtgatcagtttgaaggatggttctggggctgctatcgtgggtgcttccgtgaacgtgtcgctgaacggtggagatgtcaccctggttggtcctacggatgcggacggtaagacgagtgtggagatcagtggtaatgccaccgtggtggcctcgtacgtggataataatggcataactgtgtccagttctatcataatcaccaataatacagagattgtggtgattgaaaagtctcataccgccgatgctctgttcaacgtgattatccaggaggacaaactcggggtgtggctatacaacaacaatgaggaagagctggcaaataagaacatcacagttgtgtttgacgatgatgaagagggacagaactacctgactgatgggcaggggtatacatcgattcctatcggcgatcatagcattataaaactgtcatacacggatgaagatggcgctagcgttttctacacagtgcacctgtttgagaccggcgaggtggtcgacgccgattatgtcgtcatctacatcacccccctggacgatagctcactggaagtgagtgtctctgtcaatggggaagaccttgaggaaggtgaaatcacatattacctgggtgaagatgccgaaggaattaccgttgacctagaggatggggtctatgtcattaactacgacaacaccgtcaatcagacaattgctgtggaatacattgatgacgatgacgtgagttggtatgcctactatgaggtggtcgtatacaacaacaccgtcactgaaaccgtgtacctcagcccgaacgcgaccatcagcttgtcgaagtctgggaacgatgtgctggtgagcctgactgacaatgacggtaaagccattgccaatgccgacttggatgtgttagtgaatggtgccaagtccactgctaagaccaacgcaaaaggtgaggctaccattgctattaatgggaatgccacggtggtggtgagctataaggacgctaataatatcactgtgacaagttcgatcactgtcgtgaacgagactgaaacagttgtgattgagaagaacaacaccattatcgagtatgtgaaccaaaccgtgcctcctaacgctaccgtgtccctatccctcgtggatggaaaggtggttgcggaagtaactgatggcgacggtgttcccttggctaacaagctgctggcggtaaccgttaacggcgctcctaaacttggggctgagaccgacgccaacggaatctactccatcccggtggaaggcaatgcaactgtggttgtgtcctgcactgacaataatggggtgaccgtctcaagctccatcaccgtccttaacaacagcgagactgtggtagttgaaaagaacaacacaatagtggaatacgtaaaccagaccgtatacgtgcctgtggtgtccaactcaagctttgacattgttggggacgagaatggaatcagcgccatcctgcttgacgaagacggcaagcctattagcggggctgtggtggaacttgatgtcaacggagccaagtccaacataacgagtgataagaacggtgagatcgtgattccaacagataagaatggaaccataaccatgacctataccgacgagaacggcgctaagctgatctacacaaccaaggtgattactcagacagagatcatctaccagaaccagaccatagaggtccctgtgtatatcaatgtaactcctaaccgggcctcaacaaaggtcatctacaacaatatgagcacaacctcagtcaattccaacgttgacggacggatcggagaatactttaaggttcagctggttgactccaatgggaaggcactggctaataagacggtctacatcggcttcaacggccgagtttatgtgcgtcagaccaatgagaccggcggagcccagctccagatcaacctcgggtaccagggagattacacatttgcgatagcattccttggagacgatgactataatggatcgtttgaggtggccataattaaggtgagcaagcaaagcgcgaagctcaccaccgcggccaaaacatataagacaagcgccaagaccaaagcattgagctctacattcaagtctgctaaaggtaatgcaatcagcggcaagaaaatctccttcacagtcaatggaaaaacctacactggaaccaccgactcaaaaggtgttgcgaccgtcaaggtgtctctgtccaagaaaggcacttactccttcactgcaaaattcgccggggatggaatgtacaaggaaactagtgtgagcagcaagctcacgttgaaatga

SEQ ID NO: 2295 - DNA, 849 bp, synthetic construct
  source 1..849: mol_type = other DNA
ctgaggaacattttcaatgagggtgaactggacaaggactcagtttgtgccaaaattgcacacactgccagtgacgggaaaatctataaaaccaacttctacaatctcgacgccatgattagcgtggggtatagagtaaattcgatcaaggcgacacggtttaggcagtggtccacctcagtgctgaaggaatacatggtgaagggctacgtcttggacgatgtgctgctgaaaaacggcacgcgctttggcaaggactactttgatgagctccttgaaaagatccgcgaaataagggccagcgaaagacgagcataccagaaggtgaccgacatcttctcccagtgcagctatgattacaatcccaaatccgaggttgcccgggagttttacgctaagatccaaaacaagcttaacttcgccatcaccggacacactgccgcagagatcatcagtgagcgagcagacagtgagaaagagcatatgggactaaagacatggaaaaactccccagatggaaagattctgaagtctgatatatcaattgccaagaactacctctccgaggatgagataaaaagcttgaaccgcctggtcaatatgtatttggactacgccgaaaaccaggcttatatgcacaagctcatggggatggatgactgggcgttaaagctggacagcttcctggagtttaatgatttcgaggtgctcgataacaagggccatattagcatgaatgaggctcaaaagatcgctgacgctgaatttgataagttcagagtcaaacaggataagttctatcagagcgacttcgacaaactgctagaagacgtgaaacggcttaaatga

SEQ ID NO: 2296 - DNA, 3561 bp, synthetic construct
  source 1..3561: mol_type = other DNA
atgaagtttaataaaaataggggcatatccgccatatcaattattctgattctatttttaagtatctctatggcctccgctatagagataagtgcagatgatgccgacatggacagcggagacctttccgtgtgtgaggtcagcacatcggactgctacggcgagactctaatcagcgccgacgcatccggtgcagattcaagtgacgaaattatcatcaacgagacaattgcagatgaaaagacagactatcgcagctcaatcctggccgatggtgagaagaagaacctccacgttgaagtctctaacgacgttttcacacctgataacgactacgagttcatgctctatgatgaggactttaatcagatcggagggtatttggatatctacctcaacgatgaactcacctactctgacttcaccgttgacagtagtgagagtagctccattagcctgagtggtctcgagtgcggattgaataagataactttcatctatgacgaagacgacgtgtataaccgcctcaaccagacaaaggagttttacatttacggagaaaaccccgaatttgtcatgatccctcattacgataccattacactcaatggcaattactcctctcgggtgtatctgaaggagtacgatgaatggggctactacgatgaggacaacgagggcgatattgaacccatcgatgataaattcaatgtgtacatctataaagaaaatcccggggatgagtacgaactggtgtgggaagatgagttcgaggccaacggaaccatcaatttcgacgatgccatcaaaaccacgggaaactatctgatccgatacgtctttaatggaagctccgactatagctacgctccatacaactcatcgaacattataagatgtgtcaatgtcataaccgactttatcattaatgatacctactttatcccggacaaggggttcgggttctcagtgtatctggtggataatgccaccggcgacataatagataaagagtttaagctcatggtttattatattcttgacacctcaaaccccgtgcggatcgttgaggaggaaatggtgaagggaaacaaaacctacacatttgactgcagcgagatccccgagaatattacgtacttgttcatcggatgtatttttgacggggacagggatgagtattcctctgccgacaaggagtatgctctggagctgaccgacagtagaatagaaacttcgattaacgccaacatcggtgactctgtcatcggaaactcaagcagtttccgcgtatacgtccaggatgaggagaactgggggcagatcgatgcaacgctggacatttatctgaatgaagaatattcccagactgttaccgcatacgcctacctggagaacgaggtgctgatcgagaatcttaaaaagggtgagaataccctcagaatagtatacaacgggactgacatctaccaaaattcagaaaagtcgtataacttcacagtatctgacaagagagccaacattgaagtggacgtgagcaacatcatcgtgggcgacgtgacaaagatcactgtgaatctgacggacgaggatggcaatattctcaataaggaatttaacgtctctatctataagggcggctcttattacgatgaagacagtgaattaatatactcccaagtgtatacgggatctgccaacatctcacttccagaccttgagattgatgattactacgtgagggcagaatttgtggatgaaagctttgtctactctcaggccgaagacagcgagtacttcaatgtttactctaagggcagctacatagacctggggaagacttattggcctgacaacgatgacgtggtgctgaacatcagccttaggaattatattgaagagaatattaatggagaagtcctgttccagttcaatggcactgactacccattgacctgcacggaggacggggcaatcttgaacctgggcaagctgcccgtgggcaaataccagatcttcgctaaatttgatggtgacggcgaatatgaggcgtccaacttaaccgatcagttaaggatcgttaaagcaacaatcatcaatgtggaagcttgtgacgtcctgaaaggccaatctgagactgtaaacatcacattcactgacggcgacggcaatccattggatgtcaaaatgcttgatattaacatctgggacacggatggtaactggctggactacggacagttgcgtaattccattgaaattaagaatattcaaaccgattatattatccgggccatgttgagtgatagttatggggagatcgggtattccgactattacccttcaagcgcatacggattcatccgcgtcctaaacggaaccgacccgaccgtaatcacagtgacaaacactgctaacattgatctcgcgatcgatggccccaaagtgattatcacccttacagatgaggacggcaaggccatttccggtgcgaaactgaatgccgctgttgggaacatggagtctatcctaaccaccgacagcaaaggccaggccgtgctggctatcggggcaaacgacaccgcgaaagtgacttataccgacgagaatggtgccggtgtgagtgcctccattgtaaacaatgtgatcaacacgacagtgactgagatcgtggagaagaacataactgttcctgtaaccgcaaacgccaccatcgacctcgcgattgacggctccgacgtagtcgtgagcctgaacgacctggatggtaatgcaatcgcttccgctagcctggacgctactgtcggcacaactaactcgaccctgaccactgatgacaaagggcaggctaaggtggcaatcggcgtgaacgaaaccgctaaagtgacttacacggacgagaacggggcgagtgtgagcgcgtccattgtgaacaacgtgatcaacagcacagttgtgatcaacaacacagttaagcggaacgccactaagatcatttacaataacatgagcaccgtctcggtcaattctgaggttgatggacgaataggcgaatactttaatgtgacgctggtggactccgacggcaacgccctcgccaataagaccgtatacattggattcaatgggcgagtctacgtccggcagacaaacgagacaggcggggcccagctacagatcaacctcgggtatcaaggagattacacatttgctatagccttcctgggtgacgatgactacaacggctcattcgaggtggccatcattaaggtgagcaagcagagcgggaagctgaccagcagcccaaaaacctataaggctaaggcgaagacgaaaaccgtttcagccacattcacttcctcgtacggaaatcccatcccgggcaagaagattagtttcatcgtcaacgggaaaacctactcagctaacaccaacgataagggggtggctacagtcaaggtgtccctctccaagaaaggcacgtatacctgcaatatcaaattcgccggaaatggtatgtacaccgagtccatcgccaaatctaagataacgattaaatga

SEQ ID NO: 2297 - DNA, 1461 bp, synthetic construct
  source 1..1461: mol_type = other DNA
atggagtataaaaagatgcttgccgaaattgatttcagcaaggacctgatcggtttctttgaagacaagaacctgtgcatcattaatgagagcctgctggatggtaccttcggcctttcaagggacattctcttcgataaacgtattctcttcaacaatgatagcctcatcgatagtttcctcctgaacgctaaggcctataacctgaataacgaatttttcatcttactcagcaacatcatcagaaatgactttcaggaggccatctccaacaaatcgaataatgagattctggacttcgaagagactctggagaaagagagcccattctactctggaatacctgtctccaaagaaatgtttgtcggtcggaaggatagcatacataagatcctccgaaacttcccacacatctttaagggacagacccggcacttctttctgaccggggaccgcagaatggggaagacatcccttattgatttcattggcgaatacatgaagtcatacggggtggtaagtgtgtatatctccaataagggcaacgacagcgtggagtttctggcttacgagatcgtcgaagggctgattgatgaactgaccctccctgacgaatcccttaaaacaaagatcgtggacttcttccaggatcacgtggaaagtgtggagtttaaaggcactaagataaagctcacggtagataaaaatctaagcgtctctttcaaagaggatttcattaaccacctgaagagcatctatgatgagtttggaatggacaaaaaagggatcttgatcgttgtggacgacattaatggcctctcaaattcagaggagttcgtgcactggtacaaacgcatggcggacacaatacaggtgtctcatataaacctgccggtgtattttttacttgctgggtaccccgagaagttttacaacctgaccaggctggacgagtcctttggcagcatttttgcctacgacaacttggaccgcttgtccaacatggaagttctggaatttttcgaaagttcttttggcgagaagtccatgcttatcgacaaggacgccttattctacatgattctgttctctcaagggcagcccttgatgatgcaggagctaggcgaatcagtattttgggagtgccccaatggccatattgataaatacatcgcaatccggggaatcataaatgcggccaacgtgctggccagcaggcagatcaaatatactttgaacatcctaagtgaagatgacaaggcaattttcaagtcgctgatcagcgacggaaagttctttttcaactcctcggacatctgtgatgagggattcttggagtctatgttcgacctcagtctgatcgaggtttccaagaaggaggattatgacttttgcttcaagaacacgctcgtctttatctacttctgggtcgaagcaatacaaggtctgattgagaaatga

SEQ ID NO: 2298 - DNA, 609 bp, synthetic construct
  source 1..609: mol_type = other DNA
atggaaactaaaaacctcatcataatctgtgtgactttaattattcttgtctgcctgggcttgttcctcatctcccatatgaacggtcaggaggaaacccacatcaccatcctcacatcgcagtaccttaccgaaggggacacactgaaattgaagctatgcgataaggatggcaagggcatagccgatcagaagattagcctgaagatccaatcaaaggacgggaacttcaatgacgacatcgtcattaaaactgacgagaatggtgagtcccagattcagaacctgcagcggggcaattacacgctcatagctaaatacgacggcacaagccaatatgaaggctacggcctgacctacgaatttatcgtaagcccaaaggaggtggagcagagttctaaaaccacgagcaccaccacaacggccacatccaacaatggagattacgcgagtgactataaggcagatgatgtgatcgatgggtgggacccctcagaacacgaggtttcccgcgagtatctgggagagggggagtatagggtcaactacgacgatggatactctagagtgattgacagtgacgggaacgtgctgagctatggatactga

SEQ ID NO: 2299 - DNA, 2523 bp, synthetic construct
  source 1..2523: mol_type = other DNA
atggcaatggtatctgcctcagatatcagtgccgacgacagcgtgtctttagatgcagctgacagtgacatcgtaagcacggattccataagtgtggactcggtgaacacatattctgccgactcagccatttcgtccaacgaagacaaagacaactatcacccctccaatctaaaggatgacgacaacaagattagcaaaatcaactacgaactgaatgacaccgtcttctacggagatgatgtcatcataaacgctaatcttaccgacatggacggcaacatcatcgatgagttcttccaggtgacagtttacgatgaaggcaacccactgcagtcaaacagcctgaaaggcaaggggaccatgattgtgcctacagtgtcactcaccgagagcagttattacgatgttgccctaagttttgcaggcaatgaggagtacgcttcctgcaacgagttcacaagcttcaacgtgacttttaaggaaaattcatatcttgccatttctaattacgattcatattctaaaataaattcaactaaaatcaacttcatcatctatgacgtggacgacgaatacatcaacgacacagcggacatctacctgaatggtgaatattatacaagcgtcctgaccaatggaaatgagaacgaagtgaccattgagaacctccaagtgggggagaatactgtgctggtgaaatataacggctcgaacatctataagggcagtgaggactctgccaccataatggggtatgaaaaggatacctccattggcatcgacgctccagatgtccttattggaaacgatgcacggataaagattaacctcacggacgaggacggcaatattgtgaatggccgcgtggatgtggagatctacgaatactacactggggacgacgagagctacgtaccatttaaagacgattacgtcgtgaatggagaggcaataattgttatttaccagtccaaactccgggctggcgtgacatacttcatcagggctgactacgaaggaaatctgacttacttccgtagtgttggcagcgactacttcgattgttttaacagaagcactgaaatcgtgatcgacggcagaatcgcctctgatgataaggatatcacgttggagattgggctgtttgaccagcgccaggtgatgattgcagggttggtcaatctcactgttttcgacaatgagtccaatgtggtcattgacacaatttctgttgaaacaagcgccgatgactacgtcaatgtgacaatcggcaaactgccctacggccattacatgatcaacgcaagctttgaagggaatgaagagtatgagggctgcgaattggaggctaatctgcacgtctttaaggcaaccaacctcaccattgaggtgcgagaccagatcaaaggggaatcccaaatcgtcaacttctcgctggtctcatctgacggcggtctgaatgaaagcgccagtctgatcataagaaacatggaaaacgacttgatttacgacgggattatcaacttcacagatggtaaggcctcctataacttggacaaccttgaggaggggctgattatcctggccgattataacaacggaatggacctcgtgggtccctttgaaacagtctacgacagtgcgtccaaattcgccactgtgaggatcatcaaacagctcaacggcaccatcgagtttgagccggtcaatgattccatcattgtaaacctgaaggacatcgatggaaatcccatcgccgaggctccacttagtgtggatgtcaacggacaagtgtttgagttaattaccgatgataacgggcaggcaatgctcgacaacatccccaacaatgtcaccatcgaggtgaaatacacggacaaccaggggctagtggccagcaacaagattgttgtccttgtgaaggaacagatcaagcaacgcgccgcaagcaagatcgtgtgcaagaacatgagcactgtagctgtggcgacgcctgacggccgggtcggtgagtatttcaatgtcaccctcaccgacgctgatggtaatcctctggtcaacaagacggttatgattggattcaacggaagggtatacacccggacaaccaacgagacgggagaggttaacttgcagatcaacctgggttataagggatcatatacctttgcgatgtgcttcctgggggatgaggattataatgcttcctacgaggtgtgtgtgattaaggtgtcatctcaccagccgaaactgaccgggagcgccaagacctacaaggtgtctgccaagactaaagcgataagcgccacattcaagacatctaatggcaatgtgataagcggcaagtcgttagttttcatcatagacggcaagctgtacaatgccaagaccaactccaaaggagttgctactgtgaatgtgtccatctccaaaaaaggtacttattcctgtaccgtacgatccagtgatgatggaatgtacgccgcgaccagcacgaagtttaacgtaaagatagtttga

SEQ ID NO: 2300 - DNA, 840 bp, synthetic construct
  source 1..840: mol_type = other DNA
gtgttcatactgaagtttgagatcaaaagaagtctgatattcatcagtatactcgccatactcatcctgtctattggaatggcatccgcctctgaagaaatttcggattctgtgtcaacggacatcgccagcgaggacgtgacaagcgagattcagacagataacgtcgagattactaatctagatgaggactcgagcttggatgatgcggaccttgagaaggatacaggcgacaaggtcaaaaaggccaagaagaggattaacactaaaatcatctaccagaacatgagtaccaccgccgtggtgaatgagtacgacggccgaaccggggaatacttcaatgtaacactcgtggatgaagacgacaagccagtcgtgggcgaattgattcagatcggattcaacgggcgcatctataatcggaccacggattcaaacggtggagcccagctgcaaatcaacctggcttattcagggccgtacacctttgccatctgctacctgggcgaagacacctatgagtcctcctttgaggtggcagtcatcaacgtggctgctaaaaagatgaccctgactgtgccctccaaaagctataaggcgtctgccaaaaccaaaacactgacggctaccctcaaggacaataagggcaacttaattaaaagcaagcagatcagcttcactgttaacgggaagacatacagtgcaaagaccgactccaaaggcgtagccacggtgaaagtcagcctttccacaaaaaagacttacagcttcacagcaaagtttgctggagacaagtcattcggggcggttaccaagactggtaaggttaccatcaaatga

SEQ ID NO: 2301 - DNA, 14478 bp, synthetic construct
  source 1..14478: mol_type = other DNA
atgcaggcaattattccagtgaaggacaattttctaattttagtgaccaatatgaagaaaagtgattttaagcggatattcatatgtctggttctgctgacttgcttgattggtgcagtcagcgcggccgaggacgtgtccgtcgacgatgtgagcacagatgccgtagcagttgacacaatcaccgaggatgccagtgaccctacagacataagtacggtcagcgagccagtctccaatgatgtgcaggccaacacaagccaggagctaaacaaagagcccgctaccaagtcgaccaatgtcttgaaggacggcacatccacgaacatttacgtggcgactaccggtagcgatgaaaacgacgggctgacgcagtctaccgccgttgctagtctcgctaaagccgtggagatcgtgaatgctaccgctggtacagattttaccatcaatgtggcaaacggtgactataacattagcaaaatcgaaagtccggccgctaagaacgtcaatcttattggtgaaagcaaggagggagcgattctgcacgcctctgatacatatggtatcaacgtttacgaggacaacattgcatggacgatcgaaaacctgactatctgcgatttcaatagtaccacctcgacaagtgcggctgtgcggtgctttgcgatcgacagtgtgttcaatatcaacaactgcatattcaaaaatatcgggtctaagaacggggctatttacataacgtccactggcacaaggacaatctccaatgttcttatcgaggactgtttcggtacttactcaagttcatcttccatcatccacctgtatggcgagggtccagtgacgttggataatattgaaatacgcggctcctatatggacccctctgtgggtacagccacatatctgaggtctgttatctatgccgaccaggcccagaccaatgtgactcttaagaatagtcgaattgttgacaacatcggggctatgggttcactgatcgaggcgaaaggagcatttaaggtcatcaacaccacttttgaagggaattatctcaatacttcgtctaatggtgtaaatggggggacgttcatgttctatagtggaaccagctccaactctgcctccaacattgacattagccagtcagttattaaggacaatgtccttgcggggggaagcatcggcctcttcaattgcgtctatggtacgcacaacattgaccacaatgtgatcatgaacaacaaatacgccaatggaaacgacgtgccacttgggagcttcagcggcgctgccatcagcacggacgacaactactggggaaccaacgagaggcctaacaccaaaacaaccgaatgggtgatcctgacggtagatacccctgaaatggcatttgtgggcgtgtcagaagccattcccgtgaaccttaacacctataaaaccaccaacaatgagacaggggccgtggagggcatgcctgatgttgactttggcgtgacatatgctcttaatcaggccaatccatccactgtaaccgtggccaatgggcagggaaccattaactaccttgccactgttgatggaaacgaaacactgaccttttccacgggagacgccttctcctttgatgtgaaggcggatatcgccagtctgatctacgtcgacggcctaaacggcaacgctacaggtcccggggacagtgaacacccgtataagaccatagcacaagcaatcaatgtggctgccgatggaaagatcatcgtgatcaaatcaggcacttacacagagaactccctgataattgcaaataacattacgttgaaggctgataagaacgccgaggtgatcattgacgccaacaacgaaggacgaatattcactgtgcagaaggacgcgatcatccgcgacctgaccttaatcaatggaaagtccaccggcaatggaggcgccatctctctggatagcggcctgctgacgttaaacaatgtgaaaatctacaactccaccgcccagagcggcggcgccattgttagtttgtccgggtctcaattatcagtgtccaattctgagttcattgacaataatgccagcaatggcggggcgatatatgtcgccggcgtggctgatattacaaacaataagtttatctccaatgatcctgaagacggcggggccatatacgtcgcaggcgtggctgacattgaatccaacgagtttacctccaaccacgccacaaatgggggagcaatctacatcgacagtgagaacaatcaaacgatcaaggataacacattcacttccaacaccgccgataagggagaggccatttatattaagaacgcgaatgtgagcctgtctggaaacacaatgggggagaatgattcaatatatctcgatggggcaagccttaaaaccactctgaccttcctgggcggaaagaccattgctgccgagtttggacagactctcaatctcacagctaccctgaccgacgaggatggaaacaatataaggggcggaatcgtcacattcaccgccaacggggaaaccattgcgacgattgacctgtccaccgacgctcagctcaaaacccagtataccgtgcctaatgatgccgccggggacataacaatttccggttcatacagtctggacaacggcggcgctgtcatatccgggaagatacacccggccgtgcctcattggttcattgaagggggaagcggatacgagacactggcggacgccattgatggtgccagcgctggagacattatctactacgaccttccagaggactacaccgaagtgattagcagcaagaccatcaacaaggcactcaccatcaagaacaatgggaccggtgtcgtgacgttagatgggaatctcgataggatactgagcatcagctctgcttcagtcaatttggaaaacctgattttcattaacggggccacggccactaacggcggccttatctatctgtccggttcagcatctaatgacctgaatataagtggctgtacatttaaggattctaaatttaccactacaagtacttacacatatgctgtcgccatttacgctaatggcggcaacatcaacatcaaggacagtgagtttcgaaacttgacggcccccaaaaccggaatgatctatcaatcttccagttcaggggccatcactatagagaactctctattcgacaacattacaggcgcctatgatggaggccttatcaactcaaatggtgatgtatccctagtgaaaaccaacgtgaccaacattttcgggtccacgtcgaccagtgactatgggctgatttacattaggtcctatggaggctttctgttcatctctgagtgtcagtttataaatataagtaatgcgggggcccatccggtctattaccggggcagcggcggttataacattacccagtccctgtttatgaacattaactcaaacaagataatagacgccagtgctaaaggttacgtgaattacaatatatttgccaacaattccaataattatgttctttatggaagttcctcttcgaaaatttcggccgattataatttctttggaagcaacagcaagcccacaagttatgtaagcaacgttaattacacttactggaccattgtcgagttgtcctctgcaagcgacacagcatacgtgggaaatcccacagacattgctatacagtttgttggaaccgacggcagcgagaacctgactctggagggcataatgcctgagtacacattcactctgaatgttacaaacggaactatcgtgcctaacactgtaactctggaagataacgaggccaatgcagagtttacccccacaagcgtgggaaaggtgaacattacagccactccaggcccggcccagttgacccttaatgtaatcgacccatccatactgctcgtggtgtccaccgatgggtcggacaccaatccagggactttgaacagtccatacaagaccattgcacatgccttgactcaggcgaacgccacacgaaacgtcatttatctcctgtcaagtgatgatgcttacgccgaacatggcctgacagtttcagacaatataactatccgagctgaagacaataccgtgaccattgatggcggccaggagggacctatcttcacggtcacaggcaccctcagcatagaggacatcatcctgagcaatgctaaggttgatgaagataatggcattgggggcgccatctatctcaatggcggtaatctcactgtcaatggcgtggtgttctctgactgtattgccgcttacgggggtgccattgctacaactgcagggtcaaatttgaccgtgatcaactcggttttcagtgataacaaggctaaatatggtggagccatctatgtggctggtgaagctaacatctcaaatagcgaatttagcgacaataataatgagattacgtatggcggggccatctatgtaaacggtactggccccgtggtgatctcggcaaacgagtttgataacaataaggccaacaagggcgaggccatctacattgaaaacggtgcggtgaatgtctctgagaacacaatccctgccaacgagacaatttatcttgcaggaggcagcataaactcggtgctcatattccttgctaatggcaccataagtgcagagtttgaggaagaggtgaacctgacggcgaccctcactgacgatcagggcaatgccattaagggaggtatcgttacattcactgccaacggcgaaaccattgcaaccgttgacctctccactgacgctcagctggagacccagtacaccgtgcctaacgatgctacgggcgacattctcatttccggttcatactctctggataatggtggagtggtggccacagggattgtgcaccctgccgtgccccactggttcattgaaggcggcagcggatatgagaccctggcggaggccgtggatgctgccagtgccggagatgtaatctacggtgatgctggaacttacgatgtaagtgatctgataattaacaaggccgtgaccattaaagcaaacgagtcagggtcgatcgtcttaaatgggaatgggaaccagatattcaatacccgggctaatgtcattttggacaatttgacattcatcaatggttcagcctcctccaacggtggatttatctatgtctacagcgactccctggtaatcaacaattcagtcttcaaggacttgaaggcgaccggaggactaggctctgcaatctatgttgctacgggaagctcgaacatcacaattgaaaactccgccttcgacaatattaaggcagctacgggtctcatcaactgccgctccaaaacaacaacatttacgctcgtcaaaaccaatttcacgaatattgatgtcagcactaatggcctgttctatctgtacgagggcggactgcgggcctacgagtctcaattcataaatgtgtccgggggagacggcgccgtagtttacttctatgggcaaagtgataatatcgtgaccaagtgtctattcgacaatgttacaaccacaaaaaccactggcatcatttattccaacagtaagagcgccaatatcacgtataatgctttcttgaatgtcaattatggggtgtactcctcgtcatcctatggggaagtcattactgccgattacaactattggggaagcaatgacaagccgggcacaagcctggtcaattcaaacagcaagttgaataactgggtggtcatgactgtgagtccagacactcttgacagcttggactcaggcgcgacccaggcattcaccgtggacttcacccactacaccgacggcacggcaaactacaccatggctgacaccattcccgagctgacagtctctgccagtgcagtcaagggcagcttagaccagagcgaagtggagactcagaacaatgtcgccacattcacttacacgggcagccaaaacggtgaagagaccgtaacgttcactaatgccaatctaagcatccctgtaaagttcgtggttggggaaggatactttggaatcgtgtacgtagctaagaacggcagcgatgagaacaagggcagcgaggacgcgccggtggcaacgatcgccagagcagtggagatcgcgcagcgcggttctggccaaatcatcatcacggagggcgtctataatgaaaacaacatcactataaatagcgaaatccccatttccatcaaagggcagggcgacgtggttatcgatggggagggattgtcctcactgagcatcttcaccatcaaatccggtgaagtgtcaattgagaagatctcgttccggaacaataaggccaaatttggggcaggggtcaatgtgcaaggcacctccggttcatcactgctggatgcaaacgtcctgatcaatgagtgtaactttgacaatctcagctcagatgcctcaggcagtcaggggggagcaatatacgcaaagtacctcaaaggaaacctagtgatcaacaattccaactttacaaactctattgttaaaagtggggggggcgccttaaccgtggcctactgtgcatatgaagacgctctggacctggtgatttccaattgcaactttgagaacaacacggctaataacgggggcgctgcatacctgatggctaatacaatcaatattgtaaacaccagctttatcaacaacaacgcgacatacagcccgggggcactggaactgtataattgtactggaactatggacaattgctctttcataaataacagtgctaaaaacaccgcggccgcatttaaacttgagtttgtgaaggatcagcctatcaccagtctgatagtgactaactccatatttaaggacaatgttgggcgggatgaagtcgctcccgctatattcgtggaccgcgccagcctcaacatctccaattccatcctactgaatcccctgaatattaataccagcacagtgaccggatacggggccgtccctggccagggggtcaccgtggcaaacagtaactggtggggaaccaatgaaaatccctctaacctcaccgccggcagtggggacaatgtcaacaccacaatagacaattgggtgatcatgaatgtcagcccaacggaggccatcggctacactggcgaggccctagagataactgtggactttaagtacactatgagtgcggatggcactatcgaaacactcgcaggtactttacccgaggagtttaccgtcaatgctaatgcggccaatggtacgttggataagaccacagcagataccagcaatctgcaagccaagttcgccttcactccggaatttgctggcgagaacatcgttaacatatacaccacagaatccaataccgtacccgttaccatcatggtgaccgagaaatacgcaggccccatctatgtgaccaaagacggtgacgacgagaacgagggttccgaaaacctccccgtagccaccatcgcaaaagccattgaactggcccagggcaaatcgggcctgatcttcatcggtgagggtacttatgttgaatccaacctcacaatcagcaaggacctgaacatcacagcacttggcgaagtgatttgggatgcgaacgggcagagggcattctccatgtctacaggcagtgtatccatttcaaacattacattcatcaacggtaactacacccgcaatgggcacctgatctactgtgctggggacagtctcaaattcgatgagtgcaagttcttgagcaacgggggaaatgtgactgggaccaacggcgtcatctatgtggagctggcctccgcaaacttcaacaactgttacttcgagaacaacacggccgggactggaaccagctatgggctgatctccgccaaagactcggtgattatagtggatggctgcacctttgtcaacaactttaataaaaacggctgtatttatgtgagcggaagcaacatcgggtccatggctgtcatcaacaataccaagttcattggaaacaatgcgacctctgccagcggagggtctggtggcgctatctacgcaagcggttcaatggcttaccagtactcgaacggtactgtacggcctggcgcccagtctgcggtctatgtaattgactgcgactttatcaataacacggctttcggcgggaaatactacaacgctgaaggcggagctatcttcgtcaatgcaaatgccacactctatgcctctaattcacgcttcatcgataataccgccctggactatgaagaaactaataaatcagggcggggaggagccattgcggccacaacagggaatgtacaaatttcaaattgtatattccagggcaacacggctaacaatggttccgttatcgccatgaaatttgcaaacaaagacctcacaaccgtcaatgtcttaagcatcagcaactctgtgatcatgggccctggcgagaagctgattgtctctgacttcacgaacgggtcgttagtggccaacaacaactggtgggcagcgaatgagaacccatccgatagggtcagcgaaggaatcactgtcgacagttgggtcatcctcactgccgatccaagtgaaatcactggaaccctggatgaaattatcccaatcgttgccaacttccgtcacaccaacagcactgatggaacgatcggggatctcgagggagaatttccagagctcgaagtgttcggcatgactctggatgaaggggagattactgaatccaaccttacggtcgacaatgtggctaccctttactacacgccagaggaaactggggagaccacggtgtatgctatttcgggcaatgccatggtgccaatcaaggtaaccataaccgacactccccagcccgttgcagatgttatctatgtgtcaccatccggggctgacaccaatgccgggacatacgaggctccggtggcaaccattgcccacgccgtggaactggccggggcggaaggggcttcaggattagtcgtcattgaagaggggatctataacgagaacggcatcgtgatcaactctgcgatccctattaccattacagggaacggaactgtgatcatcagaggaaacaaccatgtcgttaacggaaacggagccggcagattcggcgacgttagcgagtccacaagcataataatcgttaacacaactgaggctgtggtgattgcaaacatcgcatttgaagacaacattgctgcaaacgggggtgcaatcctcattgctggcaccagcagttccaacctgttcgacgcggatgtactggttgagaactgcagtttcaataacttgcagggaagaaatgggggtgctatctatgcatactacgccattggcaacctaacggtagccaattgcgaatttacaaacatcaacgcaacgtgggctgcgctgtgcgcataccaggccgcctatggcgaagggctcactgtcgagataaaggactcaagctttacaaacaactctgccaacaatgcccccgcactgtacctgcaggcaaccaatgtggtcataaaggattccaactttacagacaacaatgccacctaccaccccggggccatctacttgcagaacacgacggccaccatcgacaactgcattgtggcaaacaactctgccaaatacgacaaggcagctattgcaatccacggaggcaatatccagtacaacccagtgattgtgaaaccctctgaagtcaccattacaaactctattatcgaaaacaacatcgggagggacaaggcagcccccgctatctacctcgaaaactccatcctgaacatgtcgtactcttctgtcgttaacgagatcaacattaacaataccgtgaccgccacctatggagacgagaaacccggactggtgctgatcaacaacaactggtggggaaccaacgacccaagcactaccatattcggtaccaacatcaccatggacaattgggtcatcatgaatgtcgaggcaaacgcgactgagatccttgctggcgaggaggtcaagctgacggttgactttaaccatgtcaacaccaccgccggggagatcgaggagctgaccgggggagtgatcccacgagaatcctacagtgtagccctttctgtggataatgggacggtggcccctgagaccctcaccattgctaacggagctaccggcgaagcaattttcaccgccgctaatgcgaatgcattaataaccgtgacaagcgaaaacgcagtggagactatcttgattaatgtgggcgagcagccagtgcccttcactggcgtggtgtacgtctccaaagacggggatgacgccaatgaagggtctgaggatgagcccgtcgctagcctggcaagagcgatcgagatcgctacagctgaggagggatcggggcagatcatcatcaaggagggcacctacattgtggacggctacaacattaccaaggacctgaccatcaccggggaaggcgatgtaatactcgatgcgcagaaccaaggcaacagactgttcaatatggcctatggtactaccgtctccaatttcgaactgcataaccttgtgcttgctaatgtgactgccatgtacggcgccgttgtttacagctacgcagctaatgcagtcctcgacaacattacagtggctggaatcaaccatgagatggctaggctcatctcaaactatgggaatttgacaattaaagactctgtgtttgccaacaacaccgtgagcggaataatcacccactctggaaacaataatctcaacatcgtcaatacaatatttgaaggcaacaacgtcacatatgattcctctatcatgggggtggtgtatgtgtcctcaggcagaggcaacataaccatcgaggactccaagttctatgacaacctggtccggcaatccacagtgcgcggttacacagatactaacatcacagtcaagggcactgaatttatcaacaacacggcagacaactctccatattactgctcgggcggcgccatctttgcccaggcgaatctggacgtaacagagtccatattcatcaataacaatgctagacgtgagggcggagccatctacattggaatcaatggggtggccaacatcaccaaatccgagttcatcaataacacaatctatgataatgagtactatggcgatgctatctacaccaagggtaccaccgccatcaattactgtatattcctgacaaatggcacacgctatgccgtgtacaatggcggatcgaaagaggtaaatgcgcaatacaactggtggggcactaacgacgatcctcaaggattcgcttacagcgccgatgcctctaactggattattatgactgtgaccgctccaagcactcaggatatccaggccggagacgagtacgagttgactgtggacttcaaccattacaccgatggcagtgacattctggagctgccagatagcctggcgcaggaactgaccgtggaatttacctcgaccacaggcacatttgacaatcccgtcgtgactaccgaaaatcaggtggccactgccaaatacacggtagtggccggtgaaaacagtatcacagttaaatccaccgacgccgtgtggaacaccagtttcacggccggagaaaaggctaaggctaagatgaatgtgtcaatggaaaacaacacaatcatcgttaccctgaccgatgaggaaggagcccctatcgccggcaagaccattagtgtgctcattaacgaggacacactttccaacgagaccaactcaagcggtatcgccgccatttcgctcggcactctcgatgctggcacttatccagctacaatcagcctggccgacagcgaatatcaggccccagagctcaccgtatttgtgctcgtagaagagactctggtcgacaaccccataggggccgtcattgaattggcccttgccgaaaacggcacttccatcgaggtgaccttgaaggacattaacgggcagccgatcggcgacacgatcgttagatattacattggaagcaccgacggagcgctcctgcctatcgacgccaacgggaagggctcatttgacatcgacaacaccgtcaatcagaccattaaggtcagctacactaaggagggcacggaatggtcgtcgtattatgactttattgtcaacaatgaagtgactcccgttcccgttgccaataacgcgaaattcgatgtgattgtgcgtgaggatagcatcgacgtgttcctgtacaacgataacctggacgatttcgagggcgcgaagattatggtgaccatcggggaggaagatcccgtggaatatattgctggagagaacggaaacataaccatccccatcaatggcgataccactgtggagctgtcatacactgacgagaacggcgcgaccgtctaccacaccgttaaagtgtccacgagtggggtggacccctctgccgagattgagattatcgtcgagtctcataacgacacttctattgaagtcagcgtaaccgttgatggtgatgatgtcagtgatggtgagattacctattacatcggcgacgatgacgatggaaccgtggtgcctattgaagacggaatcgccatcatcccattcgacaatactgttaatcagaccatcgagatcacatactcagacggtgacgccacagagagtgtatactacactatagttgccttcacgcacgaggtgcccgttgagcctcccgtggccaatggcagctttgatgtggaaacaactgatgatgccattgttgctacgttggtggactctgatgggaaacctattgctgatgccactgtgtccgctatagtcaatggcgaagagcaaaacttcaccactgatgcggatgggaagctaagcgtgcctattgatggcaatgcaaccgtggagctgagctacacagatcccgaaaacggggccgtcctgaagtatgtgacggacgtggtgaccaaggaggtgccgattgaggtgcccgtggtggctaacggcactatgagtgtagagacaacggatgatgctgttgaggctaccctggttgacagtgacggaaacccgatcgaaaatgccactgtcaccgccgtgatcgatggggaggagcagaacttcacaactgatgcagatgggaaggtcagcatcccggtgggtgaaaacgctacggtagagctttcatacactgaccctgagaacggtgcagtggtgaaatacagcacgaaagtcgtgacgaaagaggtggaagttcctgtggacgttcctgtggtggctaacggcacattaaccgtggagacaactgacgatgctatcgtcgctacattagtggacagcgacggcaaaccaatcgctaacgcgaccatcattgccgtggtggacggcgaggagatggaaataccgaccgacgaggacgggaagtgcagcgttctgatcacaggaaacaacaccgtcgagttcagctacacagatccggccaacaacgcgacagtttcatactccaccaaagtggtcactgaggtcgaggaagtcatcgtgcccgtgcccgtggtggctaacgcgacaatctcccttagcactgaggacggcagctcaatcgtggccaccctaaaggaccttgacggcaacgctatagccaacgctacactggacgccaatgtcaatggcgaggagacgaagctcacgacagatgcaaacggaatcgcaacgattcccgtgtctgccaacacaacagccgtggtctcctacacagattctaacaaagcgacggtcaccagctcaatgagcctaacagtcatcgaaaccatcgttgaaatcaacaagacaatcgaggttcctcccgtacgcaacgcatctcagatcgtgtgcgaagacatgaacacaatcgcagtggcaaaagacgatggccgtatcggggagtacttctacgtgaagctcgttgacgccaacggcaatgccctggtcaacaagtccgtacagatcggattcaacggcagagtgtacaaccggacaacgaacgagacaggtgatgttaaactacaaatcaacctcgcctacaaaggaacctacacattcgcgatcgcatacctcggcgacgacaactacaacggttcatttgtcgtgtcgaagattaccgttaaacagcaatcccctaagattacgacaacgtccaagacttataaggcgagcgccaagacaaaggcattgaccgctacctttaagacagcaaatggcaacctcatcgccgataagactatcaagtttacggtaaacggtaagacatactctggcaagaccaatgcaaagggggtggccactgtaaaagtgagcctcaacactaaaggaacctacagctttacagccaagtacgctggagacgacacctttaaggcaactagtgccagcggtaaactgactattaaatga

SEQ ID NO: 2302 - DNA, 8031 bp, synthetic construct
  source 1..8031: mol_type = other DNA
atgaacttcaaaaagctgcttatgatttcattaatccttttgtttgtcctctccgtcggatttagcacagcaagcgctatcgacagcgataatctattagatgaaaacaacaacatcaacgtgaactacattgactctgacaactcagattcgattctgatctctgacaattcaaacgatgctaagtcaaataatctgatattaaacaattctatcaacaaaaaagaattgaatgataactccaactctaattctaacctggagtgtgactcgtcaatcaacgagaacctcgatctcgagaacaactacaagattaacgagaaaagcgcaggtcttaaagacaatacaaataccatttacgtatcggtagacggaaacgacgagaatgatgggttgacgctagagaccgccgtggcaaacatctccaaagccgtctccctcgcgggcgaagggtacaccatccacatctccagcgggacttacgaacagaacaagtccacccaactgagccatgctttcaacttcatcggagaggatggaacaatcattaaaagaatcggcaccgccaacgcctttacctacacttcagacacgaaaaagaccataagctttaaaaatatcattttttcttccaccaccccaaacccaagcaaccccatactgagcatggcgggaggcgccgacctgcagatcgacaactgcaccttcaccgacgccatcgcaggtcgaaacggcctgatccggtacttggggtcaagtacaggcaagatcacaaacaccaatttcattggattgaccggctcgaccagcgcgtcttccagctatatcactgccctggcccagtctaaggtcaaggtggagaattgtaccttcgccaatatcaatgaaccaggctttttaaactcactcgtgtatgtcaataacaatgagactaacctgacattggtcaactgtgtgttcaataatattaccggcaatctcaacgctgtggttaacaatagagggtatatgcagattaagaactgcagcttcacggatatctcacttagcggcaacagcccccgcgggattgtctggtcttcagaaaccatttcaaaaaactcaatcacgtacataaactcatctgtgttcatcaataattctgtaaacacagaagtggttgtcaacagttcagtcattcaggccaaatctcctactatcgttgaatacagtgcattcctggacaatgacgtggtgtttataatcaacaatgacaacgacactgacgttactgccaattacaattggtggggaactaatgagggccctaaaaactgcagtgtaaaccgggagtccagcgccagtagcaacccttcctcctccagtgaggaaaagattagcctagtctccgacggagtgacagtggacaactgggccattatgaccgtagacctagaaacgtcaggcctgattgccggtgaagactacccaatcataatcaatatcaataaatacatgaacgagaggggagagatcgactcgtccgtagagtatggaatcagcggtgccgagatccttctcagctcgcagatagggaccttcaattccgatttcattatttacaacgaggacaatggaaacataattcagaatcaggcgaaagtctatacaaacaacggcgccgtcaccgtgttctacaaagccaccgaagaagggtcagataccctgaatatcagttccggatatgaagagattgtatacaacctggaatttggccaatcaattgaatacaacgacatttacgtgtctaaagacgggaatgacaacaacgatggtcttagtaatgaaacctctgtgctgaccattgcccgcgcattggagatcggcgaaaacctgaactccaatatacgcatccacattggctccggcagctatcatgagagtggatttgaattgaacggaacgtacacagtgcaggatggggtcctccaggtgaaacggaccacatactcattcatcggatatggcaacgtggtgatcgacggagacggccaaaacaaaagcctcttcaccgtgcgaaacaattctgtgtcctataaaaacatccggtttacaaatgttgacggtgccacctacggtggggcaatcaacggggacaacctctatcgacggactgcgtacattgatctcaccatcaataattgcacctttgacgacctgcatgtgaaatcttccggaggcgctatctacttaaattacgtctcggggaggatctccataaacaacaccaagttctacaacctgacgaccaatagctcgtggggtggggccataagcgcggaagaggcctttgacctggcacgcgtgaaggtgactaactcggacttcagggacaactatgctaacaacgcccccgccatgtatttgagggtgagcaacgtcacagtcctgaacagcaattttattaataacagcgctaaatattaccccggcgccattcacttttataatgcctctgcaattatagagaactgcgtcatcgccaacaactctgcgaagaaggattctgcggctataaagatcagcgaaggcaccaatgatgtgggcaataagatcatcatcaagagctgtatcattgagaacaacagcgcgcgagatgagatttcccctgccatctacgtggagaagggtgcactcgacatctcctacagctctgtcgtgaacgacctgtccattgccacaagaacctactactcgaacctgtacggtctccaacaaggcgtggctatagctaacaataactggtggggactgagcaatccattcggcgaaaatgagattggcggaaactactcctcactccttgggggcgtattcaacgggtctaacatcactgtcgacagctgggtgattctgaacgcagtcttaaacgatacaggtgttctcaaggtggggaacattgtgaatattagtatcgacttcaatcacgtcaacactacacgcggagagattgagctcttgagcggaggcaagatccctaaagagtacactctgcgcttaaacgccactggaggtatcgtgtatcccaactatatgaagacagtgaagggggaggccaattccaagttcacagtgagggacttggacaatcttggggacgacttcgcctcctgcggcttcgatatcatatccgacaacgagattacccacatcgtcttcgagataaacaactacaagggggtgatctttgtgtccatgtcggggaatgacgattgcaacggctctatggacgctcctgttagaacaatcaataagtctatagagcttgccctggacgaggagtttggttctcacgagatatttgttcttcccgggacctacgaggcatacggcatcgagttagacagcacctacctgagcattaccgggagcggcagggacagcaccatcctggacggcgtgggctatacaggaggcatcttcaacatatttgagtcagagctgactgtgaaaaacctgaccgtgattaacggagtcaatacagtctcctctggtggcgcctttacaaacatgggcaatctgacgttagagggtgtcaacgtctcaaactgtcaggttaggaatgcaaacggtgcagctatctatagcgtcggcaacctcaatctgataaactcaagctttgtgaagaacacagcactctcaggcaactacgccaacggaggggttatttacgccgatggatattccacgtcccttccatatcctccaagcctcaacatcacggactgcgaatttatctcaaatgcagcacagggctcaacattcggcggaggggtgatctatgcccagtaccttgacggatataagtccatcaaaaactccaaattcatcaacaacacggccgagtttggcggcgcaatattcctgcaggactccgaaggggatttcataattgacaatacaagcttcattggaaacaaggcaacaggccaggccggttccaccaacccatactatggtgggggcgccctgaacctgattggcagaaccgacggccgagagggcaatttcattatcaccaacagcctgttcattaacaactcggccaagaacagccgtgggggaggagctatcctagatcggaatgttgacctgaacatcactaatagcgtattcctgaacaacacagacacaaacaagagcgtgcaggtatttaaggacaccaccgtgtacttccctagcgggggaagaattagcctggaggacaattggtggggagctaacgagttgagctccctgtctaccgttgcggcgaacgtgacgattaaccggtgggtggtgatgaatttatctgttgagctgatcgacgatctcgattcatggggtcttaatctggggaatagtctggatgacggcttaaacactgatctgggcaatacactcactgaaaacaatttgaataactatctagtgaaagttctgctgaatgagtacaacgatggaaccctaatagacaatcctaattactatccccttctccgcttgtacactctggagtcttctgacggagagatcaacccgtcctttggcattctgcaaaacaactgcgccacggccctgctgagctctagcaaccgcgaaaatgtgattcgggccactatcgatggagaaacgctggaatttaacaccatcgacctgtacacaaaaacagttctggacatcgaatttgactctccaattaaggccggggagaaccttaccgtctacctgaacctcacagacatcgacgataacccgattaatggaactgtgattctcaacatcagcagcgatctgtatgagacagtcgagacagtgaacgtaaatgagggcaaaggattcaaagagttcagcggattgaaagtcggtgtgtacacagttttggctaactattacggccagtcaatctatctggactccaatgacagcaaagtccttgagatatccccgatctcctcctatttggacttggaatctaaggagatcagtatcttcctgggattcggcaatctaacgggcactctgagtgatgataacggccccatctcaaatagaaacgtgagcttgattattgatgacgatacaatactcaatggactgactgacgaaagcggacagttcctaatcgacctcagcagcctgaaagtgggaaattattcggacttggaactggtctttgaaggtgatggggatcgcctgtcatcctccgaccttgtgaacatcactgtgaagaagattgtgctgaacctgaatctgattgtcgaagatgattctatcgtggtgaacctcagtatcgacgattcggttctggactatctgggggtggacgactcactcgacgatataagtctcgaaggcttgacagttctcgcgttcatcaacgagactgatcgtgtctccgatttaatcaacaagagcgcaatcacagacgacaacgggatcgctactattgacattagtgatctgaatcctggcaacttcaccgctctggttagcctcaaagagaatgataattttgagatagattctaacaaggatataaacttctccattgatcggtacaagaccaatctcactgctattattgacgagaacaatagttacattctcatcaatctcacttccgatatcggtcttgacagtaaaactgtgtccgtgacgatcgggaatgagtcttttgacgtgatcacgaatagctcgggcctatatgggctggatatcagcgatttggcccccggctactatgattgtctgttcgtatttgatggtgatgactattacgactcgtcctctgattctctgaacttcacaatcgagaatcgtatgagtgagttaactgcaatcatcgacgataattatgaatctatcctcattagcttgacctgcgacggcattggcctggctggtaaaacgataagtgttactatcggtaacgagtcgttcgagcttataactaatgactcgggtctctatagtctggatatcggggacctggtgcccggctactatgactgcctgtttgtcttcgctggggatgactactatgattcttcctccgattcgctgaacttcaccattgacaagtattccagtgaccttactgcgctaattagtgaggattctatcctgatcagtctgtctagtaataacctgggtctcgacaacaaaacgataagtgtgacgatgggaattgagtcgttcgatgtaatcactaacagttctgggttctacagtcttgatatcagtggcttggggcccggagactatattgattgtctgtttgtcttcgccggtgatgactactacgattcgtcatccgattctctcaatttcacaatcgacaagtacgacacgaagctggacgctaaaaacaccattggcagttttgctctcgtgaacctcgatgccaaactgaccagtggtgaaaatgcgctgaaggacaagtccatttcccttcacattgctaataagaccttcactaaaaagactgacgaccagggtaaagttgtttttgacctgtcttcctttgatcccggtaattatattgctctattgagcttcgcgggggatgaatactacaaaaattcaactgttagcgtggaggtcatcatcaacaagctcaatgctgatctgagcagtgaatttaaggataagaaattatatatttctctgagtcacaagggcgctcccgtgaaatatatgaatcttgctatcgagataatcgattcatcaaacaagtccaccgtatccaatgcactgaccgataacgagggtcatttcatcatggatctgagcgatctgagtcccgacagttacgtgagcatcataagggccattggggacaagatttataaccctgcaagtgacgaaatagagttcgtcattgggggcgacactccctctaagtccaccagaaccgctgccgacctgcagaaactcatcgatgatgcaagtagtggcgatatcatcgaccttggggaatacgactacctcaatgtgtctaatattaatatcacaaaggacattgtgctcattggaaacaacaccagcatctccagttccggagatggcaacccaatcttcaatatcgctaccgggttgagttccgtgaaaatcagtggcattgactttaatgccagcaatggggatgtgatcgttaaggcaattgctcagaacggaaccgattcattgtccatcattgtgcccgctattgaaatcaccaataacaccgtgatgggagacaatatagtgccagaatccatcacgatcctggaactggattcagataggggggtgcttgctccgaataacgagatctacattgccaacaacacgctggagatcggcatgaagccgtttgaatttaaggtcaagagctttgaaaatgactcaagtgcgaatgtgccgatcggcggggggctgaacggcaaaaagacgtccatcatccattacgagaatatggacacggtagcagtcaatatggatatcgaaggcagagtggggaagtactttgaagtcaatctaaccgattccgacggcaaccctctcgccgataagaaggtgcaaatcggattcaatggtgtagtttacaatcggactaccaacgccaccggcggggtcaaactgcagataaacctcgggtataagggcacttacacattcgccatctcatacctaggggacgacgagtacaacgggagctttgtcgtggcgaagataaaggttagcacccagaagacaagtcttaccagcacctccaagacctacaaggcaagtgccaagaccaagacgctcacggctacactgaaggactccaaaggcaatctgatagccggaaaaacagttaaattcactctcaacggcaagagctattcagccaagacaaatgccaaggggctggctagcgtgaatgtaagcatcagcagcaagaagacctatagctttacagccaagtatgctggagatgatatgtacgcatcttcctccgccagtgccaagcttgtgatcaagtga

(The sequence listing continues in the following parts.)

1-202. (canceled)

203. A vaccine comprising at least one ribonucleic acid encoding at least one cell surface protein or a fragment thereof of at least one methanogen.

204. The vaccine of claim 203, wherein the at least one methanogen is selected from Methanobrevibacter ruminantium, Methanobrevibacter gottschalkii, Methanobacterium formicicum, Methanobrevibacter smithii, Methanobrevibacter sp. AbM4, and Methanosarcina mazei.

205. The vaccine of claim 203, wherein the at least one methanogen is Methanobrevibacter ruminantium.

206. The vaccine of claim 203, wherein the at least one methanogen is Methanobrevibacter gottschalkii.

207. The vaccine of claim 203, wherein the vaccine is monovalent.

208. The vaccine of claim 203, wherein the vaccine is multivalent.

209. The vaccine of claim 208, wherein the vaccine comprises at least one ribonucleic acid encoding at least one cell surface protein or a fragment thereof of Methanobrevibacter ruminantium and Methanobrevibacter gottschalkii.

210. The vaccine of claim 203, wherein the at least one cell surface protein or a fragment thereof comprises at least 90% sequence identity to the amino acid sequence set forth in Table 2A, Table 2B, Table 3, Table 19, Table 20, Table 21, or a fragment thereof.

211. The vaccine of claim 203, wherein the at least one ribonucleic acid comprises at least 90% sequence identity to the nucleotide sequence set forth in Table 2A, Table 2B, Table 3, Table 19, Table 20, Table 21, or a fragment thereof.

212. The vaccine of claim 203, wherein the at least one ribonucleic acid is codon-optimized for expression in a ruminant.

213. The vaccine of claim 212, wherein the at least one ribonucleic acid is codon-optimized for expression in Bos taurus.

214. The vaccine of claim 203, wherein the ribonucleic acid comprises the 5′ cap with at least one chemical modification.

215. The vaccine of claim 214, wherein the 5′ cap is selected from:
(a) (Cap 0) m7G(5′)pppN1pN2p;
(b) (Cap 1) m7G(5′)pppN1mpNp;
(c) (Cap 2) m7G(5′)pppN1mpN2mp;
(d) (Cap 4) m7Gpppm(3)(6,6,2′)Apm(2′)Apm(2′)Cpm(2)(3,2′)Up; and
(e) Anti-reverse Cap Analog (ARCA).

216. The vaccine of claim 203, wherein the at least one ribonucleic acid comprises 5′ UTR, 3′ UTR, and/or a polyA tail.

217. The vaccine of claim 216, wherein
(a) the sequence of the 5′ UTR is selected from those listed in Table 4A; and/or
(b) the sequence of the 3′ UTR is selected from those listed in Table 4B.

218. The vaccine of claim 203, wherein the at least one ribonucleic acid comprises a sequence encoding a signal peptide.

219. The vaccine of claim 218, wherein the sequence encodes a signal peptide selected from those listed in Table 5A and Table 5C.

220. The vaccine of claim 203, wherein the at least one ribonucleic acid comprises a sequence encoding a transmembrane domain and/or a cytoplasmic domain.

221. The vaccine of claim 220, wherein the sequence encodes a transmembrane domain and/or a cytoplasmic domain selected from those listed in Table 5B and Table 5C.

222. The vaccine of claim 203, wherein the at least one ribonucleic acid comprises:
(a) a 5′ cap, a 5′ UTR, a sequence encoding at least one cell surface protein or a fragment of at least one methanogen, a 3′ UTR, and a polyA tail;
(b) a 5′ cap, a 5′ UTR, a sequence encoding a signal peptide, a sequence encoding at least one cell surface protein or a fragment thereof of at least one methanogen, a 3′ UTR, and a poly A tail; or
(c) a 5′ cap, a 5′ UTR, a sequence encoding a signal peptide, a sequence encoding at least one cell surface protein or a fragment thereof of at least one methanogen, a sequence encoding a transmembrane domain, optionally further comprising a sequence encoding a cytoplasmic domain, 3′ UTR, and a poly A tail.

223. The vaccine of claim 203, wherein the at least one ribonucleic acid comprises at least one chemical modification in a uracil, optionally wherein the chemical modification is in at least 75% of the uracils in the sequence encoding at least one cell surface protein or a fragment thereof of at least one methanogen.

224. The vaccine of claim 223, wherein the at least one chemical modification is selected from pyridin-4-one ribonucleoside, 5-aza-uridine, 2-thio-5-aza-uridine, 2-thiouridine, 4-thio-pseudouridine, 2-thio-pseudouridine, 5-hydroxyuridine, 3-methyluridine, 5-carboxymethyl-uridine, 1-carboxymethyl-pseudouridine, 5-propynyl-uridine, 1-propynyl-pseudouridine, 5-taurinomethyluridine, 1-taurinomethyl-pseudouridine, 5-taurinomethyl-2-thio-uridine, 1-taurinomethyl-4-thio-uridine, 5-methyl-uridine, 1-methyl-pseudouridine, 4-thio-1-methyl-pseudouridine, 2-thio-1-methyl-pseudouridine, 1-methyl-1-deaza-pseudouridine, 2-thio-1-methyl-1-deaza-pseudouridine, dihydrouridine, dihydropseudouridine, 2-thio-dihydrouridine, 2-thio-dihydropseudouridine, 2-methoxyuridine, 2-methoxy-4-thio-uridine, 4-methoxy-pseudouridine, 4-methoxy-2-thio-pseudouridine, 5-aza-cytidine, pseudoisocytidine, 3-methyl-cytidine, N4-acetylcytidine, 5-formylcytidine, N4-methylcytidine, 5-hydroxymethylcytidine, 1-methyl-pseudoisocytidine, pyrrolo-cytidine, pyrrolo-pseudoisocytidine, 2-thio-cytidine, 2-thio-5-methyl-cytidine, 4-thio-pseudoisocytidine, 4-thio-1-methyl-pseudoisocytidine, 4-thio-1-methyl-1-deaza-pseudoisocytidine, 1-methyl-1-deaza-pseudoisocytidine, zebularine, 5-aza-zebularine, 5-methyl-zebularine, 5-aza-2-thio-zebularine, 2-thio-zebularine, 2-methoxy-cytidine, 2-methoxy-5-methyl-cytidine, 4-methoxy-pseudoisocytidine, 4-methoxy-1-methyl-pseudoisocytidine, 2-aminopurine, 2, 6-diaminopurine, 7-deaza-adenine, 7-deaza-8-aza-adenine, 7-deaza-2-aminopurine, 7-deaza-8-aza-2-aminopurine, 7-deaza-2,6-diaminopurine, 7-deaza-8-aza-2,6-diaminopurine, 1-methyladenosine, N6-methyladenosine, N6-isopentenyladenosine, N6-(cis-hydroxyisopentenyl)adenosine, 2-methylthio-N6-(cis-hydroxyisopentenyl) adenosine, N6-glycinylcarbamoyladenosine, N6-threonylcarbamoyladenosine, 2-methylthio-N6-threonyl carbamoyladenosine, N6,N6-dimethyladenosine, 7-methyladenine, 2-methylthio-adenine, and 2-methoxy-adenine, inosine, 1-methyl-inosine, wyosine, wybutosine, 7-deaza-guanosine, 7-deaza-8-aza-guanosine, 6-thio-guanosine, 6-thio-7-deaza-guanosine, 6-thio-7-deaza-8-aza-guanosine, 7-methyl-guanosine, 6-thio-7-methyl-guanosine, 7-methylinosine, 6-methoxy-guanosine, 1-methylguanosine, N2-methylguanosine, N2,N2-dimethylguanosine, 8-oxo-guanosine, 7-methyl-8-oxo-guanosine, l-methyl-6-thio-guanosine, N2-methyl-6-thio-guanosine, and N2,N2-dimethyl-6-thio-guanosine, and any combination thereof.

225. The vaccine of claim 223, wherein the at least one chemical modification comprises N1-methyl pseudouridine.

226. The vaccine of claim 203, wherein the vaccine is formulated in lipid.

227. The vaccine of claim 226, wherein the vaccine is formulated in a liposome, a lipoplex, or a lipid nanoparticle.

228. The vaccine of claim 227, wherein the vaccine is formulated in a lipid nanoparticle comprising an ionizable lipid, a helper lipid, a PEGylated lipid, a structural lipid, or any combination thereof.

229. The vaccine of claim 227, wherein the nanoparticle has:
(a) a mean diameter of about 50 nm to about 200 nm, optionally about 80 nm to about 100 nm;
(b) a polydispersity index (PDI) of less than 0.4; and/or
(c) a net neutral charge at a neutral pH.

230. A method of inducing an immune response against at least one methanogen in a ruminant, the method comprising administering to the ruminant the vaccine of claim 203.

231. A method of reducing the activity, number, and/or type of methanogens in the gut of a ruminant, the method comprising administering to the ruminant the vaccine of claim 203.

232. A method of reducing the amount of methane produced by a ruminant, the method comprising administering to the ruminant the vaccine of claim 203.
